United States Patent Application Publication US 2006/0194265 A1 - sequence listing, part 6

SEQ ID NO: 861 - DNA, 101513 bp, Homo sapiens
caggtagatcacttgaagccaggagttcaagagcagtctggccaacatggtgaacccatctctactaaaaaaaaatacaaaaaattagctgggtgtgatgacatgcacctgtagttccaactactcagagaatcactttaacccaggcttgggaaacagagtgagactctgtcttaaaaaaaaaaaaaaaaaagcatccagaaatgtggtctaatagtctgtatctggatagaagaattgagcttcttgtttctggttgggaatttcagtactatttaaaaaaaaaaaaaaaactatcatctgagtttggatgccctaaaagctgaccttgaggcaagcacttgggtgtaacagtttattgtgggcaaagggatgtcttagaaagttagattagagagaggcagagaaattgtaaaaaatgttttatgcatctctaattgttttacatgctttaccttagtaattttttaaaatctaattttaaaaagtgtaacaaaaaacactacttgccagacgtatctacatgaatgtcacaccaatacctcagacttatctctagaacccagcgagcactatctaaacacactctccatctcccccaacaccatgcacccctccaccccaccctgttcttccccattccaactcttccatctggttgctttatgttttgtttttcatgatattaccagtgtctctgtcaccaggtctaaaaatgccggtcatattttacttccttttagtaccaacaccacacaatacacatcaggttttttccccaatgccttacgagttctttcattttccctgccctgctctttatgtaagtttgggtcttgaaactgcctttatgcctacaccatttatcagcaaccaactgtcttttgtctcctcattgtatatgatatttaatttgactacattatattatctaaggtatatcatatcttcctttgtaaattataaactgagattaggactcactttttatacagtttcatatctgccaaaggacttagcgtattgttttgcatgtaataattaatgaacataaacctataaatttccagcttatgacattaatgatgtaaaaagccaaaatcatgtaaaggccatttaaaaaatacagagcacctgctacttgccaggtagcatataaagtgctagagatatggtggtaaacaacaggagcaaaacaaaggatgttttctactctcaaattctagtgagaaagatataatgaaaaaatatatgattataaattaaagagttctggagataatgaacaggattgtctggcagataatattatagtgacctattttaaattggatgggcagaaagtcctctgtgaggacatctttaagctgagatggaagaaagagaaagaggaattatgtgaaaagtcagaggctatgtgtccgagaagaggtaataatatggtaaagaccttgaggataaaagaaaccttgatgcacttaaggaaattaagaaaggccaatatgacaaaagccaagtgatccagggggagtgaccaatgctaaggctggtgctgtagtcagaagccagatcatagggtccttttaggccacgttgagtgtggtttgtactacaagaaagcgatggaaaactatttaaaggatttaagcaaaggagtagttgcctgattcatttagaatcttgaaagttcactttagcttctgtgcagaaatttgatgaggtgggggaatgacaaagggagaccacgtagcagattcttaaatagcccagatgaaattatcttgtgaaatggtagtagctgtgcaaaagaagattcacataagatgggcttgagatatattttagaggtcaaattgataggaccttgtgactgatggattctttgtttaagttagagggaggtattactttccaaatttctggcttgaacaactggtcagatagagtgcccagttgttttgaaaagaaagagattgggtggaagaatagtttagatgagaagtcagggaaccagaactcagtgttaggtatgttacgcgcacaatgcccactatacatccaagtggagatgtctggtaggcagtagaacaaatgaacccggaactctgaagaaaggtcaaggctggagacataaactggagactcatgatatttgtttatttatttcatgtcaaacaattgagggtatatttaaataactcatgaaatagctgattgattaacagatattgcaacatgtatataaaaaaatcaaacttttttttattattatactttacgttctagggtacatatgcacaacatgcaggtttgttacatatgtacacatgtaccatgttggtgtgctgcatccattaactcatcatttacattaggtatatctcctaatgctccttcccacctccctgcaccccatgacaggccccggtgtgtgatgctcccctctctgtgtccaagtgttctcattgttcaattcccacctatgagtaggaacatgtggtgtttggttttttgtccttgtgatagtttgctgagaatgatgatttccagcttcatccatgtccctataaaggacatgaactcatccttttttatggctgcatagtattccgtggtgtatatgtgccacatttttttaatccagtctatcactgatggacatttgggttggttccaagtctttgctattgtgaatagtgccgcaataaacatacgtgtgcatgtgtctttatagcagcatgatttatagtcctttgggcatatacccagtaatgggatggctgggtcaaatggtatttctagttctagatccttgaggaattgccacactgtcttccacaatggttgaaccagtttacagtcccaccaacagtgtaaaagtgttcctatttctccacatcctctccagcacctgttgtttcctgactttttaatgattgccattctaattggtgtgagatggtatctcattgtggtgttgatttgcatttctttaatggccagtgatgatgagcattttttcatctgtcttttggctgcataaatgtcttcttttgagaagtgtctgttcatatcctttgcccacttgttgatggggttgtttttttcttgtaaatttgtttgagttctttgtagattctggatattagccctttgtcagatgagtagattgcaaaaattttctcccattctgtaggttgcctgttcactctgatggtagtttcttttgctgtgcagaagctctttagtttaattagatcccatttatcaattttggcttttgttgccattgcttttggtgttttagaaatgaagtccttgcccatgcctatgtcctgaatggtattgcctaggttttcttctagggtttttatggttttaggtctaacatgtaagtctttaatgcatcttgaattaatttttgtataaggtgtaaggaagggatccagttttagctttctacatatggccagccagttttcccagcaccatttattaaataggaaatcctttccccatttcttgtttttgtcaggtttgtcaaagatcagatggttgtagatgtgtggtattatttctgagggctctgttctgttccattggtctatatctctgttttggtaccagtaccgtgctgttttggttactgtaaccttgtagtatagtttgaagtgaggtagcatgatgcctccggctttgttcttttggcttaggattgacttggcaatgcaggctcttttttggttccatatgaactttaaagtagttttttccaattctgtgaagaaagtccttggtagcttgatgagcatggcattggatctataaattaccttgggcagtatggccattttcacggtatcggttcttcctatccatgagcatggaatgttcttccatttgtttgtgtcctcttttattttgttgagcagtggtttgtagttctccttgaagaggtccttcacatcccttgtaagttggattcctaggtattttattctctttgaagcaattgtgaatgggagttcactcatgatttggctctctgtttgtctgttattggtgtataagaatgcttgtgatttttgcacattgattttgtatcctgagactttgctgaagttgcttatcagcttaaggagatattgggctgagacaatggggttttctagatatacaatcatgtcgtctgcaaacagggacaatttgacttcctcttttcctaattgaataccctttatttctttcttctgcctgattgccctggccagaactttcaacactatgttgaataggagtggtgagagagggcatccctgtcttgtgctagttttcaaagggaatgcttccaatttttgcccattcaggatgatattggctgtgggtttgtcataaatagctcttattattttgagatacgtcccatcaatacctaatttattgagagtttttagcatgaagggctgctgaattttgtcaaagaccttttctgcatctattgagataatcatgtggtttttgtctttggttgtgtttatatgctggattacatttattgatttgcgtatgttgaaccagccttgcatcccagggatgaagtccacttgatcatggtggataagctttttgatgtgctgctggattcggttttccagtattttactgaggatttttgcattgatgttcatcagggatattggtctaaaattctctttttttgttgtgtctctctcagcctttggtatcaggatgatgctggcctcataaaatgagttagggaggattccctctttttctattgattggaatggtttcagaaggaatggtaccagctcctccttgtacctctggtagaattcggctgtgaatccgtctggtcctggactttttttggttggtaggctattaattattgcctcaatttcagagcctgttattgatctattcagggattcaacttcttcctggtttagcattgggagggtgtatgtgtccaggaatttatccatttcttctagattttctagtttatttgcgtagaggtgtttatagtattctcttcaaactttatttttaattgatacttttttttacctgctgagtaaaagaacgttatgcaaaagcaaaacaaggattcctcaaggattttaaagccaattattgggtgtgtagaatatagtaagataatataatttaaattgtaccttctacgtactctttcttttgtactcttctatgaggatgtttaacacaaaaaaaaaagacagtcacggataattttagaggattgtttcttcaagtattttaattgtatcccccactgaccatccaatacagttatttgatattagttgtgaatatcttttttccttttttaactttgttttattatggtacaatatacatataaaatgtatcatctttaccattttaagtgtaaagtccactggcaataactacatttatatatatatttttccctttatcgccctccacctaccgtttcctctcctatagtaactaccattctactctctatgttcatgagatttgctttttaagctcccacatatgagtgagggcatgcaatatttgtctttctgtgcttggcttagttcacttaacataattgcctccaggtccatccatgttgctgcaaatgacaggattttaatttttttatggttgaattatattccattatgtatgtatgtttctttatccattcactcattgatgggcacttaggttgattccatattttagctattgtgaatagtgctgcaataaacatgggagtgtagatatttcttcaatgtattgatttcctttctttaggatatatacccacaagaattgccagatcatatcatcgttctagttttacttttttgaggaacctctattctgttcttcatagtggctgtaataacttacatttctagcagcactgtatgagggttcccctttgaccccattttgtcaccggcatctgtttttgccttttttatataagccattttaactggagtgaggtgatatctcattgtggttttgatattcatttttctaatgattagtgatgttgtacatgttttcttatacccgtttgccatttgtatatcttcttttgagaaatatctgtcgagatcttttgccaattttgaaattacattctttgttaggttttagttttgttgctattgagttgtttgagctccttatatattctggttattaatccctcatcagatagtgtgccaatgttttctctcattatgtgggttctctctacatttagttgatgttttctttgctgtgcagaagctttttagcttgatgtaatctcatttgtctatttttgttcaggttgcctgtgctttttaggtcttacacaaaaaaatctttgcccagaccaatatcttagagcatttccccaatgttttcttttagtaatttcataatttcaggtctataattcattttgatttggttttggtgtattggttatttcaatagatgctgagatagcatttgataaaattcaacattcctttatgataaaaattctcaccaaaatggatatagaaggaacatacttcaaaataatgaaggccatatatgacaaacctacagtcaacatcatactgaacacagaaaaaatgaaggcctttcctccaaggactgaaacagacaaggataccccctcttaccactgttattctacatagtgcagaaagtcctggccagagctatcaggcaagaggaagaaaggaagggtatccaaactggaaaggaagaagtggtgagaaagttttaattttatttttttgcatgtagttattaagttttcctagcaccatttattaaagagactgtttttttccattgtatgttctttacagctttgtcacagattagttggttgtaagtgcatggatttatatgtggattctctattctgctccattggtctatgtgtctgtttctatgccaatactgtgctgttttggttactatagctttgtagtaaattttgaagttaggtagtgtgatgcctccagctttgttctttttgctcaggattgctttggctattcagggtcttttgtggtttcttataaattttaggaatttttctgtttcgtgaagaatgtcatttgtattttgataggaattgcattgaatctgtaaattgctttaggtagtattgtaattttaacaatattagttcttccagtctatcacggagtatatttctgggtttttgtgtcctcttcgatttcttttatcagagttttatttatagtttttccttgcatagatattttacttttttagttaaattgattcctaggtattgtacatttttgtagctattgtaaaaggaactgctttcttgatttttattcagattgttcactgttgtcatataaatgctattgatttttgtatgttgattttgcatcctgcaactttactgaatcagatctaacagcttttaggtggactctttagatttttctaggtataagatcatgtagtctgcaaacaaacctaatttgacttcttcctttccaatttggatacccttcctttcttcctcttgcctgatagctctggccaggactttctgtactacgtagaataacagtggtgagagggggtatccttgtctgtttcagcccttggaggaaaggccttcattttttctgtgttcagtatgatgttgactgtaggtttgtcatatatggccttcattattttgaagtatgttccttctatatccattttggtgagaatttttatcataaaggaatgttgaattttatcaaatgctatctcagcatctattgaaataagtataccgtttctgtttttgattctgttaatgacttatatttagatggtatttaaagacataggaaatgggttagatctcctaaagagggaagatggaaagagaatgaaagagtttccagaatatagccctgggggtttcccgcacttatggcggagggaagggagccatcagaggaaactcagagtggccagatagaaaggcaggaaaaagcttaataaggtggtatcatgagaagagagtcttcctagaaggagaaatgcttactcttgataaaaactgaaaaatagggtgagtccacattagaattctcgctactggggaggactttctacacaaggttagagatcacttgtattttgtctactataattttagtgcataatgcatttttttggcatatagtgggcacttatatacatattaatctgatgacatttaataattgagtgcccaaatatttatgtcgagttgagagctagggataggcatgagtctttcttaaacatccttctcttctccttcctccaccccctcacttgccttcagaagcattgatcagagagatagcagtatcttcagttttttttaaagcaacatgaaacacactttattcctgctaacattaggaaaagcgagctgttttccaagccctggaggaaggaaattcagctaactaacgtgaggtaatgtagggtggctatttcttgaaaggtagtgaatcataactataaccatactatggaaaaaagtcctgccttaccaaccactccactgactgcttgtcaccaaaactacgctatgaaacgaattgtgttgagtggctttcattgtaaaagattttggtgaagggagggaaagaaactggtaggggttcagatcagaagatctggctttgccagtttctggagggtgtcagaatggcttcaacatacctacttccttggcctcaactggaggttttgtagctgtaaacaagaaggattgcatagttcagaataacgacactgtaagctcattgtggaactgggttaaaatcagcatgtagatctactaagaaagaaacacactcagcactactacagaaagaaacagccatgggccctgattgttagctttctggaagccatttcatttttacaatagatttatcacacactgtattgactttttccagtatagagtaagagaaagttaatattcctcatgttttgtctgttgacagactgaaaataattgcattgagtttggctagaatatcctgtcattccataaacatctcaaactccacatggctaaaacttaacccatccatgcccccatctgcatgcacacatacatgcatataacttcatttctcagtgtttttttctccatgaatggtagcaccattctctttcaagaaagagaaatacttccccttgggattatcctatctctacttattgctgcaggggcttccaaaattaggttttctgtgttcagtcttgcattcacacttctgaaacccagagctgaccgagacaaattcttcaacttcctgtcagtcccaacatagatttaaaattcctaacctggctcatgaggttcaccatgtattcctgcttccctaagtcagcctcatatcacaccaacctgtgtgtggagtggctaaatactctagccaggcaagctctctcagttcttctacctggctcctctggagccctccttattgctcatcccattcttagcctgattcaagattcctggtccttcaaatctctctttaagtgtccttacctggatctttctctagttagtacaaatttttctatctaccattggagcgaacattttttgaaactttgtatcagtcctgccttactcttggtggaatcctgtggtcctagtcaagtgcctgctccatgaatgtgctgaataaatgaataagcattttaattgtgtatctgtcattagtgtcagatgtgttatttattccagcatggttttagcacacagacacactctttgatgcagacttttcttttctttttacatatagcaacaataaaaaactagactttcatctcctgaaaatatcagtctaataatcacctatggctgtctctctggttgctgaaggaaaaaaaaaaaaaaggcagggcacacctggattgcattagaatgagactcactacccagttcaggtgtgttgcgttgtgggtctccggcacatttcagaggctcattaggaccctgaccccacactggggtttacacccctaaaagcaggtgtgtcccgtggcaactgagtgggtgcgtgaaaaggggggatcatcaattaccagctggagcaatccgaatcggttaaagtgaatcaagtcacagtgcttccttaacccaacctctctgttggggtcagccacagcctaaaccgcctgccgttcagcctgagaggctgctgctagcctgctcacgcatgcagcccgggctgcagaggaagtgtggggaggaaggaagtgggtatagaagggtgctgagatgtgggtcttgaagagaatagccataacgtctttgtcactaaaatgttccccaggggccttcggcgagtctttttgtttggttttttgtttttaatctgtggctcttgataatttatctagtggttgcctacacctgaaaaacaagacacagtgtttaactatcaacgaaagaactggacggctccccgccgcagtcccactccccgagtttgtggctggcatttgggccacgccgggctgggcggtcacagcgaggggcgcgcagtttggggtcacacagctccgcttctaggccccaaccaccgttaaaaggggaagcccgtgccccatcaggtccgctcttgctgagcccagagccatcccgcgctctgcgggctgggaggcccgggccaggacgcgagtcctgcgcagccgaggttccccagcgccccctgcagccgcgcgtaggcagagacggagcccggccctgcgcctccgcaccacgcccgggaccccacccagcggcccgtacccggagaagcagcgcgagcacccgaagctcccggctggcggcagaaaccgggagtggggccgggcgagtgcgcggcatcccaggccggcccgaacgctccgcccgcggtgggccgacttcccctcctcttccctctctccttcctttagcccgctggcgccggacacgctgcgcctcatctcttggggcgttcttccccgttggccaaccgtcgcatcccgtgcaactttggggtagtggccgtttagtgttgaatgttccccaccgagagcgcatggcttgggaagcgaggcgcgaacccggcccccgaagggccgccgtccgggagacggtgatgctgttgctgtgcctgggggtcccgaccggccgcccctacaacgtggacactgagagcgcgctgctttaccagggcccccacaacacgctgttcggctactcggtcgtgctgcacagccacggggcgaaccgatggtgagtagagttggactgatgcgccctcagcagctcagagcggcgtgagaatggcgccctagggattccctgcccgattcaaactttcctccctcccaaggaggcaggagggaaacgctgcgagagccagctcgctggaaatctgccagggaaactaacttatcttggggcggcagcgccccgggtgcgttatggtgcaaggtcttggagcttcgagtcgggggtggtgggcggaggaggaggtggggaagctgccctgctgcggactgcacatctgtggcgacagggagctcagtgggcagcacagctcacgtctgagcgcacgtgcacgtgtctcgctttaggctcctagtgggtgcgcccactgccaactggctcgccaacgcttcagtgatcaatcccggggcgatttacagatgcaggatcggaaagaatcccggccagacgtgcgaacagctccagctgggtgagttgggtatgggaccaggagttagtgacctcccgaccccccatgtggaccccaccatagggcaagtcctggaaagattcacgttgcctgttacttctggtttaaagagcataaagttttcagtttcaactccatctcatcttgcctccttaatataaaagggattccctttctgttaatatcgttctcccttttccttatggcaatgattgcagtactctgacaactatgctagagaaatttcttatgataccttctcttcatctctccccgtctctccgtgtgtaaagcacattttagactctctcagcgtattaaggacaggatccagctaagccaagacttgagaattttatttccatctttgacctatcaaccctcttaaagaacaggctaaggagcatatcaggaatagcaattggaattgatcccatatcccgtcgtttaacctaaaggcctaaaaaaaaaagtgatagttttacttacaatatacaatctaaaagaaaaggaaaattggcatcttcatcgttaatgtagtataattttccattcccaaaaccgtcatccaaaactcatgttatatgggtccatctttttgcagtcatttctcaatgtctcagatttgtgacaagttgaaaaatgtgtactgatagaggggagaagtttcatgtttcaaagccaaagacaagtttgttgcacacaggcaagtggggaaagaggaaggaatattaaataacaagacctatcttgttccaaagtgttactgctatatatattgcttaacttttttccccttaaagcaaccctgggtcatggttgacattgttcctagtttatgtatgaggactgtggctcagagttgcaaatacctttttaaaagttacttagctagtgactgataggtgggaactaaagtcaaactagggtctgaatgcgtccaaagtctaagccattttcttccatgtatgtatcttcaatgcaaataaaattaagtgaatggtttaatatgttgtctgctgagctgatgggtcatctgtaaacggtgaataaaattggtacttctttatatttctttgctataaatggacttttgagattagttattggatctttaacttcttttgtattttatagtagtctttgctctttttcaaactgtgaagctggttcccttcattcagatgaattcagatagagtataaacataatggaatttttacttttaactcagagcacctataaaagtctacgagttgtctgtagcatgtagaataagccctagcctcttgttaagcatcctcaataccagaaatcacagtaggaatgcataaaacattcacagacccatacattttggaatgattttgcaaagcataattttcattgcatgagagagttgtgggtgaagaattagggagtggagccgacaactttggtctgccagaggatcttggcaaggtctcaggagggagcaattttatttctgttgtcctgtcatagtttcctgatccatgacattataactactgatatttagtgcctacttcctgtctggatggacactgaatctatttctggatgtctgtgtttaactggataaatcatgacataatactgtattaaatttaagataatgcctgtcaatggaaggaaaaaattgtttgggcatgtgtagcatgggagttgactgttctcagagaaatgtaaacatagtagatatgtcatagatatgaattaaatgaagatcttttggatggatgaatgaataaaagtggagtgaaaatttatcaacctgactgatgagtaagataattgattagaaatgatgagccaaactgatttttaactttcaaaattttggccaatctacaaggtatttactgggatgaaaggaaaaaaggcaagattcctagtcagtcaatgagttaaaacattaatagtgatagtaatgccttgagtatttgccgaagagttgactgaagttatttctcatgtaacattctaaagaatacagatatcttttattcctcatgtaaagaaactgcctctctattcagaataaattcagtggtagcttgaagctataaaatagggattgaggctacagtctagaaataaaacactaaaaacaatacattggtaataaagataatttaggattcttaggtttgtgggctatgcactattttgtatgaagaagtttcaagagtgtgtgtaaatatatataagccatcttctgtagaagaatgtgtgtgtgtgtgtgtgtgtgtgtgtgtgtgtgaatcttctgtataaaatagcttcagttgtcctgtttcaaatgtgggtgactctaatgtttcaaaaatgcttagctcagtactgacacataatacattcaaaaaatagtggttcttctttattgtttacttaaatctattatctgtatgttatctgtaacaagcaggctgaggttaatagggacaattgataaactgaaccaaaagtttaaaaattaaaaggtaatacattaaaaggtagaagttgaaatgaaacacaatgagaaatttttgttggctgaagaaaaaaatgttataatgattaaagatcgatctgtgattgccatgtcagtaaggtatcttctttcctttggaatagctttacttgctatcaagaacctgaaggtgtagggtcttcaaatggtgcccatctcccacacaattaaaaatatccacatggactagtctttgagtctctgtagaatttcagatcagtggttgattcagatagactcctcccctcaaaagagaaggtccatatctcgcctaccctaccctctgtggacaaggtgtcccatatggtatattcatgccataagcagaagtgagcctgcctgtttatctagaatgcccagggtgagagacgttaggcatgagataccccttttagtcaagcaagttgactgcagagccagcaccaagagagttgcctggatagtaccgcaaggtgcttttcttcctgcatatatattgttggcctccttttacctccctgactccccaagagacatctcttctctcacttcttttgtaccagaggaaagtggtctctctgccaggagggtctgggcccagacttgctcgtgaagactatatctgaggagacccaggtgatttctacatgtccactttccacccgggcactctgcatcatcaggcttgtttaaaggaaactttaatcacagctggttcctaaattaaggtgtcacaaataatgactcaattaatatagttaagcatagtccatccatggactatcaatattcaaatagaacataataaaacatagaaatgattatcaaattacactaaaaagatggtctttatttggttattcaaatatgtttccagatctttcattactttggagttaccactgaaagcattatacacacactaactctcatttgggtaatagtctaaagttatacaattacactatccagtatagtatccactaaccacaggtggctttgaacacataaaatgtggctagtcagcgatgagagggctgtaatgtaaattacatactggcttttgaatacttagtataagaaaactcattaatttttatgatatatattgaaacaaacactttaaaattattgattacataatattttggatttattaggcgaaataaaattttaggttaaataaaattaattttatttttacttttttcatgtggctattataaaatttaaaatttccaatgggcttgtattatatttctattggacagcactgctgtagagaaacattaagttctctgtgtaaaaataacgctatctctttaggagatgctttcctgatatttatgcataaatgagtagaactttcactttcttttctagactaagtgttctatagttactgggccttcaagctgcctgcctgtccctctcttacaggaaagacccatctcaagttagtcaccattacccatatttagatttctttctggaaattttattaccttagccagcctcctggttcatattatataacctatttgaaagaatttaattagcattgcattattaaactaatgattacctaatcctcacttctacttgattcataggagttattagcttaacattaaatagcaaatatctcactgttgaaacttcaaatatgtttttcttgataactttttactttttcatttgcaatgtgctttaaattgtagcttatgaagctgagattgcagattggtcattttgaaaaatcatccctgaatgaaggctgttatacaattatgtagaaaatcaagacagagagcttcactaataaactatcaggttaccagaaagaagtttccttatttccagcagtttcccaaactttatgtcccaaaaggatgaggtttccacctaatttgagagatgaggctttctaaatgcactttagtttttgccttaagtttacttggtcactgagtgatatacccaatgacttgaaaatatatccccttggcaacagttctagggtcagatgctgaaatccgttgcacatgtgggtaatttatccattcagttgttcattgagggatgcctaagggcctgaacctgggcatacaaaagaaacatactccttgtcccaaaggctttaaagtttataagataggttattataggaaagtatggtgagatttaatctaggtaagacaataaagtgatgcattcctgaagaattggtgttcaagtgggggaactgaaaaataatcagaagttagccagaggaagaggctatggaaaagtttgccagaaagagcaaactgtgtgtataaagaccctgaagtctttgagagcacgatgcttttgaagaactaaaaattgtgtacagttgcactatggagtgtgagctaaactgtaggttagagaggcaggcaggaattacttctgatacaactctaagtatgaatttaccctaggatatttaaaactggggagtgacatgatcagatttgtgtgtttgacagattctctggttgcaggttagtgaatgctttggagtaactgggtcaagactgaaggcaatgaggcagttgtaggaagattttgttataatttagactacagatgacaagtgtctgtacaaggacactggcaatagcagtggagaagaacatggagattctgaaggtatttaggagatagcacttggtaattattgaatgaaagagatgagtgagaatgttccaaagatgttactgaagtttctaatttgggctgtgacatggatgatgatccaatatactgaaaaagggaagagcagcaggttttctggcaaaatgatgagtttcgttggcttgagattcctgtgagacatagaagtaaaaatctagtgatcagttctatgatcagttccatgtatgggtgtggtagacagtagagaggtctgtactagcaaatcagaggtgagtaattgacgtaaccccattcacctccaaggctttgattaccatctctctggggtaaatagatcaaatggccaatggcaaatttctaaggattcctacagttcgagaagtgattagaatagtgctgctcaagtctggctgtaacttaaattctcatgcagagcttttaacagttctggtggcccatctcaaactactagaatctctggggtaagtctatagggcaccagtagtttccagaggtccccagatgattccagtattcatccatgcttgagaaccgctggagaagaaaagaggctgaaaaaaaggctaagagggtgaagccaaagaggtagcaagaaaaatcaggtcaatctgacattaacctgattaaaggaagagagtgttttgagaagaggtgagtagttggcagtagtaaaggttgccaagacatcaaccagggtggtaaattatgaggtctcattagatttagagaattagttcattagtaacctcggtaagacaagctttaatggtgaatccactgcagagggttgagaagtgagaaacaatagcaagcgtcaataacttttaactgggttcttccttcattaatacattttattgattacttatgtattggaaatacacagttgaataaggcatggttaaagcccttgagtaactcagttgagatgatgggagagacaggtaaatggacaattaattatgagataatgtaataagcatgacaatagacaggtacatagtgatgagaagaaatgaatgggagaaggcttcctggaggagtgaaatctgagtagtggacccagttctgactggttttgaagagcacatgtaagggctcaataaatgtgaaataattttcatctttttcacatttgggcaaaatcccctgggatttgctgcacatttcagcctcattccaaagtgtctaggtccgccttgggttccaaagactcatatcaggtagttcagacagtaacacctgctcctgaaatagggagcttggaaatgactgtctttaaaagcagggatttttaattttgagattagctggaaacatcaaattagaatatggaagtggacatacaggtgacaggtctgggctcagtgtgcttgttctcagtttacctctgagaatttttaaaaatcatagaaaatcttttttatataaactatgtaaaacactataattcacaaaaatgttcagaaaatagattgtagacttagttctaaaaaccccttttatgggactccttgtgtgcagtggattagacatgttcttttgacattatgccctgtgtagaaaatgctggtcaatgtgcaccatctgtttgtgaatcccttcaaggtctacctcaccacaataccagtctgttttcttgcggaagttttctagaagtcattagactacaatcattttgtctgccagtcattgtcaatatcacattttatcctttaaactctgcccagagaaacgtcctttgatatctgtaactcctcatctcattctgatcctctattggccaggataatatgatacattcctcactggtttttctcatgtatttttaagccttcctatcttcctgacctcctttaattctttcattgctgtctttttttctttttctttttcaaccatcctaccctgtggattccaaaaccaagcatggaactttaatactgaccaccaagcatatttccctggagtattttctgtttacatttttgtattttcttgtttcaaagatagacaaagtggcatccacacattagtgattgtttttcaaatgaatttttaaatccaagagattaattgaaaaccatggaggttcagaattttctttccttattttctaatgttagaggtttaaatatgctcttttaataggttgtttcagaatagtataggtttattcaaaatgtccatagttgaaaataatggaaaagtactaacaactaattgtctggcagcatcagatggtggttgatagtgtgagttttaatcccttccttccccacttacaagtggtgtgaccttgggcaagtgcttagtcatcccttgtttcagattctgcatccataaaattgggatgataatagtattgtctacttcatagggatgttatgaaaagtgagttaatacatgtctttgcatgtattaaaactgtggtacgtagtaagcatgcaataagtattagtaattagagactaactttccctctttaaattatgcttacaaaatgtatcagctggggcacatttttcagctttagttattaaaaagacttgcgtacgttttctgtgggattttgaagaagtcctggcagagaccccaaacctaaaatcaaacccagaagtgacctagttgttagagttctgaggcctcatgatgactcaggatcagcccagatttataaaattgcaaccataaagcttggcactactctctggggacatttacctcttgaactctttctaaatagaatagaataagataaaaaaaaatagctgaaataactggctttttcaggactacaattatataaactgtttctcacataaattgagcatgattattggccattgtgagattttatttaggcaatatgaaaagatgacatttaaacacatttttttaaaaaaacatactttgagaatggtttccaactttgatgttttgctcttttgactcttattctccactagactagctggaggaaaagagttctagaagtttagtacttttatgtcctgtatcacctctaaaacccaaggatattttactttccatcacccaaaattatttttattgtagaattcataaacatcattatcttttagaaacattgccaccaggtttaactagatgtgtgaaaagagtacatagtttaatatagtcaattattatatgaattagtattaatggatttagtaagtattaggacttaaaaggaaaaactaaattaaggggccattttaattaaaaagctaaagactgctgatcaattcttgcagcattgtgagcgccctctgctggctcagttcaaagcaccataatgcacgtaccctgaggagcagaggcattgattatttattgaccacctactaggtgccaggcattcttgcatacacaagcataagttttctgtcatcctcatagccctgcaatggtaaattttgtcatgttctcatatttgaattgattttctcacttttaatatatttttcctaatctgaagttatgtgagtgaagggattatatactttaattattgcttttataaaaaatatcttgaatgaatgactctttataaaatatggaattggaacaagggtcattcatgttttaggattaagaaaaactttagagtggaacaatttgaaatgtatgggttttgtcttacaatggaatagagcttcagcttaaaaaaaaaagacagttggtggaaggtaagggcttttactgcttttctgaaacttcacatcacatcatgagttttgaaagatcaggtaagtatatatgttgtcttagtagccagaaagccagactgagagccccagtcaaatgtctgaattggtggggaagtgacagtacgatgacgcaggtagataaagcaggcatttacttgcattagaaagtcccaagctctcctagccaaaaagtatttcactagcactgtcaaaagttatatagaaagaagaccttagagtctgaccttttccctggtccttctttctttagtggaaatgccaaaatactgagaaccattctaaatggaggaaaagagcagggcaagatagggaacaagtaagtgacctttttcttgaacaagtgaaagtcgattgtacagtctgtgggcatatttgctatattttatatattttcagctaaaagcttcagaaagtggaatagatttcagttaattcatatgtctggaatatttctagagttctatgctatagagtgaaataacttagagatcaaagatgctattttttaattctaatctttccacttacggatttgggcaagttatttgattcctttaagactcaattttctcttctgtagggtaggattaataatacagcaatcctctgctactactgtgggtgtaaaatgagttaatgtgtatgattacagttccccaataatgatatgccacatatattttatgagccaggttatatgctgcattgcatgtgcagcttaatatgcttacattaatctttaatatgatgatgccaatggcaactaacatttgcatgttttcgctgccaggctgtcatccaagcacgtcacacatatctcatttactccacagtccttgcagaaaccctcggagataggcatcttctgaggaccccagctgattctgtcttaagtcatcccactcacaaatcatcctttgtaaagatcttcaaactcagagactgtttcctttcagaccatctgttactgtcttaaaattgaagaaaataatattttggaagagaagtaggggagaatcatagtaaagagaaaagacctctccaaagcttagatctctgagagtttggtgataattatgcagtagtacattctagtaaaggatttttttgtggtgatataatgtatttcaaaattccctccctcatacatactgagttcctgcctactgcatgtaaggcactatcttgagctgtgggaatgctgctgtcaacaaaagtcaatctgccctcatggaggtgacatacaaggtcaaatatctaatctcccatagtccctgtcacacttggagcaatgacactaaaactggtgatatgaataagaatgaaagggggaggagtaaagaatgtatttaactagctttgtagtatttctttgatcaaaattcctgttcatttgcatttatatacacatttatatatgctgatacacatcagtaggaagaaataaactgtagtaagcatgcatttttacattttctttcccaaattaaaaaaaataggaaagagaaaggcttaaaaggagatggtttttaatgtggctttgttttttaaatatctagtggaaaaatgcattcaactgtggaaagaattagtcattctagttgtttaaaagcagggaaaattatcaccatgttaatttctgctgacctcttttatgttaaaccatgtaaagtactttttcaattatggagctgatttgatttactaagagtttagatgagtaatttatgaactgaattgaaaaccagattataaatcacttcagcctgacatttggataaaatataatctgaggttgtttatggtgttctgtcagagaaattcatgagaattagctctcatggcagttctaataatcgtcatttttgaccaacttagaaatattgtatttctacccaaagacaatttgcttaacatttgatatttcaataggtaactaaacaaagggggaacaaaggatattacttttatttttaaaacagtaggtttttaaataatacaagaaaaggcataaccatctgttaatacatcaagcttgtccatgtggtccaggatggctttgaatgctgcccaacaccaatccgtaaacttagaatggcgatcattaaaaagtcaggaaacaacaggtgctggagagattgtggagaaataggaacacttttacactgttgatgggactgtaaactagttcaaccattgtggaagacagtgtggcgattcctcaaggatctagaactagaaaataccatttgacccagccatcccatgactgggtatatacccaaaggattataaatcatgctgctataaagacacattcacatgtatgtttattgcggcactattctcaatagcaaagacttggaaccaacccaaatgtccatcaatgtagactggattaagaaaatgtggcacatatacaccatgaaatactatgcagccataaaaaaggatgagttcatgtcctttgtagggacatggatgaaattggaaatcatcattctcagtaaactatcacaagaacaaaaaaccaaacaccgcatgttctcactcacaggtaggaattgaacaatgagaacacttggacacaggaaggggaacatcacacaccggggcctgtcgtggggtggggggatgggggagggatagcattaggagatatacctaatgtaaatgacgagttaatgggtacaggacaccaacatggcacatgtatacatatgtaacaaaccttcatgttgtgcacatgtaccctggaacttaaagtataataataaaaaaaaaagatataaatgttggcaagaatgtggaaaaatggggaacccttgcccactgttgatgggaaagtaagtataactataatggaaaatagtatggagattcctcaaaaatttaaaaatagaactattacaagactcagcaatctcactgaaggtatatatccaaagaaaataaaatcaatatgtcaaagaggaaaaaaaatatgagattttcttgcaattttttttttagctgatcagttatcattagtgtcagtgtactttacgtatggcccaaaacaattcttccagtatggcccagggaaaccaaatattggacacccctgagctacattgtagagctattgttcacaagcccaaccatatgctacaactacctggggggcttcaaaaaaattcttatgtctggttcttaacccagacatgtcaagtctgagcctctaagagtggggcccaagtggaggtactggtttcaaactcccttcagttgattctaacgtccagtcaaggctgagtactgagtggaaaaggagtggactcaggatcacacaggttaagggagaaaagctttggagaaggccatgatcacaagctgatcatgtagcagtcttacttcttctaccaagattccgcaggcacaacaaaagaaaagagaagctgggcatggtggtgggcacctatatccccagctacataggaggctgaagtgggaggattacaagagcccaggagtttgaggctgcagtgagctatgatcacgccaatgcactgcagcctagatgacagagtgagatcctatctccctaaaaaataaaaagagaaaaagtcccagaaattaagaaaaaacccagaacactaggggaaattacaggatgttctctgaacagattctaacctgtaaccagtacttgaaagttacctcaatattattgctgttgggggctgcctctatggtaaaaacagtgttaagaagtgaaaaggggaaacatatctaaatgtagtatatgtatttgctcacttattaagattggtttttcttctgtggaagaatgattgtttcatgactatttccatgaactttctttctggctatgcattcattctttttacacacattttgaattaagatatatgaaataagcagaagatgtttagtcaaaccataatagaagctttgaattgtttttcgtttactgacctttccatttcagcacccatttctgggctgtttgtcgggggtgggattatgacaaagatacagtcctgggcaagatgaatgaggtcactatttactaagccttggaaataggccagaaacattgtaaataaataaatgtagttaaccttaacaaaaatgaaaatacttattcctacaagatattaatcaatttcaccacaatttcctctgagtgatcgcatcctgtgtgtctaagaacccttgagtgctgatgttgagagtcatctttcagtatctaagagtggattaactaacaactgtataggagatatttgaaaattaatgaatcagaaattttatctatatattagaaggcaactattgtttggaaccacattgtaacagatatgagattacatctagtggcattttgacccccaccccaccaatttcccacttacacacctgccatatgtttttctatttggaatctcttctgctcacgggtgaatgaaccacatcactggcttcctgggaaagctcttcctacatttattcttaagtaaacatctctttcttgtggcttctggagggctaattgttctcctatttctaagaatcattatttttagcctagaacaagaagaagggaagggcatgagccacactggaaataaagtcccaggactttggtgagactacatgggacacatcttaaaatagcctaatgatttagtggcccttttcccagagagctgagaggcactcatgtggagagaaagaagtttcagggaagtgatgttagtaagtgagaaagtgagtagtttgtggtgtgtgtaaacctcagtgtgagcctgggcagtgatgacattgtgatgttacctgatggagctaaaactaaaacaagaaggaggcaatgcagaatattaaatagataagagttcataatgcaagagtttgtctagtcttcacttagaaatttacaaaacagttcagctaagaaaccgataacaatacactatttttgcacataattttttggccattttcattaagctatttacatggtacattgtggttctaaactattgtctttttaatcttctgggtggctctctctagaataatagatttgtttctaaatattggatgtaatcgtaatgaaagtgtctattatacacgccatattatttgtgacccccatcctctcctgtccttaattttcttcttgctcaattgtcttaactgagtgttgactataaattcataaaaattttagtattttcagagggaacttattaacatggctattgtagtaaataacaggaacttcatgtagactgaatctaccatttgttatctatttttgacagtaaacaattgattttagtgaaaactgaaaattgtattataatgaaaattaaaatgccttgtttgtcattctcttttaatttaaattttgttggtttggcattaggtagccacaataacaactccctattttagaccttacctatctcccacacacaattttttttctcctaccatcttccctctgttttccccttctcttttcgtgtcatttctctcttcatcccttcctttctcaagttaacacggagaccttatgtgtccacctggactgttctttaccaaggtttgggccacagcaagactcctttccaattctaatagcaaccattgccaatcaaccccagcattctttgtccagacctagtcttagtcctcctcccttcagtctagttctccaggaagccattaccagttagtgggggttgccatttattctatgtgtatgctgtcgagaaaaacattctctgcatttcacagtaacagtgttcctgaccatgagaaccacttagggcaggggtccccaatccctgggctgtggatgggtactggcccgtggcctggtaggaactgggctgcacagcaggaggtgagcagtggaccagtgagcattcccgcctgagctttgcctctgtcagatcagtggtggcattagattctcgtaggagtgcaaaccctattacgaactgcacagccgtgggatctaggttgtgctttccttagcagaatctaatgccagatgatctgaggtggaacagtttcattccaaaccttactactgcccatggaaaaaattgtcttcacgaaaccagtccttggtgccaaaaagattgggaaccactgacctagggtaatcagggcctcacctggatctgctggagcagaatctccagaggaggagctcaaacattttcttcacttcagttgtgattaaaggttttgtttttcctgaatgacattttagaaaacgaaagtataaacaaacatcttcccacactccttaaacaaaatctctcctacccaggagacttagtgcaaataatttcacttctcaaatattagccttaccaggcatagtggcttatgctggtaatcccagcactttaggaggtcaaagcaagaggatcacttgaggcaagagttcaagaccagtatgggtaacatagtgagacccccattggtaccaaaataaaaatattagtttgtatctctgtaagtgttctgagtttgcccaggaagctacatttaggggtcaacattataggaggagacaaagtgccaatgatatagagaatggtcaccataaattcatgaaaacttggtacctagtgactagtgttcaaaattaacaaaccgaagttccacatccttatccaatcaaattgatgctaatgtatttatctgccaggaattaagaacagatgcaatagaattgtcatatgccaactgaagagggtgaaaagaaagacagcaaaaagaatattaggatactgcatcttactcttccccaaagtaacttatttaaaattacttaacatgggattttaataggaacccagctataacacaaataattttttctaacaaaagaaaataatgatcactgtgaagaccacttcttatatagtatagaagtactatctagtacatgagcattttatttatgtttggctattcatgcatttgccaaagtatctattgaagttttttgtttactactgagataatctggtttccaaatcacttttatctctgttgaaaacatgagtcatattccaataaatgtaaacatagggcagtttcttataaacgcaaggcattattggtatgctaattgtatgttccactttctgcatgcttaatcatcaccttccagctccaataaattgtaccttaattgctgaggatgtattatagtctttctattcttaatatctcagtagaagaaacatttttaaaagtgctctgataatattgcttacgttgttagataaatggctaattcttttccaaacgttagacacagcagttatagttgcacaacctggtattagctttaagtggttttccccactcctagtcctgttagctatctcttatatgattgagtctatctttttatggtgctaccagtcagaggtcatttctacaaccaaagtcaccttgtattagagaataattagttggcacagagtaattcacatttatcctcacattgtgcactgaatataagatagagaagtagttaacagaaaaatactggggatgagtgcacagttttctcttcttttgtagaatgttttcaatacaactgataaaattattttcacatgctataggtagccctaatggagaaccttgtggaaagacttgtttggaagagagagacaatcagtggttgggggtcacactttccagacagccaggagaaaatggatccatcgtggtaggtattggaactggtccacagatccatcgtgaaatcagctatcctgggtgcagctttcacatcatttggtctacttttattttattcagacttgtgggcatagatggaaaaatatattttacataaagaatgaaaataagctccccactggtggttgctatggagtgccccctgatttacgaacagaactgagtaaaagaatagctccgtgttatcaaggtaaggcatgattttgatacgaattagataaagataagtaagtgaataccttttagtgttttaaatttatgttcaagtttagatgttcagaggagagggagatcttctaagtaattatgttctttttaactactcaatttctttctttacccaattgcaatagcattatttttcataaatgcactttgtgctataaaaattctacaatttgaataactctgaaatctagctctttaactacccacttttgcatcaaatttactttcaatttggtataggtgagactagtacccagcaaatataggacatttaaattgtgaaattatattggaagtctgattaaaaagaaagactttaggtttccttttttacctttagcttccaggagtaattgggaagaataatcagtgtaagcaaatctttcattcgcactcactatctctttttctaatttacatgttttccttcaagcagcaagagattcgtgtcttgagtttgaaacatttttctcatggtaactctatgctataggtagcatcagcaagtacagagctaggacataacagaagtgagcagaattggggtgaatgtcaacagagcatgtcagaggatatctgcagcaaaactaaaatccaacaatgcgtctttaggagctaagaaacatatgaatgcaaattcataattttctaaccaccctcactcaaaaaaaatccctcagcacgcaaagaaaaattttattggttggcaaaactttggccaagtatttgagttcaattatgggtgctaataagactttggtctttcttccttggaatgtgatgtcacagagcagcttatattacatatattcctattttgccttcggatacccaaaagataaaaaagtgaatattgattctcagttgcaataaaactcagtcttgatttctgtatgtttgctgtcttctttttcctaatagttttcggtttatctttaaaatattttcatagtagagtttttagtttttctcggatatacatagccacatactacaaaaatctcaagatgccataaacctaacccatctacaattgtaaaatacaggatcaggtaagatatatttttttaaagggatgaaaactcctgaccagaaatggtcattataaatgacttaccaatttattgaagttttctgcttagcaaagccaaaaggaagctgtggttccaattcttattttcatagaagtttacttatatcattttttggaagaagcaaagctttgcccccttagaaagttccaaaagcattcattcatgggactttgtaataatagacctttatgtccatgcagatcttgattcagtctatatttcagttgggcaaaatctaagaaaggacactctcttcaattaatggtgttagcaatagcaaagacatggaatcaacctaaatgcacatcaatgttggattggataaagaaactgtgatacatacacactgtagaatactacacaggcataaaaaataacgagattatgtcctttgcagcaacttatatggagctggaggccaataacctaagcgaactaacacaggaacagaaaaccaaataccacatgttctcacttataagtgggagctaaacattgagtacatatggacacaagggacacaaagtaggcacaaacactagggcctacctggtggtagacggtgggagcagagagaggattgaaaaactacctatcaggtactatgcctattacctgcatggggaaataatctgtacatcaaacccctacaacacgcaatttatctatgcaacaaacttgcacatgaaccctgaacctgaaagtttttttttaaatgcctttgggaaaattggctatctgcgtgcaaaagaatgaaattgaacgcttatcttagcaaatataccaaagtcaactaaaatggattaaagacttaaacacgatacctgaaaccataaaatttctagtggaaaacataagagaaaagctacttgacattagtctaggcaatgagtttttggaaattacaccaaaagctcaaacaacaaaagcaaaaataaacaaatgagactatattagaaagctcctgcatagcaagggagataatcaacagagtgaagagacagtctgcagaatgggaaataatattcgcataagtcctatatatttaaaatgtataaggatctcaccaactcgatagcaaaaaaccaaataactgattaaaaattagtcaagagaccaaatggctttctttccaaagaaggcatcaaaatggccaataagtagatgaaaaggtgcttaacatcaccaatcatcaaggaaatgcaaattacaaaccactatgaaatatcacttcacacctattagaattgtcattatcaaaaaggcaagagataacaagtgttggcgaaggtgtgaagaaaagggaacccttgcacactgttggctggaatgtaaattggtacagccattatagaaaacagtagagaagttactcaaattaaaaataaaactaccatatggtccagcaatccctcttctgggtatatatccaaaggaaatgaaatcagtaccacataaagagatctgcgtttttatgttcattgcagcagcattcacaatagccaagttacagaaacaagcttagtgtccattgacagatgaatgaatggataaggaattgtgtgaggtgtatatatacacacatatatacataaacatatacaatggagtattattcagcctttaaaaaaggaaattctgacttttgtgacaacatggatgaccccgaaggacattattttaagtgaaataagctaggcccagaaagacaaatactgtatgatctcacctatctgtggaatctaaaaaagtcaaatacatagagaagaaggtgagcagagagagggttaggaataggaagatgttggtgaaagatgttggcatttgtgtaggatgaataagtctagagatctaatgtacagcatgaggactggagttaataattgtgcactggaaatttgccaagagagtagatttcactctaaatgcacaaaaaagatgaccgtgaggaggtatgtaaagtgtagtaactgtttcactatgtatacgcatatcaaacctgatgttgtacaccttagatatacacagtaaaaagaaagcatgggctcaaaatcacaaatcctacctctgtcttactcatttgacaaaaattttttgagtatatgctgtgtgtgcttcctatgaagaagcagagggagatatttttattgccatttcatagggatattttgaatactaatatggaagggatttgttatatcaaggttactggtttttatttttaaaaaatacaaactatagaccttaaaggacatttttgtaaggatttaagaaacaaattatggagattttatctttaagataaaattctgagttgttttaatatttcattttagattatgtgaaaaaatttggagaaaattttgcatcatgtcaagctggaatatccagtttttacacaaaggtaattgttcaaaaaatagctgctataaatgtttacatatagaatcttaattcttctcatggtttggaagactgatatgttttaaagtaaaaattgtgtaacatcttcatcatgtctcttaaacttgagtattacaacttaatttttgccactcaaaattccacatatatttcaataaaatatcaatatttaggtggctatactgcataagatgaatgaaaatctatactaaagaacatttctttcatcaacaatttaatgaaaatcaaaagtagctatggttaattgtcttgttaacttaggtattgaaaatatcaacccaagtatgttattttaaatttctagttgaggggcaaaggaagaatatcagtctatatttttcattaaattatgataattgggaaatttaagaatttaatatccccttaaatcagatagacaatattcccaagatttcttactctctttctaacattctaggatatgtatgaaagggcacagttgtactcaaccccaaatctctcagttttcttaaaaacacactgtgaattcaggaatgttttttgactccatgaagatcaggcactatatcaagtttggggttgacagtgtctgcacatattaacagttatattaaaatgcttacaaagaaaatgctttcttcagtttaagttgactttttttaagtttaggattgtttaggagtatagaaatatgctaaagatatttaattgctgaaagtgttcatactataccaggcaagggcatgctcattccaatcttctcctaaattttcctctgtataacaaaatatgccccacattccattggacttttttccctaagctaacattattagaaatgttttccctaagctaacattattagtcaggggttctttgcaaatagaagtaaattaagtctactttttattctttggcaacacatgattatctccataattagcactaatgaattacccacatacgattttctttaataggaaccacattgcctttctcccaaaagcttactctagcgttcagtacttgtcccttcaacttttgaaatccactgataaatgcattgaatgagagtttcagagtttcttctctgagatttcgcttttagaaatccattagccaacttctctggctttttttttttcctagtatgttttaacttcacagaatattcctacttcaggaattgattattataaaaatatgttctcttcactatcgtgtatctggaggaggtttggggtggtgagattaaagtttaaataataatagttttttttttcttacaggatttaattgtgatgggggccccaggatcatcttactggactggctctctttttgtctacaatataactacaaataaatacaaggcttttttagacaaacaaaatcaagtaaaatttggaagttatttaggtactataaaaattgacaaacttaaatgatctgtgccttacaaatactagtactgtaattataaataaggaaaatgtattttccaaagatctaaatggccagtataattacagtaataattaggcagttcagaaactgtctcttaaggataggatttatgaaacttcagtgaactcagtattttacatttacacatgtgactaaaatcatcaatatataattcttaatagaactcctagtttagtttactctttgtagttcactttaggaaacactagtaagtttctatctctatgtagtcaactgattatacaggttgtttctgttgagtgcctcccatatctcaggaactttttgtgagaactttacatgaattaactcatttaaacatctgcataagtaagtatagtttccttaagcaccaactgaaagccagtggtactgtccaccacattctggatgaggggctccatgaagcacatgggtctaaaaacagctcattgaccttcacctcataagttcttagaatatttcccagagcttaactatttttatcatcttcctcctcctcactgtcatctcataagtcaatagtaggatactttatcatctgtatttcaacagaaatgcaaacttttctggcattaatgtccattacaagaaaataaatgcttttcctatagattttcagaaaatccagctttgtttaaactgtatgtgtgtcaaatgtgagcatcttacactcagaaataattataaaataagcactctttctttctattcaaacagaagaaatttcaagtagaagaatttgttacaattcaatgttttcttgtttatgatgaaaggatactttgaaatagttcaagaaatataacttgttacgccttttatcacataaaatacgaacaattttttgtcatcgaaaagtcatcacaaagatttggtggcaaaaaaagttgaacttcagcaagatgtttatttaaagtttaaagttttcatttcccaattgagattttatatttaatatactctaaaatatgtctgttgtaatcctagaaactgattatactgcaccagatgtaaagatgctattttcaatttctaggactcggaaatacataccatatgactgcagttttgtaaaacatatcaaaattgcataaaacataatgaatgaccaattttgagtatctctatgctaaatattcttaactgcttaatgtagtgattttgaattcggtatcatttaattttatgatctattttacccatattaccatatgatgtactttacccaggactctcatactttctcccttttcttaaaggatattcagtcggagctggtcattttcggagccagcatactaccgaagtagtcggaggagctcctcaacatgagcagattggtaaggtaagaattacatttttatatttatttcttcacaaaggttcaaatatattgcatgaataagatattaaaggagaaactgtgaatgttgtaaggaaagaaagattagaaatgatgaacagattattacatttagtggaattggtgaaagatgttatggttttagaagaaatttagcaaaaaactttctgaaaaattacaaaagtcaaacgagacattgttttaagaaaattataagatagaactatctaaaaatgtccagggagtatatggtgaacagtttcacagctgaaaagaagttgaggtagctacatattttgtagtaagactagaaagaaggaaatattattcctggttttagtttttgctgtgtcgctatgtgaacattggtcacccagcttttctgagccttacttttgaaaactgaggcaaacaacacttccggtgccccctctataggatcaataagataattcctgagaaaatacttttgcaagtaaggcatattaatgtaacagtggatcccaaacccttttgtgtcactctcaacaggatttatttttatatttgagcaattaactgcaagttgtaaaaattcatgttttgatcaaacagaaaggagtggtgttttaaaaaatgttattcctaaaaacttttctaattctttccctaattacaggcatatatattcagcattgatgaaaaagaactaaatatcttacatgaaatgaaaggtaaaaaggtaatatgtctctacctttagtatctctgtgggcttttgcgagtaaccctgcttttttctcaatgagtggatctggtttgttttgggacagcttggatcgtactttggagcttctgtctgtgctgtggacctcaatgcagatggcttctcagatctgctcgtgggagcacccatgcagagcaccatcagagaggaaggaagagtgtttgtgtacatcaactctggctcggtatgtccaagtgccccaactggaagccatttatggaattatgatcaaaactcaaattggtcttattccagagatctgagattgttttcaggtttcttttattgacaaaagttaaaattctaatactgtactgatgctctaaaaattaaatggaatatgatgatgaatgggaaagtttcccattttgatattccagaacaatctatgaaatagattgttagggagtttctctgttcacagcttgtatgtgttcactctggtagctgaaatttctttcagttttatgttgatactaatctaatttgaaagaataattttcatacctccttcaaaatgtagatttcttaatagttctagttaaggtccttatataaattataaaatattactaggactagaagatgaagaattaagtattttcaatttcttaatttgaaaacaattagaaacaagatgtgttttgttaaaacattaattttcataattcatatatattatgctcttgataagaatataaaattggcaaggtttattccacagtggatatattagttgcataaataggtaattactgactgtgattcaattttaaattattagtgataatttgtggtagaaactgaccacttgataattcaaagacttctggccttatcttgccagcctagattcttggcgttaagtcaaaacaaaaaattggtggagtcttaatgaaatcttcttggcccgttctttgatttgaaaacaagagtgggcttgtgagaagaccagttcatttataatggcatagcatttttcagtcaggattcaacaaagtggactctgtttcaagaaagtatttgtaactatgttcagtcaatggtttcagagcatttagcaagttcttatattaagcatcagactaaactctacaatttaagaaagaaaacatctagtctcataaatggaagattctctaagtttgcaatatagagcagggaagttatttatgctttggtatttcctacactgtatttaacctacatttaatagtaaaagcaaattatctacacagtgatcattaaatctcatagtagtaatatcagataattttcttccatttctatctccaaaaatagtggtctttgtacttgctacatcctcgtgctgcaaatttctcttattttcctctttacgactaaacatccacatgtatacctaaagtaaagcaatatagaatcattttcccccattgaaatcttaatctcattaagaaaaaacagataaacccttctacccacttggctaccctccttttcttccctcatgcctaccctgaggcactactcttatgaaacacttggattaaattaataattgattccagcttttaaatcctctgatgtagattagtcttcctttgttccatctaacctctcatttctcaactctgaaatggcactaaccactaagtggcatttatttacattgatttgatttggtattgtgtgttcttctactgtagtatagatgccttgtggagagagattgtctgtcttgtttaccgtggtttcatcagggcttggaagagtcctagacaagtaggtgaaattgtttttgaatgaactcaagaaagaatgatacttgagtgactggcttctgcctacttgtactaaaatagctctcaggggttcctagcgaactctcagtcaccactctctgtgactagggaatacttgaagaagagtgatcacctcttcctattgaaactctccttccagaacttcagagccattgcattgtcttaagtctataccttgtctgttctccctggagccttttcacccttccactccttaatttggacatttgcccaggagccaagctgttttatccctgactcctttgaatcaatcattcactgcttcagtgtcagtgattatatttataaagatgattcccagtcatcttagttcatttaaaataaaataaatgacatttagtgagtatctgaaatgtaaccaggactataaaaagagctaataatcttagagctgaccccaggacttcaggatctttgtgaagacaccaatgggagtaaacaattgactacaacatggtacatggcacattataagtacatacaaagtggaagaagtgattccctttgggtcaagaagcttttacagaggaagtagtgtttgagaaagacaaaaatcagaatttttctattggaaaattcacaagtgaagacacttgacaaagagcatgtgtatgcttaagaggtgccaagtaaatttgagaagaataaaggacatggcctttttttctttttaatacaaaagactgacatgatcaaagtttcagaagagaactggtagctgttattgcaacagcccattattacattattgaatgtcttattgtagtaactcatcttcctccttcctagttatcagttgactaatctatgctccactgctgctggttccaaaggccagcttcaatcatgtcactcctcaactcagaaaccttcagtgtttagtattattccctaaattaagagtaaattttcctcgacaatcaagacgctacactataagactgcaatctgacatttttgtctcattcattatacataccattcattagagccaaattctttggaatttgttttgctgctagttttctctgtatatcaaaattatgcttatccttcaatagcctcctggcatgccatttcctttatgaaatgtcttctgttataattagattttttttttttgcatctcgatattgtaaagcagtttctacttctcagtcatttatatgcttgtgctaagccttccctataactgtgggcttattgaagaaagggaatgtgttttgtgcacacactgccttgccccttttcaccttttcgctctttgcacagtgtgttgtctttagtagaggctcaataaatatttgctaaattgaattatcaaaatgatttattggattttcaaagctagagatcatgagtttgacaattttttatgtcctctgaggtctaatcatactattatgtgttgacagactcaataaatatttattgaattgaactgagatgtgtgtactaaagctcagtctgtagtttgtccaacttgtttgacacattagaaaaaatccatatccaattacaacagtaaatcgtgtaaagttgtcagggagtgttataatgacacgttttctctccctttctatctagggagcagtaatgaatgcaatggaaacaaacctcgttggaagtgacaaatatgctgcaagatttggggaatctatagttaatcttggcgacattgacaatgatggctttgaaggtaattaaaattatcaaattggtacttgatttctgcttttaaaatggtttatggaagaaaatatgattaaagttttgtattgttttccttcctatagaagatggagccagaatggcatgctaagttttttcttttctttagtgttatatatgacttctcctcaattgtcacccattgatctttaccactgttaataatggatgatattcaaaataccttatttcagtgattctaaggcaccattgattagaaactgcattattatttatgtgtccctaaaagctacctattaagctgttacacccaccatttttctgttaaggaagatcctgatttcagaaataataaaatatgggcaggaaatgtgttatcatagactcattggaccacggtatttaactatcagtacaataaagacactgaccaaacccaacagaggctggctgcagagctggagcagggttctggaagcccctgctctgccaggcattccctacagctatgttgtggaggatctggggaattcaagaagagattctgagcaggccactgggaggcctggggacagtggctgtttacccactgatattgacgttttttattaattgaatagatggtagtgtggtaactgtgcatattgccatggatgtcagtcctgttgttgaaatccctgcatctactagcatttactgttaaaaatttgcttttatcaatctagttctaagtggtaagtaactgagtctgttaaaactgtgcataaaatggtgaataggtttaagaggagagtgtgcagtttcatggagttcagcacataagtatttgatacttatttttagggttcataattgtcttcttgataaggccattggcaattagtatacggtagttttaggctaaagctttctcagagattaaagtgctggggtactataaattctcatctccttaatgtcttcttgtacctagataccacaatctactttaaatatataaaatgcattattctacataaaaagtcagttattgaatacatgcttccagtgaaccttcttaaacgtaaaatagtgtaacttgttatacaagtattactgttctggattttttgtttactattttaaaactgaaagaaaaaaataggtgtatatacttttggttattacgattacacataatttttttaaaaaacatgtatgaatgggagcctctctgtaccccacccatcactagcttccccctacttcccttaccctcccaggaccccaggttgggcattggctcattttcataaataacctcatcccagacaggggtgagggaaggtgttgtggctgttttgtttaaattggagctgtaagagggatcatgtcatattttatgcccttcctagaaaggggacgggacacctggtttgcattcctgtattgaccactgctgccgtcactcgtcacattgagttcacatctcctgagagtttgtataaattcaggtcagcgctgctcctatgcagccatccagtgtcatagaaaagcaattcactgataactgatctctccattcagaagtgtgcagttttaatgtatagcaataagaaattgttatttatctattacaagcctggtttgattaaaaacaaaaaataaaatgttattatgcttgatgttacatctcataagtaaccagcaattctgtgatatttattgaacatttattttgggtcagatgtaccataccaggtacagaatatgtgccataataaatgaaaatgaagaaaatagtggcacccttttttatagctctaccatcaagtagaaaataaaattaatacttgaaaacataagccttatttcgtggcaagtttaagggttctacctaataaagacctatggataaaaccatgtttatgcattttgatttgtcatgtgtgttgtatgagacaacccaattctttcttttaaaaacacaaaatcactgtttagtaaaacacttattttgtctatgatttctctgtcttgttttaattgacacatttaaagaagaccattcactatttttactcttttgaatgtgaaaagtatatgtatgtacacatgagaaattatttttgtggcatcaaaatgtcaatgacaaatttgaattattgttagagctgtaaaactgttgtgagcataggcaaattcccttatcaaaattactctatacctgggaaaagcccaagtaattttccagtggtgtgaaggacagagagtgttcggtcgatgagacttaggaagaggacttcggaggtgactttcaggggacagtgcagtctctcaatttgtatatgagaccctgggcttcacacagctcttgtttcactgaaatccctcagcactccactcctaaaggtaatacctttatgtctggaaggttattatgcaaatgattttttaaaatattcctgcatatttttgtgctatttataatgtcatttataattcaccgcatatttacatttagtggctacattaacacttcagtgagtgtttataatgccatatatctttttctacttggtccagttctttttttattttattttttttttgagatggagtctcgctgtgtcacccaggccagagtgcagtggcatgatctgggctcactgcaagctctgactcccgggttcatgccattctcctgcctcagcctcccgagtagctgggactacaggcacccgccaccaccccagctaatttttttgtgtttttagtagagacagggtttcactgtgttaaccaggatggtctctatctcctgaccttgtgatctgcccgccttggcctccaaaaatgctgggattacaggcatgagccactgcacccagccctccagttctaattttatcttctattttgcccatgagtaggcgttttctatattttagatattagcaagaccattgctgatgtggaaacagggccagtgtgtcctagttcttggctgaggtcttttattccattccaccatgtctgcctgcatgaggcagcaggaatttacaagttatttttctttatgtgtttctttattactttgccccatcttctcttattttatttttctggggtggatgggtaaagatactttgtgttcatggcaagaagtgtaggattatgaagaaagagactccaacattggatgcaaatcacacttaatgtctttttattatgcaaatttttgtggtactttgcatagcaaacctaagttatcttggcatttgtcatatcacttttcaattgttctcaaatggaaaaaaaatcagactctatttcctgtgtccttagaaaagcaacacaagccattttctaaaaagatgaccaattgatttggcaaaaatttagtgtaaaactcatcaaaagcatgaaaaaaattggtcagacagactaatgtacctgacatgaccaacagcagatcacattttttatttcatatgtaaaatagacttgaccactatttatcggtttagtttcttttttcaccttgagccttattatctgacttttagactatatgtttgaatatttttagagcagaaccataacaagttctacaattgtaaattacaagctgtactattattttgtgtgcacctgaaatattaatatatcgtcaaatcattaagtgagcacttctgttttatttgtttatagggtacaagtgaaattttgttacatgcatcgattacatagcgatcaagtcagagcttgtgggtatccatcatccaaataacatacatttttacccattaagtaatttctcatcatccaccccacacaacctctttcccttctgagtcttcattgtctatcaaaatgtagcaggacgagccacagacaaaactcttcggacgccgagttaaagaaggaaggggtttatttggtggggggcatcggcaagactcctgtctcaagagccgagctccccaagtgagcaattctgtcccttttaagggctcacaactctaagggggtgcacgtgagagggtcgtgattgattgagcaagcagggggtacgtgactgggggctgcatgcaccggtaattagatcggaacaaaacaggatagggattttcacagtgcttttctatacaatgtctgtaatctatagataacataaccgattaggtcggggtcgatctataactaccaggcccaggatgtggggccaggctgtctgcttgtggatttcatttctgccttttagtttttactttttctttctttggaggcagaaattgggcataagtcaatatgaggggtggtctcctcctctaattctactttatacatccatgtgaacacatttttaaagcactgatttatgagtaagagcatgtgttattttactttctgtgcctggcttgtttcatttaagataatgacatcccccaccagttccatccctgttgctgcagaatacatgatttcatttttttttttatggctgaatagtattcgtgtgtgtgtgtgtgtgtgtgtgtgtgtgtgtgtgtctgtgtgtgtgagagagaacctctttgacacagaacaggaattggtattaggaagggaaatttgggggtatgacctctgttgttaatgagtctatagagcatgggaatagcacaggatctggaccaggctgcagggtttaaatcccaggtccacaacatcctggctctgtcaccttgagcaggttataccttgtgcctcagtttcctcatctgtaaagttggagtcagagtatttatttaatatggtggttgtgagagttacttgggtaaatctgcacaaagtccatatcacagtgcctacattgtaaacatagtataagtgttggctgacatactaataattttgatttatactaaaagaatgaaataaaatgttcagataagaagtaaaagcaatcattaaatacctatgttctgtatattgtgtcccaaattaagttgcataggcttggaaaacatttattgtatatatttcaaaacatatctttctcatttgaataatgatagctagaactttattatataacagatccaagcgtaatccaggaagagtctgaatctatatatgtgatagccagagattgaatatacccaagtgtcctctgtatggaaaaaaatttatctgggcctttttaatattttggctgaaaaggctcatctgtatttttcctaaatatttgccttaatctagatcactcttgctaataacaggtactgtaagaattacatcgccgggcgcggtggctcacgcctgtaatcccagcactttgggaggccgagacgggcggatcacgaggtcaggagatcgagaccatcctggctaacacggtgaaaccccgtctctactaaaaatacaaaaattagccgggcatggtggcgcgcgcctgtagtcccagctacaagggaggctgaggcaggagaatggcgtgaacccgggaggcggagcttgcagtgagtcgagatcgcgccactgcactccagcctgggcgacagagctaaactccgtctcaaaaaaaaaaaaaaaaaaaaaaaaaagaattacatcaaccacttcactaccaaggcttgttatttttttcatgtgttatgaagaatcaatatataggaaattctagagatgtaaccacagtggtggaagtataaacccagccctgattaaataaattgctgtcttcccttcaatggctataaaatacttttccccactccttcttctcacatccctcttctcctcctcctcctctttctcttccttaccattcctgctcctctgttcctgtatgtatatattctgcacaaatctgactccagttattccaaaccaattgccattcttcacatgtgccatgctgcctattgcttccctgcccttgcacaggcatttccctgcctctaaattgcatttccccttttcttcacctgtctatgacctatggatactttaatctcatcttgggcatcattttctatgagaagccttttctaatttccaccacttcctcctcatatgctgtgttattagtctattcttacttgccattcctccccactagacaatgagtttcctattgtgatactgccctgttttgccagctcctggcaattgcctggaatatagtaggtgctcactagctgtccgatgaatgaataaatgagtgggcatatttgtatatgaaagtttgaaaaactttgtacaagtcaaaagaggctagcctttgtatgtctaaacaaagtaaatataggtgtctaccatttctttttaactgaaaatagaaaagcttttgcatttttaaaattttacattgtttagcatggagttatatatcaaagatatttttatcctcattgaaatagtagccaaaaattaccactatagttgataaaatgattttcaatttgatggtaataagtaatatcatgaagacaaactactttaggtttctattaaataaaccattgcatataagtaaatatatgcataaatagacaatacttggtaaaataatgaaatgctcttgcaactgtagaatattatttttctcctttgtgctatatatttatagcatttaagcaaccatgtcatttactcaggttttcttatattagttgatcagatcttttttcccttggtatcatagtctgacataattatcaataatacagaaaggtgatataatcattattttacagaacaaatcctttttctgaaatcctgtgtgtctgtgtgtgcagatatctctaacagataccttaatcattttcattggaataggaattaaaagtcattttgcaaataaggtaagtctagactcccaaaataaaaattcttatgatcaaatattcatagattatgaggttattacatgcgaggcactgctctaagcactttacataggtcatatccttttatgctgagagtggtttttattatgatcccattatataggtgagggaattgaaacacagattaagaaatgggcccagcctagtgtggcagtgcccagtggcagagctcggatcagaccccagtggtctggctgtagagcccgcgctctaatcattttgttacactgcctctcagatgcttccactctgctttcttccatgtgcaaactattgtgtgcaatcctgtatatgatgatgatagtattttatttttttctgtctgagaagactgttatttttcataaaagagagttttcttatgtgatatgaattaaggttcataaggttagttttcgaagttgcattctttgtatcaagaatttatttttccattgtttaaattattggatagatgttgctatcggagctccacaagaagatgacttgcaaggtgctatttatatttacaatggccgtgcagatgggatctcgtcaaccttctcacaggtaaggtactattctatttccaaaagaagcattggttataatgcatatccttaaaacttccagggtttatgtggacttatttttcttaattttctcattcaaatacttaacactttatttcaccgtttacttatagtggcaaatgatcttattttaagggattaataactcttcaaactccctttctccataaataagagttgtagttcatttccaccctagcttgtctatagcccattaaagatttctctttgtatttcattaaattgcattctgaggtaatatccatatgattctaaaatatgcccatttggatttgattaactgtgtcttggccttgtggctagagccccatattttgtgaagattgcacagggagatcaaacacacatatgattctctgggtttttttcactgttgagtagtaagatgatagcactttaataatgtctcaggatcttactctgacttcacttttgtatgttgaaaaatcatggcatttcagtgcctagaaaaaaaatgacattcatatgcagagaagaaaagtttttcccttgatatttgcatggaaatattagctggcacagttatttttgattagaaaaatgagcaaatggttctctgtaattgacataaaagaaatgtatttgtctagtaaaaaaactaattttcttagcacgaatatcagcttaatatttataaacctgtatgtgaacatgaaattagatatgtggactagaaagtacatatctggctagggttgttcttgttaaaaagtcagcttttatcaaaagcctcagtcataggctccactaagtgattatagacatcttgttttacaaattcttatttagttattcatgttgggcaaggaagtaaatagagagcctgaagagacctaaggaggccagacatggtggtacacacctgtaatctcagctactcaggaggctgagctgggaagactgcttgaacccaggagttcaaggccagcccaggtgccatagtgagacccccatctctaaaagacttgagagggagtaaagactatttcagaaaatctgtacagcataattttccctttgctcgcaaagtaaatttttttagtcacaaatgtcacctgttcatttcaagctggaaaaattttgtcacccttagaagtatttgatttaactaaaatgcagctttgttagtagatgtgccaaggcatgcctgggaaagctcattatttagctaaatcattgcttctctggtatattagtattcaaaaactacttcccactcaactttcctatttttcagagaattgaaggacttcagatcagcaaatcgttaagtatgtttggacagtctatatcaggacaaattgatgcagataataatggctatgtaggtgagtaattagtttatcataatttataaattggaataagctctatcatagatactgctttatagtgaagtacataaaactggtatgaaagacttcatcttactgataattttttttcttcatttttaaagttctccttaattcattcctaaaatgatcaagtaattcctcagcttaacagtgctagttacacaatgttatagtctgtgtttttgaaaacatgaaagcactcatgaaaatcaaatatatgaggaaaagaaagaaaatttttatttagaaaaatttgagtgaatgtttctagtccaaaaattgaattttgttttagtaaacttgtttttgtcataaagtttatgatatatcataatgggatgaatgttgtacatgaatagattcagagaaaagtggaaagaatcgtaagatgttagcatatattctctaattttctataaatagtgttttaggtagtcaaaggtgatacgtagttaagtatttatggctgaaaaataattctctttgactaatgatgatcattaatctgtgttgttttttatcctccagatgtagcagttggtgcttttcggtctgattctgctgtcttgctaaggtaagactgatatatttcactgcttaattgcaatttggtttaattgtaaaatgatgggaggtggtgtttaaaatcagcagtggtagtgacctcatgatgctcttttggtattctgaagcttaattattgatttttagggtatttttttcaccttacagagatataattaaatcatcaaagtcaatatttttagacatttaaataaaaagttattttgccctgtgcacagaaatgtaattagtatgtacacacataataagactcatgaaattacttggtgaatgtaaactgaaaaaacaaacgcatttctctccttaaggaaaaataattctgcaattaacattgctacttttatttccttctcaggacaagacctgtagtaattgttgacgcttctttaagccaccctgagtcagtaaatagaacgaaatttgactgtgttgaaaatggatggccttctgtgtgcatagatctaacactttgtttctcatataagggcaaggaagttccaggttacattggtgggtatgccctacaatattaatgcttgatggggtgcggttcattcattaatcccacaatcctgcttggagccctcaccggttttcaccacggagatcttctttagagcgggggagagaagctacctgatgcatgcttttcctctccatcttccagattcttgcgttgttctaaccaatgagttgggcacattagaaggctgtagttgtttagagattatgagaagcaaaggacatagtatcacttgctatattagtttaaggtaaaccaactgagcttaacctgtgaaatctctttcttcttgacattggataaaattgacattttatcaagtgtcaataattgaggaaagccaggcatggtagctcatgtctataatcccagcacttgaggaggctgaggcttcagcccaggaggtccaggctacagcaagctgtcatcacaccactgcattccagcccgggcaatggaatgagaccctgtctcaaaaaaataataaccataaaaataaatattaaaaaaattgaagaagctagacttgattctgatttctataaataatatgcttgttaataatttactgcgactacaagctcctaagaaccgtcacctatgtccctctgtataggcaactctcaattatctgctctggagaaagtatcattgatatagctcatccaaaatattgtggtggggaatcccaaatcatgtatatatgactttataagtatttttgctagcagattaatgttcctaattatgttttatttaggctaatataagaataactactagtgaaatgagcctgtggtaggagaagagcatatctgggcatatcatttagagattaataattcacaacgtttatgatcccctattaggacctgtcaagagtttattgtattcatgaccctgcaggctgctgttatctaaacatcgtgaagggcccacatacttattaaataatgccatggatatgtaatagaggtcttagtatgcattaggtacacaatgagcctgtacctgaaaggtacacaatgagcctggcatctctactttagatcagactcatttttaatagtgtcctggaaaagtcatggccagagctacagtaataagagggtggacaagccttcatctagttattgattggaaaatggcaatttgagagcctgaccacagagtaaattacacagtaacacagacaagctgaaggataatctgaaagacacacattgagtagatgacgctctttccttttacataaaactagtgtttcctctactaacaattccattgtgaccagatatttttaaaaatagttgaagacaaacatacgaaacacataaataatcatcacattattggagaagcataccttataattatcataaaatgactcccaggagaaataattcacatggcaagcatgtttaataaaaccaggacattttaactcttactaatagtggattttttttcacctttttcatttactttttttctgaactcagggcaatgaacttgtagacagctatatcaattgcagtgctatttctctgaggtattgaatctcagttattataattttgaaatccaattggcttggacttcattattttccaactaaaaagatgattgaaggatttatttgaaatgtgtaaagagtaatatagattttatgcttatgtttccttgaaaaaagtaggtaaaattcttctggaagtgttactcctaaaatacaaatgaacatgtcaagaattacataaattctttaaactatcacttatgaattattgcctctatgtagtgagtgacacctcagcagactattagatttagcttgcatggcaaagaactcatttagattcatgaaatggttctcactttcttggtaagatctggcttggacgtttttgttaattttttcttttttccttttttttttctttcaaatttggagatcttcatgagcagatgaatatttactatttcagatttgaaataaaccctgccaaactgctagaatatttattgagagaattttttaaaaattgcacaaattaacactggaaggtcaaactagaaaccaataacacacagaggaaggacagataatcagggcataagactggaaagatgacatttttaagaaaaccgtatatatagatttgacttaatcatgtgttcacttcatgtataaaaaaaagccttcaaatcagaaacaaatctaaaatataaaaaagtcatatataaaattagtcatataaccacataagatagaattattccaagtgacatttgagcaaagtgctgtgtctatacttccttagtcaatgttctgagaaaaaaaggaatatgaaacatgcaagacttttattagcaacaatttttatatttttgaaatttttatataaagattaagcaaataactaaagattttaatgttgttaatagaaacctagaggaaagttcataaatctttataaaagcaatttttaaaatttgtatttttaattgttccctctttcatatttcaggttagtctttaaaaagctgtttaataaagagaattccagatattatttccagtagtccatataactttaactattatcacttcaaaaataacaatagatgtatttcagtaattagattaattgcaattctctatatttttgcagttttgttttataacatgagtttggatgtgaacagaaaggcagagtctccaccaagattctatttctcttctaatggaacttctgacgtgattacaggaagcatacaggtgtccagcagagaagctaactgtagaacacatcaagcatttatgcgggtaatgtaagctattttttattaatgaatatgtgaacttcaacgttgttgatagagagcaacttattgtattggtatctttttataaaatgtagataaaagcaactgtaacccctcctgaactatgacctgttgctccagttaaggtatgagacaatctcaacccaagtaattcagagtcctcttattgtatcatcctttttcacatttatcacatttgacctcatcatttgaaaacacttgccttttcctttctaaaatttcatttctcctatccctctttatctacttgcctagaaatatacatcttcagtagctcaactgagcctcaaatctattccgtggtacgttttttggggtgggtcaggggaggcagggaagttagtttgtttttcatacgactccagcgaagcagaatccaacatgactgcttttgggttatgtctttgtttccgtgccagctttgccagtgatgtcagtgggaactcacacagttgtagcatggtggggatcatctgtgggccaggacgatagctctcatgatggtttggggtatgtcctgccaaagcacagccgatttcatgtttcttttattaaaacactcattcccaaactgatcatcacattcctcacattggtcaaattttatcatatgaagctgtgccaggtctttttcattagggaacggtgtacttcatcagaaaatctattgtcacaaaaaaccaaactattcccaggagccctttctgggatttcaaatagtagcttcagcttagggcttaattttcccttagatacttattccaagcaaatgcaagcaagcatcaagactccaatacgctattaaatgctaagagcaataatccccatgctatttcctcatttcccttaacagtttttattgttgtactagaataaacctattagatggttcagagccaaaagtatagaatattaatgtaaccatcatttatatggtaggaattaaagaggttctttttttcatgcttcatagatgtcgttttacttaccttagtcaattgtagagacaaatattgaaataattttaaaggcaataaaagggccaacattagatgttcacaaagaaatacattgtgttaaatttgtaaaagtgatctggtttatttagtcctgtgtttcttggcatcgttcctgtaaataagggatcatcaaaattgtacagctttttcggagtaaatttgtagcagaaatgattagcagaggtaagtgttgtgttgcatgtatatttgtagtgttaccatggttttgatggtagcaagattcagccattgcctttgtaccatattgcaaatattaaatgatagcacttactgctgggattgtacatggcagggactttttaagaaatgctcgtttccttcagtatctttttctcttcctaagttaccttgcttgtgtttggaacacttttaaaactcgtatatagaaaggcaaaaagttactccaaccctctcctttgtaacaaacccacacagaagataagaaccacagttgcagctaccctgaacttgagttctgtcaaggagctgtagctgttacttaagaaggtataggaatgtaatgattgtactttcccacctccaccagggtaatagcccaaggcattaggaaacattaacactcttaagtttctacagtctgaaagcataagacagcaacctgaattcttccatcttcctagaaaagaagacgcatagcggttgggatgcctgggttgctcctgtgttccataaaacgcatctggtaccatggtaccaggagtgggaatgttaacatatgtatctattttatctctgcattccttacaatgaaatgaagtggcacttgttaattatgtactggggcccacaacccccacttgtcagaggactccctgcctgtctgttggttggacatggtttacttgtgtagatgtccctactggccattcactccattaatttgataggtatttattgagtacccacattgtgtcaaattctgtatataccagtgaataagacataaaaacatcactaccctcatggagcttatagtctactggggtgagaaaaaaataatatgataaaaatatacattttatagtattttggaagatacaggtgataaaggaaaaaggagggcagagtacagaaatgtgcagtgctgcagaaggagtgaagcggagaattttaaataggatactcagagtaggcttcattcagaaagtgacatctgagcaaagacgtgaagaaagtgaggaagttacccatgtagatatctagggcagttgttcttagttttagggtgtaatagcaacaacacctgtagggcttctgaaaacacaaattgctggcccccatctagaatccctgatttagtaggtctgcagtaagggctgagaatgtgcatttctgcaaagttcccagaggacccatactttgagaacagctggttcaggagaagagtattccagcgagaaaagctgagtcaaaaggcctcaagaatgtacctggttattttaaagaacaatggggaggcaaggatggctagaaatgtaagcaaagggaagaatggtggaacaagagattatatagaacctgtggctttttctctgagagaaagggggatctataacagcattttggcagagaagtcacatgatctaacatacgtatacaaaggaacactctagctgctgtgttgtgaatagagtaggagatcaagattcgacacatggagaagaggctactgtggcaacacaggtgagaggatggttccaacaaaagtggtggcagtggatatggtaagaagtagttgaagtcaatttgctgacatccaatttacaatttgctgagagactggatgtctggcatctgagaaagaggctctgtgatgactccagggtctttagcctgagccacttggaaatgtagttttcatcaattgagacaatattgcaggagaacaccttttgagtggaaaattctagagttcagtcgtgggcctgcttagctagagagacctattttaaatgtaaatatcaactaaggctttgtacatactcatcttgagttgaggacaggcagagaacaggaaaggtaacttaatatatctttggcatatggatggtatttaaagccgtattaagatggctgagatcagaagagggccaccgtctgtactctgggccgctacaacatgaagaggttggcaaaaagaggcccacagaggagataagaaggtccaatcagtaagaaaggaagaaaatcaacagtgtggcatcctggaagtgaagtgaaaaaaggggaaagcatgatgatgttttctatactgcagcttgatcaaataagatgagggctgaaaactcaacattggatttataatgcagaggctgttggtggtggtgacaacagcatttcagacattagtgggggaacggggggaaggaaaggaattggaagcgtcataggttattctttcaaaaagttttgccacaaaggtgaccaaagaaatggagctgggggtcagtagctgaactggagtgaagagttttttggggttttgtcttttaagacaggagaagtattagcatgtttttatgctgataggcatgctgcaatagagtgaaaaacttgggatatatgtgacaggggagaagagctggaactaaattcttgaaggcaaaaagggaaggattaaatgtacaagtgaaagggttggttctagataggcatgtgcatgattcatctgagtatgtgcttgcagatgctgggtagatgtggtgatggggactatagaagttcttgtctgattgctttaataatctcagtgaactaagaagcaaactcatcaactggagtagggatggaggaagtggcatttggagtttgggaagatgtgaaatagtcttctaggagaatgggagagtaacaaaatacaggatggttgtcagatggtgtttgggaccacttgcacttattgtcataaactgagtgtagcctgtgtgcttgtgttttttttcccagtcacattcagtcttgcaggagtagatgaagagttacaattaaccagggttgtagtttggtcaagagagtgaagcaagcaaggagcatgcagcgggagggaatgtacaagggaatggttatatttttagttgtgaagttgaagcaggctaaggaggggagggggcacaccaagacggtgagggaccaggaaagaaatttgaattggagatcccaggacaatcagcaaattgttggaattgactattaaacggatcgagctgcaaagatggcatagatattataaaatacaaaagcccttggagacctaaaagtgagggaaagattgaattttgcttttatttttgctgacaatactttgattaccttatgcaaacaaaagcctttaaatttacttacaaaatccattgcgttctttgatggcggggaattcggctgtcaaaaagactccagatcttaagtttaaaaaattattctcttttaatcacaattctttagttttatgctagatcttcttggactagaggtgcatttttaatagtctaataaggatctatatcactggcatgtagatttttgttctggcatgttatttttctgaggctatgttttcatttatctggttagtaggggaatcagttttcttaagtctaatcataattaaaagagtatcacacaggattactttgcttaactggtcaaaatttgttcctcataaaataagaaagaaggaagaaattgtctttttttttttttttttttttttgctttaaaaaaacctttgtattttagttgattataattatgccaagctttaattttggccaccagagccatacaattattagattttgctaatgagttagaatgatatttctgtaatataaaggaaatggttaatttcatttatatcttttagtgttttatctattgaaatcgtcttctattagacattgctttttcctctatgaaaagatgtttccccatttatgtaagtatatgaaaaatctttgtttttgctttatttaaatatacaacttcatcaaattgtggagatttcttaggacaagggataattttgaagcagttttgatttagggaaacccaaactgtaacttgaagcagtttttagacatgttagagcagccatggtagtgaaacttcccttgaaattttgacagatgatatctcttggttgaacttgatggatccctgcatcaaaatatccactgatatttgagaggagaagaagggtgctacattgggataacaaaagaagcaatgagatttcctgtttgtctgcatttccaacaaagctagaaatactggcttagttgctgaacaaagaatgcctgtccccagagatattctgagagccagtgaattcagtggccttcgcatgttttattaaaatcatgacatcaatctacctgggtagattagttaattcttttctttgatttctcaaatttctgaattttagatttctgaaatgtgggtttattttgttatgtaaatctttaggtgacttctaaaactcatcttttttccatagtagtttcaggaaaacgtgtatttgattagtaaatacatttttttgtaattttttatttcatttgcttatattattgagcaatacatgcacatagtttaatgaaatgtcatttactccaaagaagaaattttttaacaatagcacactatggactgattcatatatgcagacatttctgtggaaaatctaagtgtgagcaaactatatcactgtactaatattatggtattctaaaagtgaattgattattataacatgtgaattcttcattagattgcaagatctttgaggcaggatattatcttttgcatatttatattcttagagctagcacaatccattacataaggcagaaacaataaatatttaacaaatttatggatgctatgttcttggtgctatttaaaaaattctataagaaaaatctgagaatgttctattggtataatggttagggcatttgtcttaggggtgctgtcttttctcaggaaattgtaatgctagatgtctgactgttctgtaccacttgagccaagcttactagataaagggactgcaattatacaagatggtgatggttcaggtaccaacctgtgtcttggtctcagcttttccttcccgagccctgcattagcaccagagaggtgtttccaaaatctagtcatattccttgcttaaaatcttcctatgtaagagcctccccagccccttttatgtgtagattaggtggccctacttcttctgtatttagacatgcctctgtcagaatattcatgccccacactgtctatgtggatttgtggaacatagatggtgacaggtactgactttcagttttgtatccctagagctgccttggacacagtaggcccatgaatagatatcttcaaatatttattcctgacattattttttatttagtgatatcttataaatttttttgccccaccaagttaacaggaggacatgggcctgttgctcagctctcaagttggccagaaatacagatttccatgaaagtcaagcaagaagacagacgttatgtaatttcaggcatgtgctaatttgcatgcttgtgggcaccctattttatgtaattgtccataaaaatgtggcatggaatcttcattatttttaatatagatagcacatgcccatccaaattttaaaatgtaaacaaatctacttttttactcccaaatatttaattaatcacttcaagacatttttgatattacagcttttgtccttaggtggagctgttaaagttaaataagtgtgaatatctgtcaaatacagtttttgcaagagtgcatgtacattttatatattgtaagaaaagcgtaattaatagctaattaggataatgaaagtaatatacaacagatgtagagaagaccttgtggaaaattagtatgaattagatagcatgtgatttggtcaaagtaagcttgttgagaagaattaaaacagtggacatgtggagggacaatcagtggctgtctagctcctcctacacctagggaatgatttaatcaagtttgctattacttgaatactcagggcttcaagctgttccgttttcacaagtcgataacttgggatttggccttgatttgcagcattcctatacggtcaaagtttcatgttgagatgatcacttaccaagtaatttaatataagaatctctgtataagaatggaaaagtaatcagggatcttgagtactctcaggctccaaatcttctaaataccgtttaataaatagagctctattccttgttctataactaattttctatttaatgttgatggttggcagtagtagttcagttttcttattccttccaaatgttcaccagaatctcctattctaggaaactgaaatttagtaatttcttagttggcttatatacctgaaatttgaagcaacatacaaatcttgtcaggtctgctttatggacattatgtcatttaatcatcacaacagtaaggtataagtataaccaccataattgttattattcctattttcagatagcacaactaagccatagacaaattaagaaacttgtccaatgttatgtagataataagtggtggaccccagatttgaacaccagttcttcaccttcagatcactattgcttttaaccactatatacataaattgataatgttgtaaatgaaaagagaaaaaagattacatcctttttgtttataattacataaagacatagaatagatatagtcttttatgtggtgtgtgtcatctttattaaattacttcgttgatttttatcaaaagttactatataaataatatagcaacacagcaataatttgtgtgatagggatttattccctatttcttaaggattattaattgatgagctttgaaaataatctattccttatctgctttggggcagtaatgtttaagccatattgcaatcctgaaatgtctatagataaatagaaacctggtccactgacattacttagtaggaggtctgtcaattgcagtgtcatgggtctaccttgaggaactcatctagcataatataaaccttaattatggttgaagctaatatgtctagcctgggtgaaaatactagactctttaatggtcaagagggaatttgttgaatctattttttaagatgagaagaacttatagattgaaacagccatatgaaaagtagagtcaaaaactgagccttaaattattagtatgaaagacatcacagtctgtgaccaattcatcaaattatctcctgcgtatagcaacaattctaataccaagaaaaacaaaaactgcatagattttctccacttgtttccgtgtaggtgggctatatgtggtgatgtgaactgctctctcatatcctgagatcatttctacttttaatttttgcagtgtctaaatcttattttatagatttctcatcgacatgtcttactttaggtttctcaattgaattctgttataaatcctcttaggttactttagtagtaaaatcttattagcttacccttttagataagcagaagtctgttttgttgagtaccctttgaaaatcacatttctgtctgcgtagtgcttgaacaggtgctttctaagagacactgtgttttatatgctacctgattttcatatacatttgccctgcagtaaccctgggggattgattccaggaccccacttggatacaaaaatccaaggatcctcaagtcccttatataaaattgtgccatatttgcacttaacctttgtaaatcctctcatatactttaaatcacctctaaattacttataacatgtaatacaatgtaaatgctatgtaaatacttgttatactgtattagttagggaataatgacaagaaaaaaaatctgtacatgttcagcactgatgcaaccatccattatttgccaactatttttgatccaaggtggctgaacccacagatgtggaaccgatgggtacagagggctgactctctttgttttcatagacttgagagtctaggacacttttactatctagtgaagtgcttacttaatcgaatgacaaatgctttcaaagatttttttttgtttatttcactgtgtgtaagcaaataattttgaaaataatgtggaatttttttaatgaggatagcaagtaatcaaatgaaaagaaaatcatttgtaagttgatagaaaatatttttaaaagaaaataatgtctgcatatagaaataaaggttaaaatgtaagaattgtcaatcagttgtaataaactcgagctgtttctttggagacagaagacaatgaattttaaaaatctgattattgaaaaaaaaaacttgtgaccacatatcaacaagaataggagtaagaaatgctgtgtagacataagatattaagtttaaatgaatgttatacagagcagaatggattgtgaatgggttacaatttctgtgtaactggtaaataaattcaagagttctttgtgaagtataaaagcacaataaacttagaaaaaacaaaaacggctgggcgcggtggttcaagcctgtaatcccagcactttgggaggccgagtggggtggatcacttgaggtcaggaatttgagaccagccctaccaacatggtgaaacctggtctttactaaaaatacaaaaattagctggatgtggttgtgcatgcctgtaattccagctactcgggagactgaagtgggaggatcacttgaacccaggagagagagattgtagtgagctgaaatcacgccactgccctcaagcctgggtgacagagcaagactgactcaaaaacgaaaaataaataaataaataaataaaaactttaacaactaataagaaaatcagtgaagcgaccagtgtatacaattagatgtacaaaacaaatacttttcctatataccattcagtatctgttagaaaagataatagaaaagttccataaagaaagaaaagggctgggtatggtggctcacacctgtaatcccagctctttgggaggccaaaactggaggagcccttgagcccaggagttcaagactagtctgggaaacattgaaagaccctgtctctataaatatgaaaaaatgggctgggcatggtggtacacatctgtagtcctagctactctgaaggctgaagcagaaggatcgcttgagcccaggagttcagaactgtggtgagctacacttcactccagtctgctgacagagggacacatcccatctcttaaaaaaaaaaaaaaaaaaaaaaaaaaaaactaaaaaggatgttttataataaatctggagtcaaatgaatcaaattcaatcaaaatgttgttgagagatataaagagaaaatgtatagggtaaagttaaatgggataaaaagcaccttgaaatgatttacaaaaagtttatcatgaaaaatgcttatgttataatatcaagttatcttttaaatgcgtagaaaatagcatggaagaaaatactcccaagtacagacctttataactattattggatagtattatttttcatttttattctttttgtgtttttcataagaaacgtaaatgattttgtgtgatatgaaaaaatatacatcttcatttttttaacggtttagataaaagataagtatttgctttgtcttccatgtatagtgtttggcccttttcaggaaaggagttttatttttttttaatctacgtgcttgtttttgttaattcatatggtggttattttccttagaaagatgtgcgggacatcctcaccccaattcagattgaagctgcttaccaccttggtcctcatgtcatcagtaaacgaagtacagaggaattcccaccacttcagccaattcttcagcagaagaaagaaaaagacataatgaaaaaaacggtaggaatattttcctttattcaaattattgtatggcatttaactaaatttttaaaatatggcataattctgaagaagtgaactatatgtcggaatttttaaaaatacgaatttttaaaaacaaaaatagatttattcatttctttaaattgtttatattccctttaggatattgaactgaatattttaaaatatgcatttaatcacaacagtagattctcatataaaatgctgatgttctatttttaatgccttgccagtgaagaaagatatattactagagagaaatcataatgggagaagattgtatttacaagttagttattcagtgtcatcatgtgtcctcagtttatcttcctcttctcattttctcccttgctttcatcctactcacagattcactcatgtcttcataatcaaattttcttgcttagttttacccatttacagacacatgtatttatgttatacaataatttctttttaaaaatttcattatatgcttttcagccacatcccaggatcaattgcatttgagatggatcctacattctaaccagtgaaccgttttctaaattatctcaaaatatttaagtttcactgacagtgtatttattctcaggagtcctgttgttcagacctttagtgtctatcaacacaaagacatagtgtttgtccaaaaacaggatgtgtctgggcatagtaaaaagccttcattaaaatgttcactaatgacacacagaatgtaaaagatgaaagggacatttaaaggtctagttcacatcctgtccagacaaaattgccccatagtcactttaagataattgagcttacaatcaccactagtctagtctagaatacaggatcaaatgaagataactgaagagcagatttttctctacaccctcatatgaaaatatttacggaagtcaggggttgtttttactcttcttttgaacttcagttgtcaacatcaactatttgtaaatgtctttaatagtgaaaatctcaatattgcaagtacacaagccaaaaccttagcaattggtagttatattaatttatattttgattcttagaacaacctgctttaccaatagaaatggcagaaaaaaaatcatatttatttagagagatatttacacctctcccccagctgtaggcacgctatttgacagtactctagtcacttcacacttaatgagcctggctccttctgactttctagatctctctttgttttctgcatctgtctctctctacctgttcccgttaccttcccttttatctctccccattttttccttttgcccagcttatgccttgggtcttcctaggtcctttgtagtatttattgatcttattaaaaagcttcaagttaattaaattctgaaacccttatttaattttgttcaatatttactctaagtaaaatttctaagtatctccatgtagctaatttcaatgaatataaaatcactgtcccaacatctgtcacaattaagtgccatacttacacgtaataaatgggatcaaactgcagcaacagaaaattgagaggaacccaatgaaaaacatcttggcagctaataaactcctttaatgcctttcatttaactttttttccaaatcttatttcacttagaaaatttgggctttaaattttacctatttagaacttagctcttttagccctgcaagtaattgtcatttgaaccctactaattctcaaattgaactttttaaaagagataaaataaagagttgtcaatttgatgtatcaattttatttttctcatgcatcacaggtgtcgtcatctttaaaatatatataaatatacttgctgattaaatcaaaataaaaaacgttgtctttttatttccagataaactttgcaaggttttgtgcccatgaaaattgttctgctgatttacaggtttctgcaaagattgggtttttgaagtaagtatatgtggtatatagtctctgttattcatcgagagggggtaatgagtgtgtgcatttgcattcccaaaagaaaaggaacaagagctaacccttgaaaattaacagcgtttaaagaattagcaacacaatgcttagttttttatcggccagaaaactggttatatcactcagactgatatataatccaagtatgacaaatttaaaaaggaataaactatcttgctcttctaaattcatagaaggggaaacagagtaaaaaggaaatagatatgtgttttagaatagcatctaacacatagcaaagactggataaatgttggttgctgtcgttattttataatggcaaataaaccactgcaattttgtatcatatctggatcccctatattcaaatcattttgcatatcaaaaagatgatgtgaaaacaaggaccagagagagagaatgaacacttcaggttgaggattgatcatagaaggcaagtgaaagaagggaagaagatgcatcagtgacggggcagggaaacagggaactatttttgggagattgggatataaatggagcagctttaatctggggcatgttgaatttggagggacttttctatgtggcattccacttgaaaatctagttcaggattatgtttggaagttcctccatatattagtgacttgtgagatggcccaagggatagaaatgtgaatttcacagaggaaaaaaattacagatcaaatcttggaggacagttttattcaaggagattaaaaagaatggggagtccctgtaggagactgagaaggcatcttcaaggaattaaagagaaccaagtccctggtgaaatagccaatggagaatataaaaagggagacttaatattgtaaaatttataaaaagatcagatagcgtaatgtctaaaggtcatggaagttggcatttattaataaaatgtgacgggtggtgaaaaaatgggtatcactggcaaatgttaagatagaactctcagtgcagaagtagccaaatgacaggattagtgattaaagaaaggagagtatactgggaacaagtaggttcaagtgaggtatttttatgtatttatcaaatgttgttatttgttcaattattagaagatgtaaatgtgagtgccagaggcagggaaaagaataaattggagggagacatcttcaacttaacttccagcacatgcttttcagtccatacttgaattccactctgaagcatttcactgttcacttcctcttttgaacgtcttatcctttaattttcatgatactatcctactcccattgtcttagtagttatttagccctttcttttcagctgtttttgatggatctttgggtttggcaccctaaatggtcctccctcagccctttctctcactaccacattcaaccttggtagtcttgctcataactgcaatttcaactggcatgcctacactgctgatgcctaaaccagtgtctcttgagtttcacacccacctacatatcaaattccctattagacatgtccttttggttgccctatagtttcaatctgtccaggcactatccaggaatgacatggacattagaaagttaccaaagccagaaacctagggctcaatctgcattcttttctctttcttatttctgatatccagaattattaagtactacaatactaccacctagatgtctttcttatccatcatgctttgctatctctaccactattactccaaactaggcactcactatcctacctaggtcactaagttctcctgctttctaggatactggcctttgattttgcattattaacatacacatgtgataacagtgcttcagtggctcattttagacttaaaatctaaactcctgggtggtatttttcaccaattccccaggaagtttttcatcaatggctgaatacttatggtggtttggctgtgccatgctctcctgaacctctgtatcttctcacttcttctgcccatctacctgattaacttttatttatcttttaaatctcacctgtttcctaggggaagccccctggtcttcagctacttaaacttaagttctgttgtgcccttggtcctatggccctgtgctcacgattattgagagtctgtctccacactgtcctggaagctgctgcaaagcagggtcctgtcatttttgtgttcccaatgcctaacagtgcctggagtgctgcaggtgactggagaggtttgctgagaatggaacaagatcccaaaagggatcagattcataggtagaggaattagccttagttaagaatctccttatcttgagctaacaagctatgaaaatatgtttgacattaagaaatttcaatgtggaaggaagggaaatacagagaactcatggatggctaggataaaaagcaagtttatatgtggtaattgaaggcattgaggatatgtttgggaactgaaaggaatggaaaaaattcaaaatagattaaggacagggagtcaactaggaataagtaaaaaggttgacaaatagagttgagtaccctactgtggtaggatcacatatggctgagaatcaattattttcacttaggcaatgtcagtttagccttgagagtccatagttcagggccaaaaagccttgacctatttgattgatgattggattttatacttaagttacccagattaactgtaatccagaaacagagactacggactactttgtatcccagcatgtagggcagtgcctttattgatttcttagttgaataacttataatcttcccatttctgtatttattttcttcctaaaccgcttaattatcttggtgtttttaccctcatgggcctttgataagaagacgagctgtgtgggggaaatcttttctaagctgcaagtaaaggagtgttttcattttcttaaatcagacacttgtgctatcacctttcattgcagtctctctggcctatgagaaaatgagacattgacatttataagaaaatattactaactatgcttctttcctgaataatgaaaatgcatcttaatgaattatttttctttgttacatgttttctcacaacaaaatatctgctttgcatttttaatttagagtgataatatttcttgcagcctatcaaacccattatgatttttaaatggcataatgattttaaatgaagtataaggctgtgtttcttaaggtgttgtctctgagccacctttatgagaatcacctggatgcttgaaagaaatgcagattcctaggccccagaccatccacgtcagaactaaaggggaccaggccacagatcttcacaattaatagagctccaagttcttatcacactgaaacctaagaaccaatgttatggtggtgaagagcttccagatttgaagtcaaactgacctggttcaaatcccatatctactgtattactagtgaccttttcagagaagacttttaacttctctagacctctttcctcattgctaagtgggtaaaaatagtaccgactcattaaggttgtcttaaagggtaataatgcaggccaagtgcctagtgcaaagcctgatttccatgaagactcaataaaagtcattactatttctatttttgaaatattatggttggaatttctatagataagcttttttagtttggccataaaatgaaacattgccaattctatatataattctgcatataagctttatatcctgaaaatatagctgctgtgactggctcagtagttgcagtcttacaaggtttgaagtggcatgaatgtccatataaagtagtaggcgccatattttttgtatcaactaagaaagttacaggctatgtatttctattagataaatgattatttgaggaactttcaaatgagagcccttctaattaatttcttagactcacagtgaaaggttctgacaaagtgctttgtgttttggtaaattatactctatcagacagaaatatgtctctcccacagaggtgtcctctctcctttctcagaaacagtaggcgaattgtgaccatatgttccatacattctcccagctataactctgctggcactaatggtatttatgtgccccagagctataaacctgttttaggtaaatgtatttactcagtaaagaacatgagtttctgaagactgcaataataaactgtcaacagtatgctaaacagtgcttatccactctctctcatctcttcattaagttgaggcttcctcctgtatgtctaaatgcttaggacaataaactgcatttataaaggacttgcagtgcaaaataaagatgaaccaacacgacttcaagattacaaatataatagaaggtattagccatcacatagggagtttaaaatcaaatccttgaaactcatgtaaatgataccgcaatacatttctgcacctcagttgtgcttccagaatgagtgatgtaagctttccctgaacaattgcttctgtatctgctaggaatacttttaattgcaagttttagagtaattaactaatagtgacttgaacaataaagatattatttcgcataataagcagtcttgaggaaggatgttcacaggtttggtgaacagctaccaaagactagacattgatggttatctttccagctctctcagcttttcctcatgatcacagtatagccaagcagcatcaagcttccaagcaagagaaaagggaaaagagcaaaagtgcttggtcatctttaagttgcccttccaggaagggcagtgcctcatttgatgtattctgattaaccagatgtgtgttacctgtttatccctgattctgttatggttgaaggagaatggagtcgtcatgatcacagtaaatggatcctgaatcaattattttgttattgtgatacattctctggagttgaacctagaggtctgtcttctgaaatattaagggaatgctgcctgtcacctgaataatctagggctctgttggcagctaagaagggaaatcactgttggctagacaatgagcaaggagcaacatttgccaccatgctgttaattcccgaaagagctagtgtgatgaaattgtccatttttaaaatggaaatagtacgaatatttgcctcactgacagcataaagttttgggagaatgaattatatgctttataaactaagacatgctaattactggttcaatcttccaatttaagtttttctgctgttcttcccttaacctcagtgagtttgcctgtctttaataaaatcttcctaaatgtcaggtaacctgtctattccaacaggcaagaatttttcagtattgtctttttccctgaagtcagtagtaaaggaaaaaaagataaaaattgtacttaggcctgtagactacttgctgcaggttactcttttgtcaaataaatgagtcatgtatcttgacatagtgaagtatggtatcagtttacgttatattttattctagcatcttgattaaaaacaagttagctatcaagccctaattcattttagggagacagggtgaattcattatactaagacttggggagcatttcttgcaaaataaagctatattattcactcagaaaaaaacatagagcctggtgctgtggtacatcatttttctatttttcctctgtcacttattaagttatgattctgtatgtacacagtaccttgatttgtttaagttacatggattctgtgctgctttgtaaatttcaagtctgcattatgcatgttttaatgaagaatgaactatgagtcccagggacagctctggttcagtcttgtcgcacttccagatgtgcacctggttctttattatgtctcacataggaagctggtaggtatctttctgagagcatcttgttaatgaatcaatttacagtaagatgtatatttaggggaaagaaagtagaattgtaattatggtaatggggcaaaacagcttaaaaatggaaaataaaccaggagtctagctgctgaaatgtgaacattgtgtttctctttaatttgctgttgtcttggaacctagctgtttatgcagtgctttcaccttctgttgcttgtctaagtgccaacttctttcccaaaggtgttcagtgactaatgctttggttacaagccagaatattttataaatgtctatttctgggcagctcttctacaagtcttaattaaactttaatgtcaagctgaagtttacttttagaacctcttaggttgctttagtcctaacatgattatagagtttggggtgggggggcaggatgtgggacagccatgttcccacacacttcctctctcccatttaacagtgccaccaagcagattcatactacttaaccccaaggtttacaacacaggcacgagtaaatcacagccattccctaaaatgttgtggtagcacactgtcactcagactcctccaccctgcagtgatacccagggtttggaattactgctttgttagttattacacattcttccagcatatccaactgctcaaatcagggatcccaatgtagagatgatgcatgtggaagtagcattctttcctttcttctccatgtctggaggagttatgaggactgggggatcattttctctaattctcatatggcttattggggtaaagaactgcatcctatgccatctgaaataatgaagcttctattatagtcagaatagtacaaaatagatttcaattaaatatggtaatatgttatatgtttattttgtaattaatttactcatcaattggattgctctgtagcaagagcctgcatttttttctgtgaagggacagatagtacatatttgagtttttgtgggacagagatctctgtcccaactactcaactctgtcactgcagtgcaaaagcatgtctgtgttctcatagagctttatttactaaagtaggcagacatgtgaatttggccttcagggagtagtttacagacctctactctatgatatgcttgctttttatatggaaattctaaagtatatatatttttattaattaaaaatagtgcctgatagtatattttgttttttaaacatagtttgtcaatataacttaggctggttgtgaaagtaagccaagattcaaagatttttaagaaattaatcctcagttaaaaaattataagaatctctcctagatagaaacaaagatagatataaatatgtatctagcctacagaattacgtgtgtatgttgaccaaaaaactataatagttccaaaaatggaaattgtcaaaagtcccatggataattgaaaggataaataagatgtggcatattcataaaatggactatatacaccaatgataagaaacattttacaactacatgtaccaatatgttaatctcacaaacaaaattttgaataaaagccatgcaaaagaacagatactcaaagattacattacatttatataaaatacaaaaccgaacaaaaccaagttatattattaaaaatcaaggagggtgaggacaataactggaagaaaaagccccagagggtttttcagtggtgctgctaatatttatttccttgagctaggtgcttaacgcatgtattcataaaaaatattgagctgtacaatcaggatatgtgcatttttctatgcatgtattatactctgataagtttaaaatagaaaaaaagaggaagaattttctagcattaagtgaagtgtccattttcttagaagttacattagagttataaaagtggggggaaatatccaaaattattttatttgcatattccgaggttcataagaataactctgaaaaaccgtaccacatttccagtttggattttgccatggtcatatgatgccattaattcataggtcatttcagtaggtttatcaccaccaaaacattaggttgtctggatgggggtacagatcgcaatgtggtaatgctagatatttactttcttagtgagacatttggaatttgtatagcatcacagaacagataaacacggtttaaggctataacgtgacagtatttatgctgatactttcatagacttctaacagtcaataacttatccaataatttccccaatttttttctgacatgttgcttggacaccaccgaacccttctttacatttaatacagacatgtacttacctgcttatattttttgaagactgtgttgttaggctctgagaaagcatgtgaatcacgatccagcatcttctccccaaggcaaattagtctagtagtgagaggaaccagagacttgacattgtgaaaatactgcatttttatagaggtgccccgtgtgctttgagagagggagaagctgccaccttacgctgttaggggagagcaatgcagggtgaaggtggttaacagtgagttttggctggaagaacaactgagaattattgacgtccaagataaatcttgaagaataagtacacgtcagatgcatgaagaggagatgttgacatcagagtgctagtttgaaggaagacgcaaaacatcctggtgtattagatgcctgtttatagaaaaatatgactgaaacaatgaattgtgcagtgaaagtgaagcaggggccaactctggagggcctctgtgtcatgctaaggagttggaactcttatcttgaaggcaatgtatggttctcaacagacaccattatctagtttgctttcttgaaaatgaccctctggcagtgtgaagactggattaaaggagaggagaaggacttgagacagataaatcaattagaaactcaatccaagtgaatttaggttcaatcatgacattttcagacttaaaatttcttgaggcagccaatttaaccatagtagtagagaaagaacaagtatcatgtctttactacctcaggcaaaaagtggtttcccagagccctctattcacaacacttgcccgtttgtgtatcttttttacatttatttacacatctgtcctttattatatcagctctaggaaggagtgaagtgtgttggtatttgggaacgatgaacttagtgcctgatttattgtacagaaactttcaattcattcatgaatcttcaagtaataattaaaagcagaaattttgaaacatgttcttaaactctgtccttacatactctgtctttaatcaattcacaaaaacaactaaattcctactgtatctttagtatttccataaatagtttattcaaacactaatcttctctacaaatgttgatttgaatgacacaatttaaacattattgaagaaactttctaaattctgcagtgctaggtggatatttatcttttttatctatcctcacctgatattttgctttgggtaaatgcttctctacttttaactaatttttctgaatgttaaattactagatatctaagaacttctgttcttaggggaaagtttataaaatgacatactgtattggaaagttttccttagcatatagctgttctaaccctctcactgggaaaaagaatgaactgtagaaatttgcaattgtttcaagacttcagaacattctagctgtggcctttgaataagttccttatgtctcaaatacttcatatttaaaatattttaaggactttatacagtatacataacccagatcttcagtgaatggtaggtagtatggaataggatgactgaggcttaaaaatgctaaattacttccccaccagaaagaactgctggcagtgccaggacttgaactcgtgcatatatatggatttacagcaatctatactttgcaatacacaggaggatgaagcatttctccagttctgtttttaaatttggcctagttactggtggaggtgaccagctgcttcacaatttaattctagtccaacagattttagtgccacgcacttgtgggtggacatagtagttcttcctcatgccttgctcacttctaccaagtattccttctagtcttcttttctaccagttccttccattttcctccctcggttcaggcagcagctagttcaatgtctattttaggcttgcaagaaagaaaagaaaaactgctttgcctttagaaaatgttacgaaataatcaggaaaatgttaaaattatagaagcaagaggttatgcagaaaagaaatgagaaaagatacgagtttaattatagctcattaaagtttccttgggtaataggtgactgaatttataaaaaacatgacaaagagttcttcttaatatggttttacatctgcttgcatagggtcaatcccatgattgtttttccaagaaaattagtattttatgttcagcataaattatatacatatatccttgtatgcatataagagagagggatttttatttcctaaacaagaactaaataatattacttaatttttaggccccatgaaaataaaacatatcttgctgttgggagtatgaagacattgatgttgaatgtgtccttgtttaatgctggagatgatgcatatgaaacgactctacatgtcaaactacccgtgggtctttatttcattaagattttagagctggtaagtactgtaaaccacaatagcatgatactacttggtattttacttaattttttaaaagtaagtggtagaattcacttcactgatttggggtataagtcttaatatttaggctcctagttattttcagacttactctgtgcccctgctcagaatggcaagttcttgggtcttaagtccaaaggcatcagcctcctgttttccagtactaggagtaggaggaagctgtttgggtgcctttacattctcactgccgtagccagcacacgtctgatgttggaacagtatccccttgattgtggtccttgcacaagtaacattgatcctccatcctggactccagagttatagttctttattttaaggtgacactcagacaattaatagaattttctctattctttatcaaattcgctcatcttttgtccagggaccacaccttcataccaatagtgacctttgacctctcacgaatatctgttaccttctttctctagtgtttgcgctacttgcaaaagtaacagtggaaactcagatattcacggacagtatttttaaagcattttatacttattgcaattataacctcattacacctattgagattatagctattttgattaaataccttaaacacattctcacataccagacagaagaggaccattaaaatatgaaccttatggattccttgcctcatgatttttcaaggaattcagaccctggattaaatagggaatatatcaagataaatgaaagctacaagtccagaattttttttttgtggagaatctgtttgaatactagagtacacacatatatgtatatacacacacacatacacatacacatatatatacacacacatatatacacacatatatacatacatatatatacacatacatatatacacacatgcacacatatttatatcatatgtctatttatctcaaacatataaatagaaaatagttttcctagaaaagcaaatacttctgggatgatattcttttcaataaccatccttaaacatatgttacaaactttttatttccttcctgtccaaaacagttgtttcatttttcccattaggaagagaagcaaataaactgtgaagtcacagataactctggcgtggtacaacttgactgcagtattggctatatatatgtagatcatctctcaagggtaagtgtttcatatttatggcttttgttcactatcatgaatatttttttctattcttccctatctttaggttgcatagaaaatattataaatattttagcttggggtaggtagctgagtgatgaaataaaactggttcttgaaatctttgagctttgtgtttatattcttggcaatgtttgctgttttaaagggggtggcatgtttacatcgaaatgggcatgtgcatgtgtcaatcagaattctgctccccctacacacccttcccgaaaacccccacccccaccgcaggtggtcctgtctgccaggcatgttacctctgctatacaaaaaggtgtttttggcaagagtctccactcaagttgtgaaagcatttctaattttgtctagacttgcctgcgttcacattcagagacgtctttgtctctgaatgttacgtgtggatatgtgtgtactttaaaatagccacaaacccaacaacttccctgaatcttattgccaagggaggagtagctgatgcctttacaatggttcaattctacattccatagaacataaacttttaagaaaaaaattcagattataaaaaatgtacttaagattttttttaatgggctttcctggtctgtgttttacagatagatattagctttctcctggatgtgagctcactcagcagagcggaagaggacctcagtatcacagtgcatgctacctggtataatttattgttaataaaatgaactagaaatatacccccatattctgaggggggggaattaggagaaccgtaaaactgtgttccattaattgtaagagaaaacttctcttacgtggtatgcttttaaaagaaccaaacaacatagttaaatgggagttactggcaatgttttagctcttgagctatgttaagtatttattagattagattagagtagacatgatgtgtcacgaatcaaactgtgtatttgaaatcaaaaacagaataaacagtttacaagtaataactctacaagatttaaaagtgagggtaatgacttccatagatatgtctcctagagtaaataggaaatcgttaatgactatttcatgagtgaagtttcaatatattttttaaaattcagaataaacgtcaagatggacttcattttacctaacacaacaacttggtcaccctctcatcctaaaaatctctataagtaaaactgattataaagatacgttaaggcagtacatgacttgctatacagtttaaaaaattatatgattgatgtgctttctttgatcattaagtcttgcaaaaatacttcttcaacctaaagagagtaatagatttgtttctaaactacctatttattctggtttttgtaccacctagaacataaatgttaaaaaatcttttaatctaataaatgtaactatttgttaaaaaaaaaaaaattcctctatctagcattagaagcaaatgataacagtttaaataatgagagaaattttctgccaaccttgtcctaaaaaatttttactaccatatctacttttatccccactcctcaaaaagcatttaagcaaacctctgagtatattaggtatacagggtatgtaattagttctctctgaagatttttctgcttggtgaattctaacagggtgttttctgtttgtatagtgaaaatgaagaggaaatggacaatctaaagcacagcagagtgactgtagcaatacctttaaaatatgaggttaagctgactgttcatgggtaagtagacataaaggcttcctttcaaatttagagctgatttacagtttccttgcttcttacattaatgaaaaaactgtattctagaatttttttaaaataaaaaggatactctatcttttaataattacctcattgttatagtcccttacttagctgtccattataataatccactctataatcatcactgatactacatcaaactagtacccagctggaggagatttcttactgtgagagccccaacaagctagcaaggccacactgagcctttcagctgtgcactgtgtaatcctaatctggaattaggcagtatgcagtctgcataatcatacttaatgcccatgtcaagtgtgaagttcagagaagtgtgaacttagtcaaatcactattctgcagacccgtatctacacatgtggcaaatggattgagacgtgagagatctggctgaaaggtgtcccttgtccactttttatacctatgggatcaccagattcctcaaccacagtatcagaattcattgcttcctcatgattttaatgattgagtggatccccctctcattcaagaaggagatgtgtggagaaagaataaaagggggcttacggaaaccttcagtaattccactagaacttattcatggtgttagtccttaaaactacatttttatgcagtagaagatatgagttacagaacaaatagacagatgagcctttcctgttgctctaaatctaaaccatcccgcagtcatcttatccacttagaaaggtgatatacagtcatgtaaatgtaaaatgtcagtgtctgatggaattgagtatcaagtttgagataaagcaaacgggtgaaaaaaggccattcacaggagagtaagacctagagaatcacgagtaagcaaataaaaagttcattgcgtgtttcctggttttcagtgtttatcttgccactcctcctggcttatgatgagtgtcttcctatttttctgttattcacatctcattattttgaacaaggtatgttcacctgttaaactgcctaaatctatgctggttactttcctgtttcatgagtttctaatttggtattacctaatattagctgccaaatgtgagcaccttatggagtagagatctccctagaaacatatttcttagagtttattgcagataaaaatgtcaaatcacaggcctttaaaagagagtgacagccttgtattgtaacaaaaaatttatcatacttaataatgttagacttgttccccagatttggggttcattataagtagccagcagggatcatgagatgggaagaaataattcaaaaatgggtaacataaattgaggtatgagaaccttaggaaaaaactaagaagttatcccacattacatttgccaaatttacatgaatcacttaagggctgaaagagaaggaatggtcagtagaatgaaaaaggtgtagtgtcatggaaagcaagaaaagaatatcggtgagggacagatattgtcacccaggtcagagcacatggcctttttttttttttttttttttttttttttttttttttaagagtctcgctctattgcccatgctggagggcagcggtgtgacctcagctcactgcaacctctgcttctcgggttcaagcgattctcctgcctcagcctcccgagtagctggtactacaggcacacgccaccacgcccagctaatttttttttgtatttttagtagagattgggtttcaccacgttggccaggctgccctcaaactcctgacctcaggtgatgcgccctcctcggcctcccaaattgctgggattacaggcatgagccactgctcccggccctaatttaatttctttttaaataaaatgtatatctgaccacaaaaccaaaagtattccatggtgacttgtaaatatgctataatccagactatagaaaaagactctttataatacgtcatcgaataagacagttaattaaatttgaatttgtttttaccaggtttgtaaacccaacttcatttgtgtatggatcaaatgatgaaaatgagcctgaaacgtgcatggtggagaaaatgaacttaactttccatgtaagaaaagttaattgtgttaatatttgtaacaacctaaaaggatgtcactgatgcattgctccaagggacattgtacacctatgacgtccttcagcctctgcagaccacagctggctggaatggggcagcagcagtggtactcctgcctctcagacccctgctgctttccttccacttgtcttgtccctgatattcaagcccatatttccttacaggacaggtgagaaagagcatgcaggaacagagataatgcctgaaacaggcaaagttatgggatgagctgaatttgctagagacacatacagaaaacaggacaggccaagggaaggcatctttgggtgcaaatcagtgaaatttcttcttggttcaagcgtataaaaacctcagcactacaaagtaaaggaggctcttacctcccatctccatttaagatcacgttggttagcctttcaagccataagtttatgacctgtgacaagtgctttatcaattattaaataaccttttaaagtaaagagtactatcgtaattcagaagtattaggagactgatgtaaacctaagtttttaaaaacattttttgctgtcaaactgatatttttattgtatcaaagatgttggtgattagtaaatataatttccaaaaaaaaattctttgaaccaaaagcactgtccaagcattcttatagaataatctatatttgtgagtaaatcttggattaggtataatattttgtaagacaatgcttttcaaaatgtgtattagaatcacttggggtacctatccagaatgcaaattccttggctttgccccaaatctgtggaaaaagaatgaccttgaaatcctgttgattctatgtatactccaatttttgttacactagttgatactaatgttgaaaaattttagttctccactttgaagtcccaagaaatgctctttaaaacccaatgggagtttgtgctttgataaactaaaacagaaaccaaaccggactctagaatgtttatttattaatttacaattaatagttaaaaagtattttctactaaatgtataatgtagtgactggcactggagaaacttgcagtatataggatttctgtgtctagtcaactatgtagatattcttagaggtttaattgttgttaggcaaacagatgtttgtgatttagatatttaatggcatccagaagaccttgtctgtagtattgggcactgctaggtatctgttgctgacatttcctgctgcaactgccctgtgcttttatggattagcaattaccacctgttcccaatttggagacactttcttcatctatgtcacatgcattcataaaatgactgcaggtctgcaagtcatcttttttaatcgaggtattgggatgcatctctttctgacttactgtattggttttacagttaagctgccagttcagtaggctatattttggccccatttcccttttcaggaatcttcaatccccaaatttatcatcctcttatgcattttttgacaagtattgttaaaaaccttttgtgctttctcaaaacccaacaacatacttttcttctgaatgcatcagcatatagatcctgaataaaaatacatttttattcactttctcctgctgattatcctcttagcacagagtgcttttgcgataacatcataggatttagaattacaatacctgagttttggtcataactcttgtcattttttaacttttatcttgggaacactaagaacacctgttagcatttcccttagctggtgaataccaaaatgttggcctacctcatgagaaccaaatgatatttttaaaatatgtaatgtaacatacaaatatatattgtttgtctcctaagactgtttctccaataaaccatcagcctgtactttttgttttcaacaataccaaaactagaaggttagaaacaatgactcatttgaaattattagcaaactttaaaaattctgactatggatatcctgtctccctttgttatgcagctgccaactataaacctccaccactataaatgttgcatggaatatacgggatcacctaaaagctcactgatatctgtacttacatttatagaaaacatttaatttgttaaaaaatttttccttcttatcaggttatcaacactggcaatagtatggctcccaatgttagtgtggaaataatggtaccaaattcttttagcccccaaactgataagctgttcaacattttggatgtccaggtaaaaatgtatttcttccatctaacctttattgtgtgtcttaaatactaaaataaatgcaaaccaatcctttattcgagtaatgatgtgaaaatggataattgttaacttacttcagtcacactctaagctatgaattcaccatgcatttattgagttatgctttgaatattatacatttctttagaactgtagagttacagtgcaacttttacatttgatttaaataacagaactatattctaccatctccattgaataattattttaagatacattgttgtgtgatatggacctatagaggtaacttctattagtagaattcttcataaaacttgaaactactgtgcaaatatgaggattatagcctttttttaaggaagcactattcaaaccacttcttaagaaccgatattcttgcactgatggttccatcagaattgttttgagcttaacaggttgaagacaaaagtcaacaaatctactaaataggtttgaggtctgatttttaaaaatcctatttaaattccagatttagagagaagaatatggtgttatattgtttcgcctataaaggcgaagaaatatttaatgtcatgctaatgttccaatatcatttttcacatttctgcaaggttaaggccattttatcagcttagaacctatatccaacctgctgtaatttggctgggtttttgtgtttctgccacagacatttaatcactcccaaatctgtcaaaaaaatttctacaatttcagaggtacttgatatattttagcaaagataagctactggaacttttaaaaccaggttgctttttgctgttttttccagtgttgaaagataagatttctcttgctttctgtcttcatagactactactggagaatgccactttgaaaattatcaaagagtgtgtgcattagagcagcaaaagagtgcaatgcagaccttgaaaggcatagtccagttcttgtccaagactgataagaggctattggtaagtttcagtttttcaggttgtagttcctgctttccaacagagaagtgagacacttaaaatcaagtcaatgggtttgagctgtcacttcaataataagagagaagacaagtttaggtagtattcttgcgtggaaggaacaagcatggttggaaagttgagatagacccagggtctatcccatatataaacatgttggccgggtgtgatggctcacgcctgtaatcccagcactttgggaggccgaggtgggcagatcacaaggtcaggagttcgagaccagcctggccaacagagtgaaaccccgtctctactaaaaatacaaaaattagacaggtgcctgtaatcccagctactcaggaggctgaggcaggagaattgcttgaatccgggaggtggaggttgcagtgagccgagatcacgccactgcactccagcctgggtgacagagcaagactccatctcaaaaagaaaaaaaaaaatgttatacagtttcatttttttatctaacaaatgcccactatttgccaacaagacattgttccagacccttcaggacaccaagaggttgtcttcacctgggcagcctttgtggcatgggttaattttcattcttttcagcttagtgaatgtatgaaaagaaactggagaagcagtcatcaccttgaaatgatccatgttttacaacaaacaaagaatacgtaacttagcaagactctgattaggaacattttttaaaaattctgtcccagaagattatgttaatacaaataataagaacatatgctgcagtttaaatactttattataatttagaaaacaaacattcatgtcttgtttaaaggtaatttaaatgccactaaggaaagcagatgtttaatttcatatttatggaaagatgattttcaaaatgccattagagtatatattaaattctatataaaatattttaaaaatattttccaatgttgaaaattttaatgtagcacttttatattcccttcaagtactgcataaaagctgatccacattgtttaaatttcttgtgtaattttgggaaaatggaaagtggaaaagaagccagtgttcatatccaactggaaggccggccatccattttagaaatggtaagtaagtctaaaacattgacaacttggtggctaagtttacataaaatctataaattcagtcatataggcaggatagtatgaaggcattcaacaaattaaattttaaataaaattttggagtaaaactctaaaactgtatttctatcacttcaactatctacattgactaagtgaaatggctttagaaattaacaggtaataaaggctaaaataggccaggcacagtggctcatgcctgtaatcccagcactttgggaggccaaggcaggaggatcacttgaggccaggagttcgagaccagttgtattcctaggtagatgtctggtgttatttctgaggtctctgttctgttccattggcctctgtatgtgttttggttagccttgtagtacagtttgaagtcgggtagcctgatgcctccagctttctttttgcttaggattgtcttgactatatgggctcttttatggttccataggaaatttaaagtagttttttctaattctgcgaagaaagtcaatggtagcttgatgggagtagccttgaatctgtaaattactttgggcagtatggccattttcacgatattgattcttcctatccatgagcatagaatatttttttccatttgtttgtgtcctcttatttccttgagcagtggtttgtagtgctccttgaagaggtccttcacatcccttgtaagttggattcctaggtattttattctgtttgtagtgaatgggaattcactcatgatttggctctctgcttgtctattattgtatacgaatgcttgtgacttttgcacattgatttttgtatcctgagactttgctgaagttgcttataagcttaaggagttttggggctgagaccatggagttttctaaatatgcaatcatgtcacctgcaaacaatttgacttcctctcttcctatttgaataccctttgttgctttctcttgcctgattgccctggccagaacttccaatactgtgttgaataggagtggtgagagagggcatccttgtcttgtgacggttttcaaagggaatgcttccagtttttgcccattcagtatgatattggctatgggtttgtcataaatagctcttattgagatatgttccatcaacacctagtttattgagagtttttagcatgaagggatgatgaattttattgaagcccttttattttaaaaatatagctaagaagaaaaactaaggctttcataaaatcaaataaaatcaaaattcaacaacaaaaacatatttaaattttaaaaataatgaaatatatcttggactttttcctacaaaggagcatgtatatttatgaggagtagtttgagatgaaactagttttatgtggagttctgtttttcagctttctcatctgttcaatatggataaatgagatgatttttataagaacttagttcatggaacataggaagccaaaggaaatggcagctgttatgttcaagtggaattcttgaaattgccaaacagtgcttaagaggaagatacactagacaggcaaagaagaaatatccattttagtttcaactgtgctaaaagcaaagtcattgaaccatcagcaagtcatttaaccttttgcagtttgccttatctttttctctaggtctaggttttccatcagtggccataattggcattttgaaccagataattttgttttggggggttgtcctgtgcattgtaggatatttagtatcatcctcagcctctatacgctcactgctggtagtaccacctcccacgttctgacacttgacagtttctttagacattcctgactgtcccttaggtgataaaaccctccctgctgagaaccactgctctagatctataggaagcttgtcatttttggctctaaaatgttaaataacatttacacaatagttttaaaggtcatatccctctttaagaatctgactaaatatattctcatctccctcagcaaatgcacacatgaaaacatctcctaaagattcttagaatttataaagcccttctacagatccccaagcttcatggattctgcgttataaaatccttgctttagatagtaaagttctgagttcatccactgattttatatttgaattctataatgtatttaatttagaaagaaataaaaagcccaaataagatagattcaatatgcggtggtggggtggagaacaatggtaaatggtaacttacctctttctgtagtctaatatttaaatcaagttatttgcaaggtagctgtttaatcaaaggatttcaataaaatgatactatataaattaataccaagaccacactttgggaaccaaaggaggcactgcagttaattttaagtggtgaaataaattggggaaggtaaattgtgaaaacctctagctagaaggtaaagatcctgataaattatgtctttatgaaataaaccaggctatggtgatccttcttttattaaacaggatgagacttcagcactcaagtttgaaataagagcaacaggttttccagagccaaatccaagagtaattgaactaaacaaggatgagaatgttgcgcacgtaagattaccctcttaactgctacattaaaattataggaaaacacatttcaagggtgtctataattacttccttctgagtaactgagttgggaaagtagagtgtgaccagctcatggagggcccccaatacttggttgagagttggcattttccacaactggcaggagggaacaatacagcagttctttcagagaggtgaattgggcagcagtgagaattgaatagattggaggaaaagtcatggatacagcccattacactcactgtttctgctaaacagttaccagtgtttcctgcaattatattagaaccagcaagaaaatgggctgggcagttctaaatactactggggattatggcagggctttaaaggaaatataagcaacgttttaaactgatttttttttttttggtttttgagttttatttttcttaactcacgtaggttctactggaaggactacatcatcaaagacccaaacgttatttcaccatagtgattatttcaagtagcttgctacttggacttattgtacttctgttgatctcatatgttatgtggaaggtaagcatttaacaattaccaacattagtctactaaaaatgacattttctcaaagccaatttgacttccaagttattagatttaaatatttcactatttgaatgttaactttttatgttgctcagtactgatctcacatttctcttcaacaccaaagtctttctagaaaaatatgcattcttaatttgttttgaaagacagacgttccttttaaaaaaccatttggaaaagattgcaaattacacggaatgtcaattttggagagaatgtggtgtgtatcactgagaatttctgcattaaaaacaaaaatgtttctttaacccggtatgtccccactaatttttactgattacctctgttaaacctttatgactgatgttacaagggatgcagtttaagaaatattggtgttaactgcttagatattagaaatgagtatagtagataagagagtgttcataactatacactagtgattatgttatgctattttcaggctggcttctttaaaagacaatacaaatctatcctacaagaagaaaacagaagagacagttggagttatatcaacagtaaaagcaatgatgattaaggacttctttcaaattgagagaatggaaaacagactcaggttgtagtaaagaaatttaaaagacactgtttacaagaaaaaatgaattttgtttggacttcttttactcatgatcttgtgacatattatgtcttcatgcaaggggaaaatctcagcaatgattactctttgagatagaagaactgcaaaggtaataatacagccaaagataatctctcagcttttaaatgggtagagaaacactaaagcattcaatttattcaagaaaagtaagcccttgaagatatcttgaaatgaaagtataactgagttaaattatactggagaagtcttagacttgaaatactacttaccatatgtgcttgcctcagtaaaatgaaccccactgggtgggcagaggttcatttcaaatacatctttgatacttgttcaaaatatgttctttaaaaatataattttttagagagctgttcccaaattttctaacgagtggaccattatcactttaaagccctttatttataatacatttcctacgggctgtgttccaacaaccattttttttcagcagactatgaatattatagtattataggccaaactggcaaacttcagactgaacatgtacactggtttgagcttagtgaaatgacttctggataattatttttttataattatggatttcaccatctttctttctgtatatatacatgtgtttttatgtaggtatatatttaccattcttcctatctattcttcctataacacacctttatcaagcatacccaggagtaatcttcaaatcttttgttatattctgaaacaaaagattgtgagtgttgcactttacctgatacacgctgatttagaaaatacagaaaccatacctcactaataactttaaaatcaaagctgtgcaaagactagggggcctatacttcatatgtattatgtactatgtaaaatattgactatcacacaactatttccttggatgtaattctttgttaccctttacaagtataagtttacaagtataagtgttaccttacatggaaacgaagaaacaaaattcataaatttaaattcataaatttagctgaaagatactgattcaatttgtatacagtgaatataaatgagacgacagcaaaattttcatgaaatgtaaaatatttttatagtttgttcatactatatgaggttctattttaaatgactttctggattttaaaaaatttctttaaatacaatcatttttgtaatatttattttatgcttatgatctagataattgcagaatatcattttatctgactctgtcttcataagagagctgtggccgaattttgaacatctgttatagggagtgatcaaattagaaggcaatgtggaaaaacaattctgggaaagatttctttatatgaagtccctgccactagccagccatcctaattgatgaaagttatctgttcacaggcctgcagtgatggtgaggaatgttctgagatttgcgaaggcatttgagtagtgaaatgtaagcacaaaacctcctgaacccagagtgtgtatacacaggaataaactttatgacatttatgtatttttaaaaaactttgtatcgttataaaaaggctagtcattctttcaggagaacatctaggatcatagatgaaaaatcaagccccgatttagaactgtcttctccaggatggtctctaaggaaatttacatttggttctttcctactcagaactactcagaaacaactatatatttcaggttatttgagcacagtgaaagcagagtactatggttgtccaacacaggcctctcagatacaaggggaacacaattacatattgggctagattttgcccagttcaaaatagtatttgttatcaacttactttgttacttgtatcatgaattttaaaaccctaccactttaagaagacagggatgggttattcttttttggcaggtaggctatataactatgtgattttgaaatttaactgctctggattagggagcagtgaatcaaggcagacttatgaaatctgtattatatttgtaacagaatataggaaatttaacataattgatgagctcaaatcctgaaaaatgaaagaatccaaattatttcagaattatctaggttaaatattgatgtattatgatggttgcaaagtttttttgtgtgtccaataaacacattgtaaaaaaaagaatttgaattgatatctaaaaacagaatttgaattgatatttcatcttgacttttaaagccctagaggctaattgttagtaacatcaatttctattaggatatccgtttggccacacagcaggaggttagagcaatggagcattactgagttcctccccctgtcagatcagcagcagcattagattctcatagaagtgcgaaccatatggtgaactggtatgtgagggatctagagtgccatgttcctcaagagaatctaatgcctgatgatctgaggtggaacagttcatcctgaaaccattcccccatccacagaaaaattgtcttccatgaaactggtcccaaaaagggtggggaccacaggtttaaagcatggccacatttctttatattaaaattctagtttgtacatttcttttagaaacaattacatgttactttggaatcatttcttccatgcttcctccataaagactgataagtcttggatgcaatctgtaaagaaaatacattatttcatcaacttattttgttgtttttcacatacacctaataagtatggtacacaatgccaatgccaaatacaaattgataacaaacacagcattcccaacagagctgtaatctagaaaactgagaaggtctgattgataaatcatcaacaacaataattgctctaaaacctccttaactgacttccttgattgtccaatgctctccattacctctgtaaaacagtcagttatgcccccatgtctagtgggcacccctgcatgcttcttctaaccactgagtgtcacaatgcctaccaagaatgcgtttgcaggttcctaaacctgtttataccagttgctatgtaaaattgttcccaagggaagttgaatgctctgtaaaggcctaataaaagcaaattactgaacaaaacatgttacagtaattatgagtgagaggaaactaagatggaaggataaaaatctaacactttactattcagatggctccactaaaagatttaagatcttgatccatttttaaaaatccaaaatggaagttgtagacattatctgtagtttatgcacaacaataaattagaaagccaatgtagacacgcataaccaaagaaaatgccttgggtctacataacagttgaataaatgtaaagttgctttttatttattgaaatttgtgcatgtctctttatgcttccctgatttactgattttttaaaaactaaccaactgcctgctttgatagttcagagaagagagctttcgttgtaatattagatttatgtttactggttgacaataagcggtgaaataaatagacttacctaatatggacctctgatgcaacttccattaagtcaccatctacattccaagggaaacaattttctgaagcagtttcatcctcctcctcctctggattatatccaccagtattattccttggatgaacttttacttcctcaacagtgtaagtctcaacaaatggaaaattgaactaaaaataaatacaaataatcattatacttggtttatctctagctactaacgcgaatcaaagttcactgagccctctctcacaagtaaatatcagcatgtatgctgacattttaatagctttgagactatgaacagggatctccaactttttttggaagaaggaatctcttatccaaagccttttgggttcttttagatctagcacctagaaatcttgttttatgacaaatagtacatatctgtgagaagttacataaaatagtgatactgtagatttttcaattaaagataatctttaatactggcctgtagatacagaagacatataatccattatcaacttgtcaattagtttagctgacataaagcaaactagtacaagtttcacacttggaatttaatttggaagaacgcaagtctaaacttctgaagataaaatgggatgtatgtcttcttttaaaagagaaagccaatcaaatatggattttaaaaggtgtttgcctgccccattcccactttaacaatggacacaagctgcaagatcactgtttacttaccactatagaatggtgcaaggtaaacttcaacttgcgttttttcttgtttgcctaaggaaactatactgaaaaagcactatgtattttctgacataattaagaaaatatagccaaataacttgagcagaaatgtataactactcatttcagttttcagaaaaatgacatgagatacattcctaattaaacatcatctacatagtttttccccttttccacatgtaaacctcaatgaaacatagttttaaaagttgacagaaaactaatattttccccaacacccatattttacatatgtagataccaaggtccagccaactttccagtttatactgtaaacacagttaaacagtagatgatatgatggcatcagctgttgtgactgaggtacagaattagagggccccaagcaaaactgtttgacagtaactgcgttagacctcctacctcgggtataaagccttggctacatgcctcatccttgtagaattatctacataatcattcatgttagttgataattcatttaaaacacacaactgcctgttatgatctaaattatatttccctccaccaccccaactatgttcaagtcctaacccctggtacctgtgaatgtcccctgtttagaaatagggtctttgcaggtagaatcaacttaagatgaagtcattagggcgggccctaatccaatatgactgatgtccttatgagagaagaatgccaaggatggcagagtcagagactggagggatgcagctgtaagccaaggaatgtcaagaattgacagccaccaccagtaagtctattatcttaaatcagcagttgtcatgtgcactcctcacaaaatgaagatctagccatccttcaaatgctttaactgtgaagccacagacgctgttaagtgggactttcgggagccaagagcttagtatcctgtgtgagggtatgtttggggcacggggaggagaagtaaacagttacaattttgatacaggggagtgccatgatggtgcaagtgtggagttcaacggaggaaacaagaggaggcaaacaggctatggatgttgggaaagcttcccatttgaattgagccttaaagaacatataagatttagcctggagaagaaagtctggagagaggaagcatttacaaaactagaggcaaaccatggtcaagcaactacacagaattcagtgtgactcctaggtgctcaacatcatgccccttggccctcaaattcctgtattgaaatcctcgctctgtatacctcagaacataactatatttggagataagatctttaaagagacgattaagctaaaatgatgtctttaggccctcatccaatacgactggtgtccttataagaagaggaaatttggacataggaaaaggcatcggggatgaacagaggaaagaccactcacttgtgggtgctgtgagaaagcagccatgtgccagccagagagagaagactcaggacaaaccaaacctgctgacattgtcttgcagctctagcctccagaaccatgaaagaaatacatttctgtttgtttaagccatcttttctgtggtatttgttatggcaaccttagccaatgaataaaatgccaaaacactgggaatgtggtggagggtggtaataagaggtggggttgcaacacaggcagggacctggatacaaaggccacgtgttccagactgaggatattccatattattctgacaacaagagaaaggcactgaagaattaagcaggagagaaatccaatgtgtgtcttagaaaaaagtttctctaaaaagaggtatggaagacaagaccagagaacctgaaggccaaaaggaggctactgtaagcaagaaaggattaaagtttgaattaaggtgagggagaaattttagaaacatttaagaggagaccaacagaacaagttaggggactggtagtgaggaatgaggaagaaggaacagttcagggtaacctggatgggtagaaagtggtgccattgacccgcacagagcaacgcagaaggaacaactttaggggaaaagataaggtcggctgtagacatgttggcctccagatgccggtgaatttcagaacctcttcagcatacaagaagacagaggtcctgcagataagacgagatgacagaacccttgggagtgcatgatgttcagacagttcaaaagtgaggggcaatgaggccatccaggagacggcatcctgagaagatgagagggctgcaaagaaatcctgggggaagcactcacatttaaggttttaaactccctaccaaaaatggtcacaatgaaagagaaaagtgtggacagtgagaaggggggcaaagcaataggatggagctgcaaggactttgaagggtagtgttcagcctctatctaattttacacagagatggggaaggaacaggagccactccgcacatggtggtttcaatctattttacagtgttatacagtaacattcgcttattcaacctggtaaaaatggttcagagaagcagatgttactctccttaaactgaattgccacattttccttcctgaataccagcactgctatgaattatgcagtagacatgatttttacatagatctgattttcataatcttacaaaatttatataaattcacatttttaatgtcaccatgaaggaaagagcctaaataaacacacctgtgtggataattaacaaatcaaattaacattgcttgaaagcagtcaccctgggaatcaatctttcttactatatacactatgcaaaatattttagaattctttgcaaaaaaaaaaaaatagcatggattttaatttttgaaagttgataaataaatcagagttaaggccagtgaatcacacacaggcaactgtttcttgtgtcaaaagcaagatatgcctcgtagagtacatgagaaaatatgataaatcctgcataatattatctcttagaaaacgtcttcctatcgatacagatttttattattttctgtatgtctgtctttatgtgtaaggtaaccattgcttttaaaatcagaagaaaggtatattgatttaaaaaaatgaagaagaagaatgtttacaaaaattgcctgagagacttgccccataggcaatttcaaaagagaccttccataaacaatttgtgcaacatacacctccccaaaataaatacagaacttctcaggggtacattaataggttaatactatttaagttctcaaatagaggtacatgaatgaggttaatacttactttacttctcatttatttaataaaaaaggattcggaaaaaattctaccaaggtaatgacactaatcttgaggaacatggaattttgagtgctttaaaatcattttcttgtttctattttctgacttaaaaacagcaatgaatatatagtgctttgggttttttaaaaattggttttaatgtttagaaatttattaaaatgtgaaagggcatatattcctttgaaaatcaataaatctccatattccacccaaacacatacataaaactgttatgtaggctcacaacctacattatacctgctgatctactttgacatataaagaaagtgggactgtaattttttatgatttaagtttctaagcagcccagttagttgttcaatacatgaggatcaaataatgttactgacagatcaaacttcatgaagatggcctaagaaagttttaaaatataatgaggcaaaaatggagagacttgctatggctaaggtacataagcaaggttcagctgccagtcattggctgggtttactctcctcctcctcccgtctgttatctcccaactctatccaagcaccattttatacctttaagaatgtgtgggccggacgtggtggctcacgcctgtaatcccagcactttgggaggccgaggtggacacatcacgaggtcaggagtttcgagaccagcctgaccaacatggtgaaaccctgtctctaccaaaaatataaaaattagctgggcatggaggtgtgagcctgtaatcccacctactcgggaggctgaggcaggagaatcgcttgaacgtgggaggtggaggttgcagtgagcagacatcacgccactgcactccagcctgggtgacacagcaaggctctaactcaaaaaaaaaaaaaaaaagaaagaaaaagaaaaagtgtgaaactatagggttttacaaccatacctatgtacttcaaagactcacaatttcagaaattcacatagttcaaggatcattttcctaataatcaggtcaaaacagctgccaaaataatatggcttgtaatagttactgtttctctttaaagcaaatcacttaagtggaaatgtatatcttcacatattctcattttgaatgaatatttgtataaaactgtcatatttttaaatacatatctacagatctatttcaatcaatgcagatatgcaaacaaatgtcaggaagatctaaagatcataactttagaaagtctgctgccataatatcaagaaggctaaactctcaaatttcacttcttttcattctgaagaacagcctgagtatggaattttatccttaatttatttcacattgcaatataacactacatttcctattttatctttgtggttacagatacataaccactaattcatcattcaaaaaaggccaatctatattaatcctggcggatgcttttcaaaatttggatgaaatagattgggaaaaagaagattaatatattcagaagaaaataaaaccttcttatgaggcaggattcgatgtcaattcttgcagcatctttttctacatgattaatagctttgcaaataagtaacaaaaagaatttactatacctgattttttacactggcatatcttttcaggtgttttataaattctggccgagaagtgtttcgggcaattataagagccatacttccattatttaatctgaaattaaatatttctattagacatcaagaaatttactaagagattataccaaaaattatgacatactgttccttataacaagtatactgtttactgaaagtattggacaagatagataaatcaccatgttacgtttacctaaaattcataaaccgtatcttgctattttttaaatgatgcaggctttcaaatgagttttattaaatcactggcttccttctcaataagctcttacattagagcattttacaaagcaaaccatcaagcgtcctactcacatatcaagacataatttaaaatacaatgtaattagaaattctaaatgtgaaactatgttgttaaaagatgtattatagaagagttaatatgcacaagttgtgtaacaaatagctcaacattttctaaaatctaaagtgtgatttaaatatttatttatagacagaaggtctaagtgacataggaaatgaaataaatcaaagtggcctttggatggatgaaatggagtgaacaaatgctgccacacatgttcagttaaatgactgaacattttaatcttgcataactgttccatccaatataagagagtgaaaattcagaggtgtgatttagtgccaaaacagccactcacaaatgcatcaagctatagaatgcagtttgcagaaatacatacaaatgacttctagcttgatttcagtgcaaacatgaagttaatttaagaataacaacaaaataaaaaaagagctcttagtatcttatgaaagctcaagtcagagctgtaagggaccttagagattatctcatcattcgctcatttcatgtagagggaaaagacaactccaagtttaagtgatttgttcaaaggcacacagagaaaaaatggtcatcagcaccaatactccaggtgctcagtatgctttccatcatgcttcttcttcccaattaaaaataaacagcaccaaaacgttcatggtagtgttactgtgcatctttaattgcataatttataaacattaaaagcactatcctatgcctgctttgcaatatttacttgaaatagaaacacaacttacatggctggcactgctttaaatgtctcacatatatgaacacatttaatcttagaatacttagaatataagaatattagttcctactggcaatttgcactgagatattctaacataaattattatttatcatggtgggggaaaaagaagaaagtgaaatctcctgttcaatcatcctgaatcatcagaagctacatctctgaaaaatctccggtcaaatgagtcttgatcaaaaggtctttgcaaagatggcatgttgtgattataaaccacagaagaaatctctaattagtcatccttctctgaaaaattcattaatactgattaagcctgcagagtcaacagtggaattctagtcaagcagaacatttatggagtggctttgaaggagctatgaatcgattgttcccagaagagcaggtctaccctcccaagaaggtccttaaacaaacagggttagataaacattgtctcaagtcctgccaaacatagctccttggtcagctagccacgtcttcaagtttagtcagggaaactacattatgaaagcacacagctatctaggatttctgaaggtgtcggggaaaaccaccaggctcaatttctaaatcacacaaggttcaaaatactcctttgaagttttagcactagatgtaattaatgaggaccttgccatctgggttttcaatatcgaagtttgcagtttctcttttttcttctctaactttgaatatttccccgtttattgcctatatttcacaacactcacgatcctttctcctacactctacaggattggattcaggaaagaaatattttcagccccataatggacagctgattaagaagaatatgcaagagaaggaatgtctatatcccatggataaaaagatatatataagatgtctcatattttattcaattgaaaatgtgggcaggagattgatatgcactactattcacattaaatagaactgaaatgtttcttttgactaaaagtatctgatatggtttggctttgtgttcccactcaaatctcatcttgtagctctcataattcccatgtgttgtgggagagacctggtgggagataactgaatcatgggggtgggtctttcctgtgctgctctcatggtaatgaataagtctcatgagatctaatggttttaaaaataggagtttccctgcacaagctctcttgtctgccgccatgtgagatgtgactttcatcttccaccatgattgtggagcctccccagcaacgtggaactgtaagtccattaaacctctttcttttgtaaattacccagtctcgggtatgtctttatcagcagcatgaaaacagactaatacagtatcaaatatacatatgtgtgattttcatgctaaggatatttatgtttgcattaaagttggaaagcaaagacattcacaagaaatatcagtatttaatataatgttctccacaactaaatgaataaatcaagtaaagtaggcataaaattctatcaataaaacttaggaaatattattttagcctcagtgacgttaaatagtcaatgattatctgataattattccagttcaacagttgttctcaacctactgtgatgacaaatcccttagaatctctaatatacaaagataaactacctgttaagtttctagctaaccaacagttaattggataccctggaaaaaaaatggtctataagaaatgtatcaacaattcaataaaaatgcttactaacctggtattaggtgccaagcctctaggtgccactgaacacaggcaaggaattgccataatgctgacattcaagaactgaccctggatcatttgccattgatcattacagtctaaaggtaatgaaagtgattggttattttccctcaccagaacaaaatgtcaacagaacctggcacagttctcaaggagatacttttcgactcaccagatttgggagatccctgtgccctcctaaaagaaagaaaacaaaacaaagacataaaacagataacgcgcgcacagacacacagacacacacaaaatctattaaatatgagaaaattagagaactcatcattatatatgttaaatactttcttcaattagatagtaagtaaaaacgtgtacaattttgtt

SEQ ID NO: 862 - DNA, 6761 bp, Homo sapiens
ggcagggcacacctggattgcattagaatgagactcactacccagttcaggtgtgttgcgttgtgggtctccggcacatttcagaggctcattaggaccctgaccccacactggggtttacacccctaaaagcaggtgtgtcccgtggcaactgagtgggtgcgtgaaaaggggggatcatcaattaccagctggagcaatccgaatcggttaaagtgaatcaagtcacagtgcttccttaacccaacctctctgttggggtcagccacagcctaaaccgcctgccgttcagcctgagaggctgctgctagcctgctcacgcatgcagcccgggctgcagaggaagtgtggggaggaaggaagtgggtatagaagggtgctgagatgtgggtcttgaagagaatagccataacgtctttgtcactaaaatgttccccaggggccttcggcgagtctttttgtttggttttttgtttttaatctgtggctcttgataatttatctagtggttgcctacacctgaaaaacaagacacagtgtttaactatcaacgaaagaactggacggctccccgccgcagtcccactccccgagtttgtggctggcatttgggccacgccgggctgggcggtcacagcgaggggcgcgcagtttggggtcacacagctccgcttctaggccccaaccaccgttaaaaggggaagcccgtgccccatcaggtccgctcttgctgagcccagagccatcccgcgctctgcgggctgggaggcccgggccaggacgcgagtcctgcgcagccgaggttccccagcgccccctgcagccgcgcgtaggcagagacggagcccggccctgcgcctccgcaccacgcccgggaccccacccagcggcccgtacccggagaagcagcgcgagcacccgaagctcccggctggcggcagaaaccgggagtggggccgggcgagtgcgcggcatcccaggccggcccgaacgctccgcccgcggtgggccgacttcccctcctcttccctctctccttcctttagcccgctggcgccggacacgctgcgcctcatctcttggggcgttcttccccgttggccaaccgtcgcatcccgtgcaactttggggtagtggccgtttagtgttgaatgttccccaccgagagcgcatggcttgggaagcgaggcgcgaacccggcccccgaagggccgccgtccgggagacggtgatgctgttgctgtgcctgggggtcccgaccggccgcccctacaacgtggacactgagagcgcgctgctttaccagggcccccacaacacgctgttcggctactcggtcgtgctgcacagccacggggcgaaccgatggctcctagtgggtgcgcccactgccaactggctcgccaacgcttcagtgatcaatcccggggcgatttacagatgcaggatcggaaagaatcccggccagacgtgcgaacagctccagctgggtagccctaatggagaaccttgtggaaagacttgtttggaagagagagacaatcagtggttgggggtcacactttccagacagccaggagaaaatggatccatcgtgacttgtgggcatagatggaaaaatatattttacataaagaatgaaaataagctccccactggtggttgctatggagtgccccctgatttacgaacagaactgagtaaaagaatagctccgtgttatcaagattatgtgaaaaaatttggagaaaattttgcatcatgtcaagctggaatatccagtttttacacaaaggatttaattgtgatgggggccccaggatcatcttactggactggctctctttttgtctacaatataactacaaataaatacaaggcttttttagacaaacaaaatcaagtaaaatttggaagttatttaggatattcagtcggagctggtcattttcggagccagcatactaccgaagtagtcggaggagctcctcaacatgagcagattggtaaggcatatatattcagcattgatgaaaaagaactaaatatcttacatgaaatgaaaggtaaaaagcttggatcgtactttggagcttctgtctgtgctgtggacctcaatgcagatggcttctcagatctgctcgtgggagcacccatgcagagcaccatcagagaggaaggaagagtgtttgtgtacatcaactctggctcgggagcagtaatgaatgcaatggaaacaaacctcgttggaagtgacaaatatgctgcaagatttggggaatctatagttaatcttggcgacattgacaatgatggctttgaagatgttgctatcggagctccacaagaagatgacttgcaaggtgctatttatatttacaatggccgtgcagatgggatctcgtcaaccttctcacagagaattgaaggacttcagatcagcaaatcgttaagtatgtttggacagtctatatcaggacaaattgatgcagataataatggctatgtagatgtagcagttggtgcttttcggtctgattctgctgtcttgctaaggacaagacctgtagtaattgttgacgcttctttaagccaccctgagtcagtaaatagaacgaaatttgactgtgttgaaaatggatggccttctgtgtgcatagatctaacactttgtttctcatataagggcaaggaagttccaggttacattgttttgttttataacatgagtttggatgtgaacagaaaggcagagtctccaccaagattctatttctcttctaatggaacttctgacgtgattacaggaagcatacaggtgtccagcagagaagctaactgtagaacacatcaagcatttatgcggaaagatgtgcgggacatcctcaccccaattcagattgaagctgcttaccaccttggtcctcatgtcatcagtaaacgaagtacagaggaattcccaccacttcagccaattcttcagcagaagaaagaaaaagacataatgaaaaaaacgataaactttgcaaggttttgtgcccatgaaaattgttctgctgatttacaggtttctgcaaagattgggtttttgaagccccatgaaaataaaacatatcttgctgttgggagtatgaagacattgatgttgaatgtgtccttgtttaatgctggagatgatgcatatgaaacgactctacatgtcaaactacccgtgggtctttatttcattaagattttagagctggaagagaagcaaataaactgtgaagtcacagataactctggcgtggtacaacttgactgcagtattggctatatatatgtagatcatctctcaaggatagatattagctttctcctggatgtgagctcactcagcagagcggaagaggacctcagtatcacagtgcatgctacctgtgaaaatgaagaggaaatggacaatctaaagcacagcagagtgactgtagcaatacctttaaaatatgaggttaagctgactgttcatgggtttgtaaacccaacttcatttgtgtatggatcaaatgatgaaaatgagcctgaaacgtgcatggtggagaaaatgaacttaactttccatgttatcaacactggcaatagtatggctcccaatgttagtgtggaaataatggtaccaaattcttttagcccccaaactgataagctgttcaacattttggatgtccagactactactggagaatgccactttgaaaattatcaaagagtgtgtgcattagagcagcaaaagagtgcaatgcagaccttgaaaggcatagtccagttcttgtccaagactgataagaggctattgtactgcataaaagctgatccacattgtttaaatttcttgtgtaattttgggaaaatggaaagtggaaaagaagccagtgttcatatccaactggaaggccggccatccattttagaaatggatgagacttcagcactcaagtttgaaataagagcaacaggttttccagagccaaatccaagagtaattgaactaaacaaggatgagaatgttgcgcacgttctactggaaggactacatcatcaaagacccaaacgttatttcaccatagtgattatttcaagtagcttgctacttggacttattgtacttctgttgatctcatatgttatgtggaaggctggcttctttaaaagacaatacaaatctatcctacaagaagaaaacagaagagacagttggagttatatcaacagtaaaagcaatgatgattaaggacttctttcaaattgagagaatggaaaacagactcaggttgtagtaaagaaatttaaaagacactgtttacaagaaaaaatgaattttgtttggacttcttttactcatgatcttgtgacatattatgtcttcatgcaaggggaaaatctcagcaatgattactctttgagatagaagaactgcaaaggtaataatacagccaaagataatctctcagcttttaaatgggtagagaaacactaaagcattcaatttattcaagaaaagtaagcccttgaagatatcttgaaatgaaagtataactgagttaaattatactggagaagtcttagacttgaaatactacttaccatatgtgcttgcctcagtaaaatgaaccccactgggtgggcagaggttcatttcaaatacatctttgatacttgttcaaaatatgttctttaaaaatataattttttagagagctgttcccaaattttctaacgagtggaccattatcactttaaagccctttatttataatacatttcctacgggctgtgttccaacaaccattttttttcagcagactatgaatattatagtattataggccaaactggcaaacttcagactgaacatgtacactggtttgagcttagtgaaatgacttctggataattatttttttataattatggatttcaccatctttctttctgtatatatacatgtgtttttatgtaggtatatatttaccattcttcctatctattcttcctataacacacctttatcaagcatacccaggagtaatcttcaaatcttttgttatattctgaaacaaaagattgtgagtgttgcactttacctgatacacgctgatttagaaaatacagaaaccatacctcactaataactttaaaatcaaagctgtgcaaagactagggggcctatacttcatatgtattatgtactatgtaaaatattgactatcacacaactatttccttggatgtaattctttgttaccctttacaagtataagtttacaagtataagtgttaccttacatggaaacgaagaaacaaaattcataaatttaaattcataaatttagctgaaagatactgattcaatttgtatacagtgaatataaatgagacgacagcaaaattttcatgaaatgtaaaatatttttatagtttgttcatactatatgaggttctattttaaatgactttctggattttaaaaaatttctttaaatacaatcatttttgtaatatttattttatgcttatgatctagataattgcagaatatcattttatctgactctgtcttcataagagagctgtggccgaattttgaacatctgttatagggagtgatcaaattagaaggcaatgtggaaaaacaattctgggaaagatttctttatatgaagtccctgccactagccagccatcctaattgatgaaagttatctgttcacaggcctgcagtgatggtgaggaatgttctgagatttgcgaaggcatttgagtagtgaaatgtaagcacaaaacctcctgaacccagagtgtgtatacacaggaataaactttatgacatttatgtatttttaaaaaactttgtatcgttataaaaaggctagtcattctttcaggagaacatctaggatcatagatgaaaaatcaagccccgatttagaactgtcttctccaggatggtctctaaggaaatttacatttggttctttcctactcagaactactcagaaacaactatatatttcaggttatttgagcacagtgaaagcagagtactatggttgtccaacacaggcctctcagatacaaggggaacacaattacatattgggctagattttgcccagttcaaaatagtatttgttatcaacttactttgttacttgtatcatgaattttaaaaccctaccactttaagaagacagggatgggttattcttttttggcaggtaggctatataactatgtgattttgaaatttaactgctctggattagggagcagtgaatcaaggcagacttatgaaatctgtattatatttgtaacagaatataggaaatttaacataattgatgagctcaaatcctgaaaaatgaaagaatccaaattatttcagaattatctaggttaaatattgatgtattatgatggttgcaaagtttttttgtgtgtccaataaacacattgtaaaaaaaagaatttgaattgatatctaaaaacagaatttgaattgatatttcatcttgacttttaaagccctagaggctaattgttagtaacatcaatttctattaggatatccgtttggccacacagcaggaggttagagcaatggagcattactgagttcctccccctgtcagatcagcagcagcattagattctcatagaagtgcgaaccatatggtgaactggtatgtgagggatctagagtgccatgttcctcaagagaa

SEQ ID NO: 863 - protein, 1020 aa, Homo sapiens
MAWEARREPGPRRAAVRETVMLLLCLGVPTGRPYNVDTESALLYQGPHNTLFGYSVVLHSHGANRWLLVGAPTANWLANASVINPGAIYRCRIGKNPGQTCEQLQLGSPNGEPCGKTCLEERDNQWLGVTLSRQPGENGSIVTCGHRWKNIFYIKNENKLPTGGCYGVPPDLRTELSKRIAPCYQDYVKKFGENFASCQAGISSFYTKDLIVMGAPGSSYWTGSLFVYNITTNKYKAFLDKQNQVKFGSYLGYSVGAGHFRSQHTTEVVGGAPQHEQIGKAYIFSIDEKELNILHEMKGKKLGSYFGASVCAVDLNADGFSDLLVGAPMQSTIREEGRVFVYINSGSGAVMNAMNLVGSDKYAARFGESIVNLGDIDNDGFEDVAIGAPQEDDLQGAIYIYNGRADGISSTFSQRIEGLQISKSLSMFGQSISGQIDADNNGYVDVAVGAFRSDSAVLLRWVVIVDASLSHPESVNRTKFDCVENGWPSVCIDLTLCFSYKGKEVPGYIVLFYNMSLDVNRKAESPPRFYFSSNGTSDVITGSIQVSSREANCRTHQAFMRKDVRDILTPIQIEAAYHLGPHVISKRSTEEFPPLQPILQQKKEKDIMKKTINFARFCAHENCSADLQVSAKIGFLKFNKTYLAVGSMKTLMLNVSLFNAGDDAYETTLHVKLPVGFIKILEEKQINCEVTDNSGVVQLDCSIGYIYVDHLSRIDISFLLDVSSLSRAEEDLSITVHATCENEEEMDNLKHSRVTVAIPLKYEVKLTVHGFVNPTSFVYGSNDENEPETCMVEKMNLTFHVINTGNSMAPNVSVEIMVPNSFSPQTDKLFNILDVQTTTGECHFENYQRVCALEQQKSAMQTLKGIVQFLSKTDKRLLYCIKADPHCLNFLCNFGKMESGKEASVHIQLEGRPSIMDETSALKFEIRATGFPEPNPRVIELNKDENVAHVLLEGLHHQRPKRYFTIVIISSSLLLGLIVLLLISYVMWKAGFFKRQYKSILQEENRRDSWSYINSKSNDD

SEQ ID NO: 864 - DNA, 6746 bp, Homo sapiens
ggcagggcacacctggattgcattagaatgagactcactacccagttcaggtgtgttgcgttgtgggtctccggcacatttcagaggctcattaggaccctgaccccacactggggtttacacccctaaaagcaggtgtgtcccgtggcaactgagtgggtgcgtgaaaaggggggatcatcaattaccagctggagcaatccgaatcggttaaagtgaatcaagtcacagtgcttccttaacccaacctctctgttggggtcagccacagcctaaaccgcctgccgttcagcctgagaggctgctgctagcctgctcacgcatgcagcccgggctgcagaggaagtgtggggaggaaggaagtgggtatagaagggtgctgagatgtgggtcttgaagagaatagccataacgtctttgtcactaaaatgttccccaggggccttcggcgagtctttttgtttggttttttgtttttaatctgtggctcttgataatttatctagtggttgcctacacctgaaaaacaagacacagtgtttaactatcaacgaaagaactggacggctccccgccgcagtcccactccccgagtttgtggctggcatttgggccacgccgggctgggcggtcacagcgaggggcgcgcagtttggggtcacacagctccgcttctaggccccaaccaccgttaaaaggggaagcccgtgccccatcaggtccgctcttgctgagcccagagccatcccgcgctctgcgggctgggaggcccgggccaggacgcgagtcctgcgcagccgaggttccccagcgccccctgcagccgcgcgtaggcagagacggagcccggccctgcgcctccgcaccacgcccgggaccccacccagcggcccgtacccggagaagcagcgcgagcacccgaagctcccggctggcggcagaaaccgggagtggggccgggcgagtgcgcggcatcccaggccggcccgaacgctccgcccgcggtgggccgacttcccctcctcttccctctctccttcctttagcccgctggcgccggacacgctgcgcctcatctcttggggcgttcttccccgttggccaaccgtcgcatcccgtgcaactttggggtagtggccgtttagtgttgaatgttccccaccgagagcgcatggcttgggaagcgaggcgcgaacccggcccccgaagggccgccgtccgggagacggtgatgctgttgctgtgcctgggggtcccgaccggccgcccctacaacgtggacactgagagcgcgctgctttaccagggcccccacaacacgctgttcggctactcggtcgtgctgcacagccacggggcgaaccgatggctcctagtgggtgcgcccactgccaactggctcgccaacgcttcagtgatcaatcccggggcgatttacagatgcaggatcggaaagaatcccggccagacgtgcgaacagctccagctgggtagccctaatggagaaccttgtggaaagacttgtttggaagagagagacaatcagtggttgggggtcacactttccagacagccaggagaaaatggatccatcgtgacttgtgggcatagatggaaaaatatattttacataaagaatgaaaataagctccccactggtggttgctatggagtgccccctgatttacgaacagaactgagtaaaagaatagctccgtgttatcaagattatgtgaaaaaatttggagaaaattttgcatcatgtcaagctggaatatccagtttttacacaaaggatttaattgtgatgggggccccaggatcatcttactggactggctctctttttgtctacaatataactacaaataaatacaaggcttttttagacaaacaaaatcaagtaaaatttggaagttatttaggatattcagtcggagctggtcattttcggagccagcatactaccgaagtagtcggaggagctcctcaacatgagcagattggtaaggcatatatattcagcattgatgaaaaagaactaaatatcttacatgaaatgaaaggtaaaaagcttggatcgtactttggagcttctgtctgtgctgtggacctcaatgcagatggcttctcagatctgctcgtgggagcacccatgcagagcaccatcagagaggaaggaagagtgtttgtgtacatcaactctggctcgggagcagtaatgaatgcaatggaaacaaacctcgttggaagtgacaaatatgctgcaagatttggggaatctatagttaatcttggcgacattgacaatgatggctttgaagatgttgctatcggagctccacaagaagatgacttgcaaggtgctatttatatttacaatggccgtgcagatgggatctcgtcaaccttctcacagagaattgaaggacttcagatcagcaaatcgttaagtatgtttggacagtctatatcaggacaaattgatgcagataataatggctatgtagatgtagcagttggtgcttttcggtctgattctgctgtcttgctaaggacaagacctgtagtaattgttgacgcttctttaagccaccctgagtcagtaaatagaacgaaatttgactgtgttgaaaatggatggccttctgtgtgcatagatctaacactttgtttctcatataagggcaaggaagttccaggttacattgttttgttttataacatgagtttggatgtgaacagaaaggcagagtctccaccaagattctatttctcttctaatggaacttctgacgtgattacaggaagcatacaggtgtccagcagagaagctaactgtagaacacatcaagcatttatgcggaaagatgtgcgggacatcctcaccccaattcagattgaagctgcttaccaccttggtcctcatgtcatcagtaaacgaagtacagaggaattcccaccacttcagccaattcttcagcagaagaaagaaaaagacataatgaaaaaaacgataaactttgcaaggttttgtgcccatgaaaattgttctgctgatttacaggtttctgcaaagattgggtttttgaagccccatgaaaataaaacatatcttgctgttgggagtatgaagacattgatgttgaatgtgtccttgtttaatgctggagatgatgcatatgaaacgactctacatgtcaaactacccgtgggtctttatttcattaagattttagagctggaagagaagcaaataaactgtgaagtcacagataactctggcgtggtacaacttgactgcagtattggctatatatatgtagatcatctctcaaggatagatattagctttctcctggatgtgagctcactcagcagagcggaagaggacctcagtatcacagtgcatgctacctgtgaaaatgaagaggaaatggacaatctaaagcacagcagagtgactgtagcaatacctttaaaatatgaggttaagctgactgttcatgggtttgtaaacccaacttcatttgtgtatggatcaaatgatgaaaatgagcctgaaacgtgcatggtggagaaaatgaacttaactttccatgttatcaacactggcaatagtatggctcccaatgttagtgtggaaataatggtaccaaattcttttagcccccaaactgataagctgttcaacattttggatgtccagactactactggagaatgccactttgaaaattatcaaagagtgtgtgcattagagcagcaaaagagtgcaatgcagaccttgaaaggcatagtccagttcttgtccaagactgataagaggctattgtactgcataaaagctgatccacattgtttaaatttcttgtgtaattttgggaaaatggaaagtggaaaagaagccagtgttcatatccaactggaaggccggccatccattttagaaatggatgagacttcagcactcaagtttgaaataagagcaacaggttttccagagccaaatccaagagtaattgaactaaacaaggatgagaatgttgcgcacgttctactggaaggactacatcatcaaagacccaaacgttatttcaccatagtgattatttcaagtagcttgctacttggacttattgtacttctgttgatctcatatgttatgtggaaggctggcttctttaaaagacaatacaaatctatcctacaagaagaaaacagaagagacagttggagttatatcaacagtaaaagcaatgatgattaaggacttctttcaaattgagagaatggaaaacagactcaggttgtagtaaagaaatttaaaagacactgtttacaagaaaaaatgaattttgtttggacttcttttactcatgatcttgtgacatattatgtcttcatgcaaggggaaaatctcagcaatgattactctttgagatagaagaactgcaaaggtaataatacagccaaagataatctctcagcttttaaatgggtagagaaacactaaagcattcaatttattcaagaaaagtaagcccttgaagatatcttgaaatgaaagtataactgagttaaattatactggagaagtcttagacttgaaatactacttaccatatgtgcttgcctcagtaaaatgaaccccactgggtgggcagaggttcatttcaaatacatctttgatacttgttcaaaatatgttctttaaaaatataattttttagagagctgttcccaaattttctaacgagtggaccattatcactttaaagccctttatttataatacatttcctacgggctgtgttccaacaaccattttttttcagcagactatgaatattatagtattataggccaaactggcaaacttcagactgaacatgtacactggtttgagcttagtgaaatgacttctggataattatttttttataattatggatttcaccatctttctttctgtatatatacatgtgtttttatgtaggtatatatttaccattcttcctatctattcttcctataacacacctttatcaagcatacccaggagtaatcttcaaatcttttgttatattctgaaacaaaagattgtgagtgttgcactttacctgatacacgctgatttagaaaatacagaaaccatacctcactaataactttaaaatcaaagctgtgcaaagactagggggcctatacttcatatgtattatgtactatgtaaaatattgactatcacacaactatttccttggatgtaattctttgttaccctttacaagtataatgttaccttacatggaaacgaagaaacaaaattcataaatttaaattcataaatttagctgaaagatactgattcaatttgtatacagtgaatataaatgagacgacagcaaaattttcatgaaatgtaaaatatttttatagtttgttcatactatatgaggttctattttaaatgactttctggattttaaaaaatttctttaaatacaatcatttttgtaatatttattttatgcttatgatctagataattgcagaatatcattttatctgactctgtcttcataagagagctgtggccgaattttgaacatctgttatagggagtgatcaaattagaaggcaatgtggaaaaacaattctgggaaagatttctttatatgaagtccctgccactagccagccatcctaattgatgaaagttatctgttcacaggcctgcagtgatggtgaggaatgttctgagatttgcgaaggcatttgagtagtgaaatgtaagcacaaaacctcctgaacccagagtgtgtatacacaggaataaactttatgacatttatgtatttttaaaaaactttgtatcgttataaaaaggctagtcattctttcaggagaacatctaggatcatagatgaaaaatcaagccccgatttagaactgtcttctccaggatggtctctaaggaaatttacatttggttctttcctactcagaactactcagaaacaactatatatttcaggttatttgagcacagtgaaagcagagtactatggttgtccaacacaggcctctcagatacaaggggaacacaattacatattgggctagattttgcccagttcaaaatagtatttgttatcaacttactttgttacttgtatcatgaattttaaaaccctaccactttaagaagacagggatgggttattcttttttggcaggtaggctatataactatgtgattttgaaatttaactgctctggattagggagcagtgaatcaaggcagacttatgaaatctgtattatatttgtaacagaatataggaaatttaacataattgatgagctcaaatcctgaaaaatgaaagaatccaaattatttcagaattatctaggttaaatattgatgtattatgatggttgcaaagtttttttgtgtgtccaataaacacattgtaaaaaaaagaatttgaattgatatctaaaaacagaatttgaattgatatttcatcttgacttttaaagccctagaggctaattgttagtaacatcaatttctattaggatatccgtttggccacacagcaggaggttagagcaatggagcattactgagttcctccccctgtcagatcagcagcagcattagattctcatagaagtgcgaaccatatggtgaactggtatgtgagggatctagagtgccatgttcctcaagagaa

SEQ ID NO: 865 - protein, 1020 aa, Homo sapiens; identical to SEQ ID NO: 863

SEQ ID NO: 866 - DNA, 6786 bp, Homo sapiens
ggcagggcacacctggattgcattagaatgagactcactacccagttcaggtgtgttgcgttgtgggtctccggcacatttcagaggctcattaggaccctgaccccacactggggtttacacccctaaaagcaggtgtgtcccgtggcaactgagtgggtgcgtgaaaaggggggatcatcaattaccagctggagcaatccgaatcggttaaagtgaatcaagtcacagtgcttccttaacccaacctctctgttggggtcagccacagcctaaaccgcctgccgttcagcctgagaggctgctgctagcctgctcacgcatgcagcccgggctgcagaggaagtgtggggaggaaggaagtgggtatagaagggtgctgagatgtgggtcttgaagagaatagccataacgtctttgtcactaaaatgttccccaggggccttcggcgagtctttttgtttggttttttgtttttaatctgtggctcttgataatttatctagtggttgcctacacctgaaaaacaagacacagtgtttaactatcaacgaaagaactggacggctccccgccgcagtcccactccccgagtttgtggctggcatttgggccacgccgggctgggcggtcacagcgaggggcgcgcagtttggggtcacacagctccgcttctaggccccaaccaccgttaaaaggggaagcccgtgccccatcaggtccgctcttgctgagcccagagccatcccgcgctctgcgggctgggaggcccgggccaggacgcgagtcctgcgcagccgaggttccccagcgccccctgcagccgcgcgtaggcagagacggagcccggccctgcgcctccgcaccacgcccgggaccccacccagcggcccgtacccggagaagcagcgcgagcacccgaagctcccggctggcggcagaaaccgggagtggggccgggcgagtgcgcggcatcccaggccggcccgaacgctccgcccgcggtgggccgacttcccctcctcttccctctctccttcctttagcccgctggcgccggacacgctgcgcctcatctcttggggcgttcttccccgttggccaaccgtcgcatcccgtgcaactttggggtagtggccgtttagtgttgaatgttccccaccgagagcgcatggcttgggaagcgaggcgcgaacccggcccccgaagggccgccgtccgggagacggtgatgctgttgctgtgcctgggggtcccgaccggccgcccctacaacgtggacactgagagcgcgctgctttaccagggcccccacaacacgctgttcggctactcggtcgtgctgcacagccacggggcgaaccgatgcgcacgtgcacgtgtctcgctttaggctcctagtgggtgcgcccactgccaactggctcgccaacgcttcagtgatcaatcccggggcgatttacagatgcaggatcggaaagaatcccggccagacgtgcgaacagctccagctgggtagccctaatggagaaccttgtggaaagacttgtttggaagagagagacaatcagtggttgggggtcacactttccagacagccaggagaaaatggatccatcgtgacttgtgggcatagatggaaaaatatattttacataaagaatgaaaataagctccccactggtggttgctatggagtgccccctgatttacgaacagaactgagtaaaagaatagctccgtgttatcaagattatgtgaaaaaatttggagaaaattttgcatcatgtcaagctggaatatccagtttttacacaaaggatttaattgtgatgggggccccaggatcatcttactggactggctctctttttgtctacaatataactacaaataaatacaaggcttttttagacaaacaaaatcaagtaaaatttggaagttatttaggatattcagtcggagctggtcattttcggagccagcatactaccgaagtagtcggaggagctcctcaacatgagcagattggtaaggcatatatattcagcattgatgaaaaagaactaaatatcttacatgaaatgaaaggtaaaaagcttggatcgtactttggagcttctgtctgtgctgtggacctcaatgcagatggcttctcagatctgctcgtgggagcacccatgcagagcaccatcagagaggaaggaagagtgtttgtgtacatcaactctggctcgggagcagtaatgaatgcaatggaaacaaacctcgttggaagtgacaaatatgctgcaagatttggggaatctatagttaatcttggcgacattgacaatgatggctttgaagatgttgctatcggagctccacaagaagatgacttgcaaggtgctatttatatttacaatggccgtgcagatgggatctcgtcaaccttctcacagagaattgaaggacttcagatcagcaaatcgttaagtatgtttggacagtctatatcaggacaaattgatgcagataataatggctatgtagatgtagcagttggtgcttttcggtctgattctgctgtcttgctaaggacaagacctgtagtaattgttgacgcttctttaagccaccctgagtcagtaaatagaacgaaatttgactgtgttgaaaatggatggccttctgtgtgcatagatctaacactttgtttctcatataagggcaaggaagttccaggttacattgttttgttttataacatgagtttggatgtgaacagaaaggcagagtctccaccaagattctatttctcttctaatggaacttctgacgtgattacaggaagcatacaggtgtccagcagagaagctaactgtagaacacatcaagcatttatgcggaaagatgtgcgggacatcctcaccccaattcagattgaagctgcttaccaccttggtcctcatgtcatcagtaaacgaagtacagaggaattcccaccacttcagccaattcttcagcagaagaaagaaaaagacataatgaaaaaaacgataaactttgcaaggttttgtgcccatgaaaattgttctgctgatttacaggtttctgcaaagattgggtttttgaagccccatgaaaataaaacatatcttgctgttgggagtatgaagacattgatgttgaatgtgtccttgtttaatgctggagatgatgcatatgaaacgactctacatgtcaaactacccgtgggtctttatttcattaagattttagagctggaagagaagcaaataaactgtgaagtcacagataactctggcgtggtacaacttgactgcagtattggctatatatatgtagatcatctctcaaggatagatattagctttctcctggatgtgagctcactcagcagagcggaagaggacctcagtatcacagtgcatgctacctgtgaaaatgaagaggaaatggacaatctaaagcacagcagagtgactgtagcaatacctttaaaatatgaggttaagctgactgttcatgggtttgtaaacccaacttcatttgtgtatggatcaaatgatgaaaatgagcctgaaacgtgcatggtggagaaaatgaacttaactttccatgttatcaacactggcaatagtatggctcccaatgttagtgtggaaataatggtaccaaattcttttagcccccaaactgataagctgttcaacattttggatgtccagactactactggagaatgccactttgaaaattatcaaagagtgtgtgcattagagcagcaaaagagtgcaatgcagaccttgaaaggcatagtccagttcttgtccaagactgataagaggctattgtactgcataaaagctgatccacattgtttaaatttcttgtgtaattttgggaaaatggaaagtggaaaagaagccagtgttcatatccaactggaaggccggccatccattttagaaatggatgagacttcagcactcaagtttgaaataagagcaacaggttttccagagccaaatccaagagtaattgaactaaacaaggatgagaatgttgcgcacgttctactggaaggactacatcatcaaagacccaaacgttatttcaccatagtgattatttcaagtagcttgctacttggacttattgtacttctgttgatctcatatgttatgtggaaggctggcttctttaaaagacaatacaaatctatcctacaagaagaaaacagaagagacagttggagttatatcaacagtaaaagcaatgatgattaaggacttctttcaaattgagagaatggaaaacagactcaggttgtagtaaagaaatttaaaagacactgtttacaagaaaaaatgaattttgtttggacttcttttactcatgatcttgtgacatattatgtcttcatgcaaggggaaaatctcagcaatgattactctttgagatagaagaactgcaaaggtaataatacagccaaagataatctctcagcttttaaatgggtagagaaacactaaagcattcaatttattcaagaaaagtaagcccttgaagatatcttgaaatgaaagtataactgagttaaattatactggagaagtcttagacttgaaatactacttaccatatgtgcttgcctcagtaaaatgaaccccactgggtgggcagaggttcatttcaaatacatctttgatacttgttcaaaatatgttctttaaaaatataattttttagagagctgttcccaaattttctaacgagtggaccattatcactttaaagccctttatttataatacatttcctacgggctgtgttccaacaaccattttttttcagcagactatgaatattatagtattataggccaaactggcaaacttcagactgaacatgtacactggtttgagcttagtgaaatgacttctggataattatttttttataattatggatttcaccatctttctttctgtatatatacatgtgtttttatgtaggtatatatttaccattcttcctatctattcttcctataacacacctttatcaagcatacccaggagtaatcttcaaatcttttgttatattctgaaacaaaagattgtgagtgttgcactttacctgatacacgctgatttagaaaatacagaaaccatacctcactaataactttaaaatcaaagctgtgcaaagactagggggcctatacttcatatgtattatgtactatgtaaaatattgactatcacacaactatttccttggatgtaattctttgttaccctttacaagtataagtttacaagtataagtgttaccttacatggaaacgaagaaacaaaattcataaatttaaattcataaatttagctgaaagatactgattcaatttgtatacagtgaatataaatgagacgacagcaaaattttcatgaaatgtaaaatatttttatagtttgttcatactatatgaggttctattttaaatgactttctggattttaaaaaatttctttaaatacaatcatttttgtaatatttattttatgcttatgatctagataattgcagaatatcattttatctgactctgtcttcataagagagctgtggccgaattttgaacatctgttatagggagtgatcaaattagaaggcaatgtggaaaaacaattctgggaaagatttctttatatgaagtccctgccactagccagccatcctaattgatgaaagttatctgttcacaggcctgcagtgatggtgaggaatgttctgagatttgcgaaggcatttgagtagtgaaatgtaagcacaaaacctcctgaacccagagtgtgtatacacaggaataaactttatgacatttatgtatttttaaaaaactttgtatcgttataaaaaggctagtcattctttcaggagaacatctaggatcatagatgaaaaatcaagccccgatttagaactgtcttctccaggatggtctctaaggaaatttacatttggttctttcctactcagaactactcagaaacaactatatatttcaggttatttgagcacagtgaaagcagagtactatggttgtccaacacaggcctctcagatacaaggggaacacaattacatattgggctagattttgcccagttcaaaatagtatttgttatcaacttactttgttacttgtatcatgaattttaaaaccctaccactttaagaagacagggatgggttattcttttttggcaggtaggctatataactatgtgattttgaaatttaactgctctggattagggagcagtgaatcaaggcagacttatgaaatctgtattatatttgtaacagaatataggaaatttaacataattgatgagctcaaatcctgaaaaatgaaagaatccaaattatttcagaattatctaggttaaatattgatgtattatgatggttgcaaagtttttttgtgtgtccaataaacacattgtaaaaaaaagaatttgaattgatatctaaaaacagaatttgaattgatatttcatcttgacttttaaagccctagaggctaattgttagtaacatcaatttctattaggatatccgtttggccacacagcaggaggttagagcaatggagcattactgagttcctccccctgtcagatcagcagcagcattagattctcatagaagtgcgaaccatatggtgaactggtatgtgagggatctagagtgccatgttcctcaagagaa

SEQ ID NO: 867 - protein, 808 aa, Homo sapiens
MGAPGSSYWTGSLFVYNITTNKYKAFLDKQNQVKFGSYLGYSVGAGHFRSQHTTEVVGGAPQHEQIGKAYIFSIDEKELNILHEMKGKKLGSYFGASVCAVDLNADGFSDLLVGAPMQSTIREEGRVFVYINSGSGAVMNAMNLVGSDKYAARFGESIVNLGDIDNDGFEDVAIGAPQEDDLQGAIYIYNGRADGISSTFSQRIEGLQISKSLSMFGQSISGQIDADNNGYVDVAVGAFRSDSAVLLRWVVIVDASLSHPESVNRTKFDCVENGWPSVCIDLTLCFSYKGKEVPGYIVLFYNMSLDVNRKAESPPRFYFSSNGTSDVITGSIQVSSREANCRTHQAFMRKDVRDILTPIQIEAAYHLGPHVISKRSTEEFPPLQPILQQKKEKDIMKKTINFARFCAHENCSADLQVSAKIGFLKFNKTYLAVGSMKTLMLNVSLFNAGDDAYETTLHVKLPVGFIKILEEKQINCEVTDNSGVVQLDCSIGYIYVDHLSRIDISFLLDVSSLSRAEEDLSITVHATCENEEEMDNLKHSRVTVAIPLKYEVKLTVHGFVNPTSFVYGSNDENEPETCMVEKMNLTFHVINTGNSMAPNVSVEIMVPNSFSPQTDKLFNILDVQTTTGECHFENYQRVCALEQQKSAMQTLKGIVQFLSKTDKRLLYCIKADPHCLNFLCNFGKMESGKEASVHIQLEGRPSIMDETSALKFEIRATGFPEPNPRVIELNKDENVAHVLLEGLHHQRPKRYFTIVIISSSLLLGLIVLLLISYVMWKAGFFKRQYKSILQEENRRDSWSYINSKSNDD

SEQ ID NO: 868 - DNA, 25179 bp, Mus musculus
  misc_feature (1)...(25179): n = A,T,C or G
tgggtacactcaagtgtatgtgtatccatttgcacacacacagtcaactacacagacgtacatatgtgaggtgagggagagaaacaacactcttttttgtttgttagtcccgtatttcctgactgtttggcacaaaaggaatgtaatgtgctcccctgaagagctgggggtaggagttgtcttcgttttagttgaagcataaccataatggtcagagtacagaaaggggtttttatattggggccacacaggccataagccagggaagaggacagaacagaaaaggcttttaaaccggaagccagagaagtcttacccaaagaaccaactagaaattgtcataattcagcttgtccggagaaaaccatgtcaagtgtcagagagtataggaagggaaagtccccaaaggaagtcactggctaacttcacaacctagaactccagaaaccccaagtccaggtactgatcagaactctaactcagtgactactggggagtcccagggccctcacagaagtgaggaacctgaagactggtgctgatgacatctgataccacagaagtcagtgggcagaggcgagacttaaatctgtaactcaggctttgttccgaatctgcagtctgagagggcagtacattagtaccttaaaaacgtcctgtctcttatctcaaggcaacagagtcaacagagagaaggtgggtggggccccagaggcagctgatcaggtctagagtttgctcttgccctggctatgtggctggcaacatttctgagacttgggatgtctgtgcctgttttgctcttgtccctccagctctcctctcattctgtggatgtttgagctttggaacttcttgaaatatcaagcacactcccagagtttccactgtctcaggggcatcaggacttggggtggttaactcagagcagaaaatccattaacagtgagtgtgttaagatgcagagaacaagtgtgtctttaaactacagaaaaggaaagtgctcttatgtattccaccctgtctcttgtcattacagatattctctaaataagctaactttgtgttataagtgccttgctgggtgtggtagtgcttgcctttaatcccagcactggggaggcagaggcaggtgggtctctgtaaatttcaagtcagtttgatctacatagcaagttttaggccagccaaagttacatagtgagaccatgtctcaaaaatacaaaaaaaagctgggcggtggtgtctcatgcctttaatcccagcacttgggaggcagaggcaggcagatttcgaggccagcttggtctacaaagtgagttccaggacagccagggctatacagagaaagactgtctcaaaaaaacaaaaaaaaaccaaaaaaaaaaaaaaaaaaccaaacaaaaaaaaaaaacaaaaaaacaaaaaaacaaaaaacaaaaaacaaaaaaagtcatttgagccaaatgtgggcatgcacagcctgtacccggaaggtggaaggtgaaggcttgaagatcnnnnnnnnnnnnnnnnnnnnnnnnnnnnnnnnnnnnnnnnnnnnnnnnnnnnnnnnnnnnnnnnnnnnnnnnnnnnnnnnnnnnnnnnnnnnnnnnnnnnnnnnnnnnnnnnnnnnnnnnnnnnnnnnnnnnnnnnnnnnnnnnnnnnnnnnnnnnnnnnnnnnnnnnnnnnnnnnnnnnnnnnnnnnnnnnnnnnnnnnnnnnnnnnnnnnnnnnnnnnnnnnnnnnnnnnnnnnnnnnnnnnnnnnnnnnnnnnnnnnnnnnnnnnnnnnnnnnnnnnnnnnnnnnnnnnnnnnnnnnnnnnnnnntagaccagcctggcctcgaactcagaaatccccctgcctctgcctcccgagtgctgggattaaaggcgtgtgccaccatgcccagctccaatcatctttaaaaattgaaaataagacaattttcaatggcaataaccatctcagggaaagatgtagggagataagtagatctcctagtataaggtgggagacatatctcaatgtaaagtccctggaagatagcttcatggtccataggatgggctataataaggagaaactgggaatgcccctgatgaagggctgagtgaaaagcatggtatgaactgtgtgtggtgttgaaggccataatcccagcactcaggtggctcaagcaggaagactgagcactcatggccttccatagtgagaacccatctttgcaaaaaaaaaaaaaagtatggtgtattcatataataaaatagtatgaaaatatgaaaatatagtacatatgtatactgtaatagaaacaaatatagtatccataacatatggttacataaaaactactttgcagagaaatatatgcaagaggattagatttttgttaacatgtatccatgttatggatacacatgtcttatggctgtgagttttataattagagaaagtggtgtaaagatgtggcttagtggtagagctagcacacatggggccctgagtctgactaccaacaccccaaagaaaaaaatgtcaaagaccaacagtggtttttgaaaacaaaacagggctggagagatggctcagcggttaagagcgctgactgctcctctgaaggtcacaagttcaaatcccagcaaccacattgtcttagtcagggtctctattcctgcacaaacaacatgaccaagaagcaagctggggaggaaagggtttattcggcttacacttccatgctgctgttcattaccaaaggaagtcaggactggaactcaggcaggtcagaaagcaggagccgatgcagaggccatggagggatgttctttactggcttgcctctcctggcttgctcagcctgctctcttatagaaccaagattaccagcccagagatggtcccacccacaaggggcccttcccccttgatcactaattgagaaaatgccttacagttgtatctcatggaggcatttcctcaactgaagctcctttctctgtggtaactccagctgtgtcaagttgacacaaaactagccagtacacacatgatggctcacaaccatctgtactgagatctgatgccctcttctggggtgtctgaagacggctacagtgtacttacttatagaaataaataaatctttaaaaaagaaaacaaaacaaataagaaatccatggtggtgcacgcctttaatctcaacacttgggaggcagagacaagtggatctctgtgagtttgagggcagcctagtctacagaataagtcccagaacagggctatatattagaaaaacctaatcttaaaaataataataataaaaaaaattctacctgtgctcctctgtaggtactgcatcacagtccaaaggcaaaagttcacactctctcccttggttcacaggtcctcagctggctcctccttactccctcccagtagaattagttgctgtcctagtatcgagacctatttacagatctataaactacagtcccagagctcctctggggaaaatttcccctgtgcctcgcaggtagcagcacccagtaaggaactgttgaataactgaatggttgctgtgggcactgacatcagatgaacaagttgggacagattatggaaatatttgatacagactaagaagaaaaaagccaaagctgtggaaacctttgtcctggtctagaggacccctctcataaccctcagccgcctcttcacactgtaacgtttggaatgttatgtctctgaaataatgttacataaggcacatcaccagggcgggtctttctcgtgctgggctcacaacaccagagccgaaccagctcagacaagagtggtaggagaaggggaggacccaagcttctaacaaaaaatttcaccccagccccctcaggtatgaagcaggtgattcactgcttccaacagagagtatccaaaatgaccttcgaagccagagcctgcttggtcaaaaggcaaactagactttggaaaggcaaacattcatgttgaactaagttcttggtaactaggtcctaacatgtatgcttctggaaaggaggggctgggctagctttctattctacaaactcacaattcattatacttctggagaccagaagtccagcccaagacacatggagtcaaaaccaaggtgtcttgtgagcagcagtgctctctggagactctaggggcatctgttcccgactttcccccattcctcaggcttgccacatctcttgtttcatggcttctttctttgtctttacaaggccaattgcatccccctgattgggcttctgtggcagtgtttccctactgactagtgtcacaaaatagttccctgattaaaaaacaatttagatttatttagtttaggtctatgaatgttttgcctgcatgtatgtgtgcataccaggtgtgtgtctggtgctggctgagatcagatcttcccactttaaaagatacagattcccaagatataagatacaatttgttaaacgcatgaaactcaagaagaacgaagaccaaagtgtggacactgagccccttcttagaactgggaacaaaacacccatggaaagagttacagagataaagtttggagctgtgacgaaaggatggaccatctaaagactgccatatccagggatccatcccataatcagnnnnnnnnnnnnnnnnnnnnnnnnnnnnnnnnnnnnnnnnnnnnnnnnnnnnnnnnnnnnnnnnnnnnnnnnnnnnnnnnnnnnnnnnnnnnnnnnnnnnnnnnnnnnnnnnnnnnnnnnnnnnnnnnnnnnnnnacacacacacacacacacacacacacacacacacacacacacacacacaaaagatacagatttaagctgatcaatggtggtgctacatgcttttaatcccagaagttgaggggtagggggcaggggcaggtgggcaggtggatctttgagtttgaggccagcttggtctacagagagttctaagacagccaagactacacagaaagacagcttgtctcaaaaaaaaaaaatccagattgaaaaagtgattcaaataagaaaaagtccctcaaagatgtagtcgcctcttgggttttagttaattccagatgtcaagttaacacccaaggtagccaccacacctggtttcattcttcagctgacatttgtcacacctctctcccttatacctggctgcttggcacagaaagctatctgctgagtagctggcaactggttggagctagcccagctgttttggacaccttagaattgttttgagagcattcacaggaaggactccaatgagaacagcgccaaagatgaaacttctgttttggaaggctttgctccagttgtggctatttcagataatgtacgccaggcagaagccagccagagaatagaaaccttagtaagctttaagcaatactgtagcttttctcaatccagagcagagggaaggaatttaggtaactcagtaagaaggcagcaattggtgcaatgagaccggtgagcacacttatgtccctgtgtgaggcctctgattggtggaactgaaagctagttgtgctatggttggtataaatgcttcatttgcaaatcacaaccctcttatacatacaatcaggtggtnnnnnnnnnnnnnnnnnnnnnnnnnnnnnnnnnnnnnnnnnnnnnnnnnnnnnnnnnnnnnnnnnnnnnnnnnnnnnnnnnnnnnnnnnnnnnnnnnnnnnnnnnnnnnnnnnnnnnnnnnnnnnnnnnnnnnnnnnnnnnnnnnnnnnnnnnnnnnnnnnnnnnnnnnnnnnnnnnnnnnnnnnnnnnnnnnnnnnnnnnnnnnnnnnnnnnnnnnnnnnnnnnnnnnnnnnnnnnnnnnnnnnactttcttgtgttgctccctggtgttagtggccttaatagaagacttcttctgaatggtcttttcttacctttttgatgaggtctttttgtgggcagagcaggttgagctggtaacattgtcttaattagattactactgctgagataaagactatggggggaagaaagggttcatttcattgtatactcccaggtaacagtgtatcatcaggaactcaaagcagaaactgaagcagaagtcatggaggattgtagctttcctactttgcttctcatggctagcccagcttgctttcttatataacaacctgccttgggtgacacactgactccctggcctgagctgaacccaaccaaatctgtcatcagccaagaaaaagatcttcgcacttgcctgtaggcaatctgttgtagcattttctcagttgaagttcctcttcccaaataactctagcttgtgtcaagatgacatgaaagcaacccagacagctatggagtgaagacagtggtaatggtgatgtggccgtagggaggaggtactaaagagtcccagagagcagcaggcagaaatgacaaagtagaaggaaacatggagaaggagaaaactgagttgctaagatgaggggctgggagccctggtcactggaaaagagttctaggcaagccttaatgattgaggctcctcacatcaaagacttaagaaccctagcatgctttctgggggctgctgggggctgctgctgttgcaaaccaagggtttctttagatgctaaatacaacagcctttgacaatcaaaactcagagcattaagctttcaacctcagcctcatacttctagagccataagacataagtctttagctctcagagcttggaagtgcatgtctctttgacattcagtgacctgggattaccaaccctggaaatgctattccttgcctttgcctgagcagaggcaagctccgaccactttacagataacagaacaacatggaaactatttaactttattaaatggaaataagcaaattcgatgagcatatatgagactatcccaattttgcagaacttcttccccctacgtatgtaccattccagtttttcaattttcttatctataaacaaaaatacctaactaatataccatagatgtattaaagtacatagtgaataataatatatgagcacatacatctattaaagtgccattgaactctaaataactaatagtgttcaccccaacaattccttctatttctgatgctccttccttccgtgccctggaaaccactcacctgctttccgccactacagatgaatgtatcttttgtaagttctatgtaaacagagtcatacagagcatattcttttgtgtgacttctgcagcaatcgttattagatccatgttcttgtaccactagttgatttcttgtttgctcttgaccgtattccgcagacaggtctccctcacaatgagtgcagccattcacctgtttggattatttctagcttacagcgtttaaaaacaaagctgctgtgagcatccatgtacaagacattgtataaaatatgcatttgttttctcttcagggaacactgagcacagagaatagatctaatggtctattgtgtttaattaaaaatacttttttagacttacttattttgctttatttgtatgaacatgttggctacttgtatgtacagaccccatgtacacacctgtggatcttctgaagctggggttacagatggtttgagctactatatgaatgctagaaattgaaccccaatcttctgcaagagcaacaagtgctgttaaccactggtccatctcactagccgtaaacattttgctttaaataaaactattatatcgtttttcaaaatttttatatcatttacattggtaccaggagagcataaaattctagttcttctgaaagaatttttaccagtatttactattttgaagtgttgacagcaaaaaacctttttagtcaatcatataggcaaaaaaagaaaaaagaaaaaaaaaaagaaaaagaaaagaagccactgtttaccagttaattattcccttgagagacaatagtattaaattgtcatatttgtagattgccaaagttggtccccttagacacacagggcttttgtcttttctttttaaatttatttatttgttgactgtgtatgcctgagtgcatgtgtgtgtgtgtgtgtacctgtgtgtaagtgtgtgtgtgaagttgtcaaaggtcaacttggcagacgttggttctctcctttcactatgtgggttcaggggactgaattctggctgtcaggcttggcgtcagtctcaccagcactcttgccagttaaacaataaatagttttcctttcgttttcattacccacataagtcataaatggaagtccaagaaaacacagaaatctccacatccagaaagctgaaagtacttcttcgcctctggctcttatttgagacaaggccttatgggactgtccagactggcctggaccttctggtctgaagcaatccttctctcagcttccccagtgccaggcactggaatgtgtgcctcctctcagtttccccacggtgacttatttcttactggttttaaagttggttttataagtgaccagaatagactctatctttaatgaacttaaattaagtgttattttctgtgacatagtaaatcagaaacaaaacaaaacaaaacagccatataatgttctattttcttaaagcatttcctagtacagttcaacacagtgtttagtataatttaatattaacatttcaggtctttaatgtattaaatgagtttttctttttaattagatgaagtatcttaactcacacctttatacataaaaattattcttatatttcagttacaaaaagggatagcaaaataacataaatgattatgattcttaaacattactggatcaaaatactatatgctgggtagacactgtaggattgggtctctgtttattatctcattaatgtccgtggagactattttatttttttctagtttagacacagcctccacactagagattgttaaaggtttttaaaaatatgttcaagaaatccagaagttatgttgttctccttggggaagccaaggccaaagccacttcaactgcaagcatggccatttctccatgtcctgatgccccatgccctcttcctacccttcctcactcgagctgcttgcggtggtgtctccctgtgctcacagcctgcctctgtcctggcttttggccaggggtttaacttctctactgggtccaccgctgatgtaatatacattctgagtaaaactatggcagcctttgtcttccgagccgataagcagaaaccccaagggaatgcatctcaaggtttatctcctcatccagaaaaaataatttattcggggattcacttcacttggtcacttagtttaccaatggccctgttctaagaaagtactactaagagaatggacaggaaacccagctaagccattgtccttccccaaaacccatggacagaacaaagaaaattacctaaatttttcaagggtacccaattaagttctccatccaaagctctaaaaggagaaacctgctagaagcaaggtcagaaatcctctcagttgcctttaggacaggagggtctttttacacacggaatcctgaaactgcctttgtatttctgggctgagattataaactaagggttgagttctgccagttaatgctcttaattgtcctggctttagttttcaagaatgcaaacttcaggtcctaagtccttttctgagtgggatattgtcagcaattgaataaatgaaggcggtcccaggctgaacgaccagatacaccaaactcaagagcacaccctagatagtagggcaccaagggtccagcccaggctgtttgaaatatcacgggactttataagaacatgaaactgaaaatgggaaagtccctttgtaacctagttcagcatcaacagctaggagactggtgacgacctccggatctgagtccggattggctgtgagttcaggaactatataagagcgcgcgccctggctggctctcatttcagtggctgctactcggcgcttcagtcgcggtcgcttcagtcgtcagcatggctcgctcggtgaccctggtctttctggtgcttgtctcactgaccggcctgtatgctatccagagtgagtgcctctttcccctctcttggcattaaatttttagttctccttagttctccttcccgacgggattggccagggctgcgtctctcgggaaaggagtgggcgtcccgctgcttacagctttgaggctacagggtggatgcgcctgtttgcgagtgtgctgacggtcagcgctgaagatggggaaggcttctctttttctcctctgctggcgggagcccctagactccctgagcgcaaaaggagggtggggctgcctggaaagtgcagggtggagggctatgggcacgcggaagctgagccccgaccacgggaagtcagaccgccgctgcgcagcttcatttgcactcgcagagaggctcgatccaaccgaagtcgagagaaaatgggcttgggtcccagactctgcgatgtttccaaagctttctgatcattaactttgtatctagtaataaccttaaaggtcgccgggcagtggtggctcacgcctttcatgccagcacttgggaggcagaggtaggcggatttctgaattcgaggccagcctggtctacagagtgagttccaggacagccagggttacacaaagaaaccctgtctcgaaaaaataaataaaggtctctgggtatgaggcttattgcaatgctgaggaccttgtgagcttcttaagtttgaaagtacgtctacaatgtaaatgttatggttccccgtgtattaagacagggaactagaggaggcatcgagatttaaagtaacttattcacacgatagactaatggcagtcggagctggaattgaggccgatcaatgcccaggcctttggactgtaaccgccatttgtttctagaagtgtctaggccttcctgggtcatggtctgtgaagcagtctgagatgccttggacccttggtacctcacacagcgcttcctttttggcacactgcctggttctttccgcgatagagcctctgctttcagttttgagacaactaagactttgccttaagtcaaggtggttatgaactctggagtgaggattatttcagtgtggtgaccaagactcgtgaggataactagtaactaccaaagtcgtggaggtagaaatatggcagagaccagatttaaacctgacccaacactggacttaattgtggaagggatggttcttgtccagagaattccaggcatgatgaacctgtggcatttagcatgttcttgtttccaaaacctcaaatgcaaggaaaaatgtggtttatgctaatttaaatttatggggacaaaaagaattcaaagctttattgagaccttcattctagctggccacagttttcaggttttcctctccctactgccttccatgggtgaataagaggctgctcttcagagaccgtgcacactgaatagatgtgtatctgggagtatattatggctgggcatagttgtgcacatctttaatctcagtatttaggagactgaggcaggtggatctctgaatttgagaccaacctgatctacaaagtgcatccaggacagaaaaacgctgtcttgaaaaaccaaagaaagaaagaaagaaagaaaagaaagtgttttataagccaagtgtgttgagtcatgctgtgacctcagagctggggaggctgagacaggcgttcaaggccagcctggaagacagtcagactgtatctcaaattaaataataagcatataagtaaatgaaggggaaaacacaaaaagagccagtgaaatggctcagcaggtacaggcgcttaccactaagcctgagtgtatctcagatcccacttggtggacggagagaactgacttttaaatccacacatgagctacgtttcgtgcatgtgcacacacacacacacacacacacacacacacatatatatactctctcagtaaaacaataatttttttaagaaagtagatatatacattagtgataccttggtatcagatctgcatattctacacagtagtactccttgtcatgttggttgagaagcagaaacagagttcaaagatggcagtggtatggctcagcagctaaaagtacctgccatgcaacctgaccacctgagttcatagaacccacgacagaaggaggagaaaactgtctcctgaaagccatccaatgtcttcacaagtacacctttgggaacttgactgtgtgtatgtgtgtgtgcacatacaaataacaatggaaagagtttacattattttctttccgtgtccctatagcgtgcagtagctattcccaacatgttgagcgacttcagctatctgaaagccccatatccccttgcacacactgcttacttccagcagagtgcattctcaattgtcatggtcctcacatctccctctggtcctttacccatcccaactcagttgcttaaagctttcctagcttctgtggtattttaaattttgtttgttttctagttcatgaaaccagaggtttggtttcagaatgcaaaccctgggctggaacagagaaaccctgggttgactcgcataggaacctcattagggaggagccaatgctaacacctgccacctgaagggtaattgctcagctctcagcactggatcagacatatgtgttgggaagtctagggaggagcaataagcaaaaacgaaaggggatgaaaataagaaagaaaagtgagaggggctgacacagcgcacaagcactgcgggctttgatgtggatactgtgaagggtgtgcagaatgggatgtgacgtttggaaagttggtgggatttattaagggaagggaggggcacagttcttgagagcttccaataataaaagctccttaaaaatccactgacagaagacactgctaaaagccaggtagggaaaacagaaggtactcgtaggattttgaggaaaagatactacgttttcaaaatgtgggtagactttgggggaagcagatcacttatccagagtagaaatggaacagggagaaatagaggaacaaatgtaagatggtgcacggtgcagactgagctctgttttcatctgtcttcccctgtggccctcagaaacccctcaaattcaagtatactcacgccacccaccggagaatgggaagccgaacatactgaactgctacgtaacacagttccacccgcctcacattgaaatccaaatgctgaagaacgggaaaaaaattcctaaagtagagatgtcagatatgtccttcagcaaggactggtctttctatatcctggctcacactgaattcacccccactgagactgatacatacgcctgcagagttaagcatgccagtatggccgagcccaagaccgtctactggggtaagcctcaagttcttccttactttctggacgctccatctgtgtggacttaaaactgctttgctattttaaaaacctgcatactgagattgttagagaatacccccaaaagactgatctgtggtgccagcagagacttacacagcaggccaggaaccagcagttccctacccactgtcccagactgcttccctctttcctgagcttcctccagctttcctggcagcctggtgcatactaagtgtcaaagggcatgccaggtaggacaggccttggtctgtaacccctgccttcaggtacctacaattctggactgttccagggccttggcaagaagctagtagacaggagtggatctctggaaagttctcaacaagtactcaaggctagcaacagcaacctagtctatctgccttactgcttacaacccctggatgtctgttaatatgtcgtagtataaaagtaaagttttgtctccattttcttttttcatagatcgagacatgtgatcaagcatcatgatggtaggtttcttgactttaaataatgggcctttgggggtggggtggagctggcggtagagcacatgcctagcgtgcataaggccttgagtcctggtcccagcactgcaggaagagaattgtttgattcactatcctaggagctgtttatagacagctcaaacatgataagcatcactgtatgaaagacattaattagggtggcttgatcagctacagaaggatcctttggggtcacattcttttatcctgtggactggcaggaaggaggaacgtagccatgtcactggccctctaaagggagaacagcacctttgtgcatgcagcaaggcaggtaggcaggtaggcaggtaggcaggcgggtggtcagttacacagcctgcatgggtttgccgaccttctgttttaaccctgccagttctgctgagaaggcctgggacgatgagcttgctgtctttgtacagcagtggccttgctcctcacccagaggagccgagtgacagagctctgcgggtacatcttagccctttcagtctctagttggtaggcactagatttaccttctggaggcttccggacactcagggaaagaaatggacagggttgtaacttcatgtaaggcaccgtcactgatgtgtcagaaggaagttgaggagcgtgagagggaacgtgggtgtctctgtcaggtggagtctagtggtagaaaatccagcttttcggtgaaatccagggcccttgaggccaaaagctcactcaaatcttgtattatatttatttctaggaaaggggaattgatgaagggggtggggatgggtgatctgcccagacaagcagttaccaaatggtggagccagaactcacctcctttaagaaggtgattgtcctacaaactcatttgatggtgaggtctggaatgtaaataatgtaatgttcggctaaccttctccttctctccctcccttccccttttcttttcagctctgaagattcatttgaacctgcttaattacaaatccagtttctaatatgctatacaatttatgcacgcagaaagaaatagcaatgtacacatcaccttctttatatcttactttaaatgttttatgcatgttttcaaaaattggaaatatcctagatagctgagcaataaatcttcaataagtattttgatcagaataataaatataattttaagaacaatagttgatcatatgccaaaccctctgtacttctcattacttggatgcagttactcatctttggtctatcacaacataagtgacatactttccttttggtaaagcaaagaggcctaattgaagtctgtcactgtgcccaatgcttagcaattctcacccccaaccctgtggctacttctgcttttgttacttttactaaaaataaaaaactaaaaaaaaaaaaaaaaaaaattgctgccagacattgccagtgttacatgaagtggtttctaggtagcctaaatgcctgcaagcacgtgcgtatttttcatcatctaaagaggcagtgggtatcttagaaggttcttgcagaagcaggctcctcaactaagggtcgagaggaaagtgactaggaaaggcctccaaagcagagcagtaggaggtggtgatgaaggtcagggaataataggaagaaactgagaggggagtgaggatctcagacgtgctggtcccacagggagctctagagcagagatcacatcttacagtttgtcttggtgatgtgcacagcttgttgctggctccacaggactgtatgctaggatgaaagcccagatactttggggtgcaggttatggttatggggtgcaagttatggttattggtggcaaattatgcaaaagctagggactggttcttattgctggatgtaggtagagcatgggtgactactgtgtttcctgttaaattctgctgggtctacagcacacagtctgaaacccccactctgagttcagagttttggctaatgttaaagagggaatgctaatcaatttggaactaagtttgaatcctaatcttacaaaagttactataacatccatgacttgagctcttaattttgagagtttaattgtgtccccaaagctccttttgtggctggagatctagtccctgggggtggtgataatgagaagtggtgagggctctaagaaggagtgtggtgggaggtcctgtcaagggacaaggagccttctgagttctgagagggctgttagaaaggcagcaagcaaccgggcggtggtggcacacgcctttaatcccagcacttgggaggcagaggcaggtggatttctgagttcgaggccagcctggtctacaaagtgagttccaggacagccagggctatacaaagaaaccctgtctcaaaaaaaccaaaaaaaaaaaaaaggaaggcagcaagcctggcctcgcctcttctgcccttcctgaggcacgtcttctgttgctgtcggtgggaaagaggaacctttggttatcattaacattttgaaatttccaaactcttaagtaaatctcttcttactaagtagcttgtatcaggtattttgttataacaattactgattaatagtaaccataagccagaagtgggacaatcaatcttgcatcacaaagctttatttatttatttatatttcacacaactgttattattgtaaatttagattcatttaattttgtgtatgatacatgtacatatgtacactacatgcatgcttactgcctatgaagttcagaagaggtcatctggaggaagtcacatcccctggaactagagagttatggatgactgtgagccaccatgtgggtgctgggaactcaaccggggtcctctggaagagcagccactacttttaactgctaagccttccagttatttttttgtgtgtatacatttgtgtgtgaggagggagcatgcatgtatatatgcttgtgtaagggtatgcatgcagggggtgcatgtatgttcatgtgtgtgtgcatgtgtatgtgggttgtgcatgtgttgtatggggggatatgtgtgtgtgtgtgtgtgtgtgtgagagagagagagtgcatgaatgtatgtatggatcagaggatgggttgctgctggatatcttctccagttgctatcactctctaccttatattttgaggcagagttacagtgaatggcaagcttggagatttagccggccatccagccccagggatcttctagttaccacctttccagtgctagggtgagaggcacatagcaccatactcaacttttctgggagtgatgagggctgaacccaggtccttcagctccaagactgaggcacctcctaggcccccagtacatgatatttatggaatgtagatgatttatcccagcaacctcctgggataaagttccttagggtcctaggtgtattgtttgatcttcagtctcttcttctgtgaaggtttcatcctgtttggctagtgaagtttcagtaggactgaaagtggctgtgttactactgggcttaaggtgcatagggaaacttcatgggaagttcctccataacctggagaaaaggcagagacgttcatcgcacagagacatcacaagaacaagactgcactggaagcctgggaactcagtagaaggaaagaagactagaattgcacctccaaagactgcttcctgcagcagccaagagctcaagatgaacctgggtgagggacctgggagaatgaaccccaccctccaccttggaaaggacctcagggtagcttgcagagtgacagatgtggggaagtggatcctttccacctgtcccagtggacctcagggtaggctgcagagtgacagatgtggagaagtggacctcagggtaggctgcagagttacagatgtggagaagtggacctcagggtaggctgcagagtgacagatgtggagaagtggacctcagggtaggctgcagagttacagatgtggggaagtagacccttcccacccgtcctagtggaactttgttaggacccatggtggcaagaaggatcatatttccaatttcctgtccccaagtcctgtgtctactggtgaaaccttgagcaggaaacttgggttgtgtgtgtgtcttctttagcaccacactgccagactgctttgagccctaacaatggctctgactctattgtagtattgttggctcggtgatgcttttcccaactacaccctttgtgttgctctgcacttattcagctctattagcctagcctagcaagtggccaaccaactttcaagaaataaatcaacaggattataaatcctgattcgtgtgtatctgtaaggattgcaacctctgaccttcagtttctggacactacaagtaatgtcaccatcagagcaaccagaaagtatcctattaattttaactttcaaagcctcactaggagactgactagacagtaggattgctgatctaatttctgtgggaaggcagatgtagagaaccaccacccttcctctttgttgtaaggggctttgggtaaagaggaaactgagagggggtggggaagtcccttttgcccacagcctggggatgtggcaaccttcctgagtgggcagatcatatacaggaaaacctgtttgggaggtagtggcaacaggaatggggccaaacaacaggagtggaattccaggtggaatttgtaccttatcgaccactctgtaacctggggtgtccctgtgacagctttcttcatgtttctcaacatctatgcagccttgcaaggccctcctgccccaccagtgtagccagctcagcacatgctcaagtgcatgcttctagttctacccactagatagaccctggcagagaaggacacaatacctaggcctcacatgggctgctggagcctgggcggagaccagatgatggtgggctctactttttgggaccgttgagcatcactggtgggcctctctttgcctggctggagtaggaaattgtgcagtagccatggcctgtgatcgtgagatgcagagtggagtggagagagcctgccagtattgcctggaccaatgagctgagccgatgcttgtgatggagtgctaggtagagcatccatacctgggcttcactaatttccttcttaggcctccaactgtctatcagattccatggtttaatcccagactccgattgtaacactgtattgtgcagtacacctgccactgtgtttgagatataatctacaaccacagttagtacatttaaacgtcctccccactaaaatcctgttccaatcagcaggctttccacattcctcctaaatcctctagtcctagaaaaccattatatttcagtcttttgaatttttctagtcttgatattctctttattttactaagctgtgtttatttacttgtgtggggcacaggtgcatgggcagtaacaggacatcttgctgcagccaacgctcttctgccatcatgcagcatctggggatggaacccagatggtcaaacttcatctcactctctagaacaaaattttagataaaaattcttcaaaacccctggtagagaactctgggttcatgaaacagcaaatacactacatagtttttcttagaaaactcagggggctggagggatggctcagctgtcaagagcacagactgcttttctgaaagtcctgagttcaaattccaacaaccacatggtggctcacaaccatctgtaatgagatctgacaccctcttctggtgtgtctaaaggcagctacagtgtacttacatataataataaataaatctttaaaaaaaaaagaaactcagacacatagagagctttctaacaattttatgttctgtatacaagtgtttgcctgcatgtgcttatgtgtaccacatgcgtgcggtgccctcagaggccaaagaaggcataggatcccctggacctagagttagagcaggttgtgagctgccatgtgagaacccaggttctcagaaagagcaaccagtaaatccccttagctgccaaactatctttccaggccctaaagattgtttttaaagacagggttttgtgtagcccagactggctttgcactctttcttcttccacctctgcctcctgagttgtaggactacaggtatgcatgtcagtcccttctccttccactgtgtgggacccagggatccaacccaggtcatgaggcttaatagcaatgctttacccactaagccatcctgcctgttttatgttggtaatacaaataaacaaaaggctatctgactgttttgctagggtttaaacaagctgtagtcctcttcatgtaagtgtttttgggttcacggtcttcccactgccaccaggacatgaaatagaggagaggcacagtttaaaatccgtaactaaaatttttgaatatgtgttttccaaaccccccaaatacacctaatactattatcaatcttaaatctttagcttcacattacatttatttttctagtgtctgtgtgaacgtgaacacgcacttggaggccagaggatgatataggatattgttcctcaccattcctcaccatttttgctattattttcacattatttatttatttgcttttttttttttcgtggatgcacatgccacagcatgtatgtgtaggacagaggacagcttgagagagtcaattctctccttccaccatgtgggtgggtcctgggaatcaaactcaccttgtcttgatgttccaacacttgggagacagagagaggaaagaaggtgagccgagcccaactgggttacataaatgagactatctccgaaaacaaagccaaggaatctcactgagcagtgctggccttgctggagtgcagtgagtgtggaggtggagagcaaactgaaaccagaatcagagttcaaatattgcataaagcctgagctctaaattcttatgtaaatcagctggggactgaccaacagctgtgagatgcagggggctttacactggctttaaactttggtgcaaatctcttactgaagccaaaaccatagtaaatacaagaacgcatttatattctggcagtcccagggatgaattccagacaagcctgagagttcctgcgtctaaagaaaaatgctaactcttggcacggcctgggatgtgtaacagagagctctgggagagtcacgtgtctggctttacctgtgagcatcttcagcttggaggagttgacttaactcacaagagtccagtaagtcacacattacctggttatcctgagggtccagtttgcatgggaaggcacttgagagtcacatggatgataaccctcaaactacagaagacattcctcgggaatgcactggagagcgacagccttcctcccctcctagttttcagtagatgaacagttcttgtggcttacatccctttcttttgcggcatgtaaaagccatgatccccagatctggctccacctgtctcaacgaccctgcccagggaagacagagaggctgaggctggcagtgcggtgttaccacgctcctgcctttcctgccaggagactgctttttgtgaatgaaccactctcttctctctctctctctctctttgccctaacaagccagaatagcagctgttgttcagtggtccactggagagaagctggggcaggccggtgattagggagcttgtctacaaggcactccgctcaacctcttagcaccaaacacagaaacaaaacatgcatgcagggcatttattcccagcacttgggaggcagaggtaggtgaaatctctgtgagtttgaagccagcttagtctacatagtgagttctaggacagccagaatgtaggctatgtagagaaactctgtcttgaaaaccaaaatccaaaacaaatacaaaataacaacaaaacccacccaaaccaatcaaccaaacaacaaacacaaacaacgacaacaaccctgaaatctaagaaaacaagcagacagaaggagggtgtgcagatcattcacagggcccctcgaactctctcactaagccagcgtttactacagagtgatagcatggaaggcctgggggctaagaagacagttctttctcacaagaagcttgcggtttcttgggaaagagatctgaagacaaatcggtttaatgaaaggaagaatgtagtatacccagagcagtgatagaaacatctgccaggtgctgctgctgcacacagcctgctctgacttctcagcaactctcttggcaggaggggcagcctgtgcaaagccagagaagcaaggcatttgtgggcagtctctaactctggcatgctgttgtccatgctaaggctggatagcaggcagacattaaccactcaaggcaatatactgagttagaattactgtaagcaaaacatcaaacccgcgggctcccagacttgagcatggtctagggacgagcgtctaagctaaaagtgcttacttagacttttagagaaagctgtgtgaacagcatctttccctgctgccttagggtccagctccagaccctgctacttgatcaggtctgcttcaggagatgccaagaagacagggagagccaaacggctacccctgaaaggctcggtgtctggaggtgacgggtccagctaggataaagagaagccgctccagtcaggggtacagctgatgctgctgtttgttctctcttccctcgagcagcctcattcccaagtgagatctgaaaaccttaaaattacattaccagggctggagagatggctcagccattaagagtatttacggtgcttacagaggaccagagtttggctcccagtactcacatcaggtagttcacaactacttgtaactccagctccagggaatttgatccacctctctggcctctgtgggcacctccatacatgacacacactcgagcacaaacatactcacacataacacaagattaaacatttaaaaattagattaccaactgaagtttaaaagaatcccatcccaaataaaataataaaaggggttggcaggtcattccaatccaatcagagtttgtctatctcagacgcgaatatcatcaaagcaactgacaaactgtcacggaacctgctggatctctagctttggccttgtctgtcttcttcagctcctgaactctcttctccctcctcctctcatgggctctgagtccattcctagcatactaacaggcccagaactcttggtcttcagccatcctgggctcactgagcaaagccaagttgcctgactctgccccctggtggcctgatgaccaagtttcatggaggtaagttattctctaaccactcagcgggttttctacacacagggtaggaaacagggtattgattgtggatcaagaagggaaatcaaagaaatatttaacatgtagcctttaccttctaaactctaggcctttggataaacagaaattagagatgtgggtaagaaagtaaggaggtccaccataactttttgataattaagacaaacattatacaaaagttaacctctttatcaatataactactatctttagatgaagaattattagttataacattttttcatactataggtcttggtatgttatatttacaacagaggtgcagttaaacatttttagaaatcacatttgtgtattttgtgtagatgtgtgggcgtgcataccagagcacatgtgtggaagtcagaggaaaatctgcaggattaggttcactctttccaccatgtggatctcagggactgagtttgggtcgtcgggcttgggagcaagcatcttttcctgctgagccatctcaccagcccagttaaacgtcttaaattaacaccttaaaactaaagtaaaggaagttagtattctaaactttagtgttgacagacaaaagaaaatatcgatttactttaaggaagccgggtttccacggaaacccatcaaggaatctcagtacatggatccggatgccgagtgggtcagaacccagaggtacagatttaggatttacttctgtgaggctgaacacgaagtcaggaaattactcacttgttaaaagagagcagagctagaagaaagccagagaagatactaagaatagaaagggggatggaaattactcatggggaaagaaccagggtagtagtgcactcggggccaaaggagagggtttcaggtttcaggagggtggagaccacgagtattcttaaagagcagagattcagacaagctacttccaacacattccttaagcccctaccacagccaagtaatgtgctggccataagagctcaggaagagacagaggacagtggcatagttaatgtaatgcaacagctttcctcgttggttttttctgtaattgtttgttttgttttaagtcagggttttgctgtgtagccctggctgtcccggaattccatctgtagaccaggctggccttgaactcacagagatctgcctgcctctgcctcctgagtgcttggattaaaggtgtgcgccaccaccactaggctataaatgttttttagagtgtgggtgtgtgtgagagtgtccaaggaggtcagaagactttgatccattggagctggaattacagagatttatgagttctgggatccgaattctagtcctctaaggacttaaatgctcttaacaatggagcagtctttctagccctttcctttgtaattcttatctctattaatgaactgattctacctgccacctctccatttcttttgctttttgtttaaaatgtatatgccagatcctgcctttgtctgtccttccttcttccttttcttcctttcctttccttccttccttccttccttccttccttccttccttccttccttccaacagggtctctctcagctcttgctgtcttggaattcgatatgtagactcagactggcctcaaattcaccatgtttctttaattacttctgggccatgttttttgtattctacaatgtatctcacggtgtttttcagcagttctttctattctttgttttcagattcatgagagagtctggtttgcatagtcatcttttgcattaggcgacagttggggttgctggacagcctatgaaatggtttaaattaatttaaaaagtcaagtatgcaaagaataacatatagaattgtttataactattctgtatat

SEQ ID NO: 869 - DNA, 647 bp, Mus musculus
atttcagtggctgctactcggcgcttcagtcgcggtcgcttcagtcgtcagcatggctcgctcggtgaccctggtctttctggtgcttgtctcactgaccggcctgtatgctatccagaaaacccctcaaattcaagtatactcacgccacccaccggagaatgggaagccgaacatactgaactgctacgtaacacagttccacccgcctcacattgaaatccaaatgctgaagaacgggaaaaaaattcctaaagtagagatgtcagatatgtccttcagcaaggactggtctttctatatcctggctcacactgaattcacccccactgagactgatacatacgcctgcagagttaagcatgccagtatggccgagcccaagaccgtctactgggatcgagacatgtgatcaagcatcatgatgctctgaagattcatttgaacctgcttaattacaaatccagtttctaatatgctatacaatttatgcacgcagaaagaaatagcaatgtacacatcaccttctttatatcttactttaaatgttttatgcatgttttcaaaaattggaaatatcctagatagctgagcaataaatcttcaataagtattttgatcagaataataaatataattttaagaac

SEQ ID NO: 870 - protein, 134 aa, Mus musculus
FQWLLLGASVAVASVVSMARSVTLVFLVLVSLTGAIQKTPQIQVYSRHPPENGKPNILNCYVTQFHPPHIEIQMLKNGKKIPKVEMSDMSFSKDWSFYILAHTEFTPTETDTYACRVKHASMAEPKTVYWDRDM

SEQ ID NO: 871 - DNA, 27120 bp, Homo sapiens
acatggtgaaaccctatctctactaaaaatatgaaaattagctgggtgtggtggtacatgcctgttctttcagctactcaggaagctgaggcatgagaattgcttgaacccagggggtggaggttgcagtgagctgagattattgcaccactgccctccagcctgggtgacagagtgagaccctgtctcaaaaaaaaaaaaaaaaaaaaaagagaaatacctgagtctgggaaatttacaaagaaaagagttttaattggcttatggttctgtaggctgtacaaacatagtgctggcatctgctcagctactggggagacctcagggagcttttactcatcgcagaagggtgccaggcacttcacatggtaagatttggagcaagaggtggtggggggaggtgtcacattttaccaacaaccagatctctcaagaatgcactcactattgtgaggacagcaccaagccatgagggatctgcccccatgatccaaacacctatcaccaggccccacctccaatactagggattacaattcaacatgagatttgggtagggacaaatattgaaactatatcagttggtattagttcttcttcatatgtttagtaacatttagcagtgaagacatagagtcctgggctttcatttgttacttgttattggtctgttctggttttggatttcttcaaggttcgatcttggcaggttgtatgtgtctaggaatgtatccatttcttctaggttttccaatttattggcatgtagttgctcatagtagcctctaatgatcgtttgaatttctttgatattggttgtaatgtttcctttttcatctctgattttatttatatgagtcttctctcctttttttcttagcgagtctggctaaggaattgttgatttttgtctttaaaaaaacaacttttctttttgttgatcttttctattgtttccttcatttcaatttcatttatttttgctctcatctttattatttctttccttctaataattttgggtttggcttgctcttgcttttctagttctttgaaatgcatcattatgttgtttatttgaagtttttctgtttttcttttttaatgtaggtgcttatggctataaactttcttcttattactgccttctctgtatcccataggttttggtatattgtgtttccattatcatttgtttccagaatttaaaaaatttccttcttaatttctttgttgacccacagtcacttaggagcatattttaatttccatatatttgtatggtttcaaacattcctcttgttattgatttctagtttttttccattgtggtcagagaagatatttgatataattccaattttttaagacttattttgtggtctaacatatggtctatccttgagaatgatccatgtgctgaggagaagaatgggtattctgtagccattggataaaatgttctgtaaatatctattagatctggccaggcacggtggctcacgcctgtaactccagcactttgggaggccaaggcaggtggatcacaaggtcaggagatcaagaccatcctgactaacgtggagaaaccccatctgtactaaaaatacaaaaaaattagctgggcatggtggtgagcacccgtagtcccagctactcaggaggctgaggcaggagaatggtgtgaacctgggaggtggagcttgcagtaagctgagatcacaccactgcactccagcctgggcaacagagcaagactgcatctcaaaaaagaaaaaatctattagagccatttgatctatagtgcagattaagtctgatgtttctttgttgattttcagtctggatgatctgtccaatgctgaaagtggggtgttgaagtctccagctattattgtattggggtctatctctctctttagctctaataatatttactttatatagctgggtgctccagttggaatgcatatatttttacaattgttatatactctggccgaattaacctcttttcattatataatgaccttctttgtctctttttatagtttttgtcttgaaatctattttgtctgatgtaagcatagctattcatgatcctttttggtttccattggaatggaatatatttttctatccctttgttttagtctatgtgtgtctttatgggtgaagtgtgctccttgtaggcaacaaatcaccgggtcttgctttttttttttttttttttttttttttttaaatccattcagccactctatgtcttttgaatggagagtttagtccatttagattcaatgttattattgataagtaaggacttactcttgccattttgttatttgttttctagttgttttgtggtcctctgttccttccttcttttgttcctgtcttcctttctgtgaaggtgattttctctggtagtatttaaaaatttcttgctttttattttttgtgtatctgttgtatgttgttttggggactttttttgagatggggatctcgctttgtcacccaggctggagtgcagtggtgcgatcttggctcactgcaacctctgcctttcaggctcaagtgatctgcccatctcagcctcccaagtagttgggaccacaggtgagtgccactatgtctggctaattttttttttttttttttggtagagacaagcacttttgtagagacagcactttcaccaccgtgttttccaggctggtttcaaactcctgagctcaagccaaaggcctgctttggcctcccaaagtgctaggattacaagtgggagccaccactcctggcccctgttgtatgcttttttatttcaggttaccataaggcttgtatttaatattttataacccattatttattttattatttttggcatattcacaacataacccattattttaaaccaatgaaaacttaccactgattacataaataaagaagcaaagaaaaaattaataaaaactctacattttaactttgtcctcctgctttttaattctttgttgtttgtgtttgtgtcatattgtactgtctatgtcttgaaaagttgttatagttattagttttgactggttcagcttttggtctttccactcaagatatgagtagtttacataccatgattacagtgttacaatattctgttttttttctgtgtacttccaattaccagtgagttttacaccttcaaattatttttcattgctcattaatgtccttttctttctgattaaagaactcccttcagcatttcttgtaggacaggtctggtgttgatgaaatccctcaacttttgtttgtctaggaaagtctttatttctccttcatattttcaaggatatttatttctccttcatatttcaaggatatttccactggaaagtctgctgccagacatatcagagctccatggtatgttatttgtttattttctgttgctgcttttaggatcctttctgtattcttgaccttgggagtttgtttattaaatgttttgaggtcatcttctttgggttgaatttgtttggtgttctataaccttcatatacttgaatattgatatctttccctaggtttgggaaggtctttgttactatcactttgaataaactttctaccccatctctctctctacctcctctttaaggccaataactcttttttttttctttttgagacagagtctcactttgttgtccaggctggagtgcagtgctgtgatcttggttcactacagcctccacttcccaggttcaagcaattctcctgcctcagcctccagagtagccgggattaaaggcgcctgctgccacgtccagctaatttttgtattttagttgagacggggtttcacgatgttggcgaggctgctctcgaactcctgacctcatgatctgcccaccttggcctcccaaagtgctgggattacaggagtgagccactgcacctggctgcagccagtaactcttaaatttgccgttttgaggctattttctagatcttgtaggcatgcttcattcttttttattcttttttcttttgtctcttctgattatattttcaaattgcctgtcttcaagctcactaattctttcttccacttgatcagttctactgataagagagtctgatgcacccttatgtatgtcagtatcatttttcaactccataatttttgcttgattctttttagttattttaatctctttgttaaagttatatgataggattctgaattccttctctgtgttagctttaatttctttgagtttcctcaaaacattgtttttttttagacagagtcttgctcagttgcccaggctggagtacagtggtatgatcttggctcactgaatctccgcctcccaagtttaagcaattctcctgcctcagcctcctgagtagctgggattacaagcatatgccaccacgcccagctatttttgtatttttagtagagatagggtttcaccatgttggccaagctggtcttgaactcctgagctcaagtgatctacccaccttggcctcccagaatgttgggattacaggtgtgagccaccgtgcctgaccaaaacagctattttgaattctgtttcaaaggtcacatatctctgtttctctgggattggcctctggtgccttattcatttgatgaggtcatgttttcctggctggtcctgatgcttgtggatgttcatcagtgtctgagttaaatatttattatagtctttgcagtctgggctgtttgtatctgtccttcttgggaaggctttccaggaattcaaaggaacttgggtgttgtgatctaagtttttggtcactgcagctgtatctgcattagagggcacaccaagcacagaaatgctgtggctctttcacagtctgttgtatcttttttgatttgaggttaccatgaggtttgcagataatattttatcactcattattttaaactgctgacaacttaacactgattactcatagaggcactgccatggtggtcttggataagatctggaagaattctctggattaccaggcagagactcttattgtcttcccttattttcccccaggcaaagtctgtctttctgtgatcagctgcctggagttgggggagaagtgacacaaacacccctgtgaccaccactgggactgtgcagggtcagacgtgaagccagcatagtactgggtcttgcccaaggcctatggtaaccaccgcctggctactacctatgttcactcaaggccctatggctctaaaatcagcaggtggcaaagccagccaagcttatgtccctctctttagggtggcaagtttcccccagcctggggtgaatccagagatgccttccaggaactggggcctagtcagaaaccttaggaatctacctggtactctattgcactgaggctgaactggcacccaagccacaagacaaagtccttcccacttttccctcccctttccacaagctgaggagtctcttgccatggccacttccaccccaggcctgtggtgggtactgtctggctactgctgatgtatactcaaggcccaagggctctgcagtaagcttgtggtgaacgctgcccagcctgggactcacccttcagggaagcaggctcccctctggcccagagcaggtccaggaatgctatctaagagccaaagcctggaatcagggaccttaagaggccacttggtattctaaccccacagtggccaagtcccctttactctttccacttcttttctcaagcagaaggaatttctccccatagccaccacagctgtaatgtgctgggtcacaccttaagcctgcacgtctctgagtctcacccaaagcccatgatgagtactacctggctacttctgattattcagggccaaagggctctttagtcagctggtgaggaatcctgccaggactggtccttcccttcaaggcagcaggttcccttctggcccagggtgtggctagaaatgtcagcttggagctatggcctggaatgtgggcctcaggactttgcctggtgccctatcctactgcagctgagctggtatccaatgcaagacaaactcatctttgttcttccctctcctcttctcaagcagaggaaagaagtctctctctgagctttgagctgccctgcctggggttgggagaggggtggtgcaagcaatcccttggccatcccagctagtgtctcactaggttgtgtgccccccacattcactggctctgagcccagcacagcaccaggacttacccaggaattgccatccttgtggcctagactgcctttcaagtttatgtagaacctcagagcacttcagcccatggtggggaggcttactggaactcaggttcccactgctgggatgggtgatttgcctctagctagggctggtctaaatgatccctccatgggacctgggtgagttcttcccagtgttgctttgtgctatgactgggcagcactgagttccaatgcaaagtctgaaaatcactgcactcttcctctcccagaagcacacattctctctccatgccaggtggccgctgccggcgaatgggggagagatagcatttagcaattcaagactgtcttaccctcttcagttactctttcagtgatacgaagttaaaaccaggtactgtgatcactcacctgatttttggttcttatgaaggtgcttttttttgtgtggatcattattcaatttggtgttcctgcagggagcaggattagtggaggcgtctattcagccatcttgctccacctcccctagctatgtccttttaaatatttataatcgacatacaatatattacacttaaagtatacaataagttctaaaatataactgaaatcatcatcgaactctagataattaacatatccatcaaccctaaagtttcctcatgtttagatgatctcctttccctctagaaaccactcatctactttctgtcatatagattatagtttgccttttctggagttttatataaacagaatcatatagtatatgttcttttctgtctgacttcttttatttaccatgattatttcatccatgttacatgtatcaacagtttattccttgtttgttgatgatagtatttcattgtatggatatatactccaatgggtttattcatttacctgttgatgtatgttggatcgtttctagttttcagctatcacaaataaaactgctataaacattaaacattaatgtccaagtctttgtatagacatatgctttcattttctcttgggcaaataccttgggtggagtggctggatattatggccagtgtatgtttaactttataaagagctgtcgaagtgttttcctttttcttttttctttttgagatgaagtcttgctctgttgcccaggctggagtgcagtggtgcaatctcggctcattgcaacctctgcctcccaggttcaagcaattctcctgcctcagcctcctgagtagttggggttacagatgcctgccaccatgcctagctaatttttgtatttttagtagagacagggtttcaccatgttggccaggctggtctcaaactcctgatctcaagtgatctgcccgccttgacctcccaaagtgctcagattacaggtgtgagccaccacatccagccccaaattgtttataccattttatattcctaccaggattgtatgagagttccagttcttctaaattcttgccaacatttactactttgaataaatgttcattgtaaaaaaattttaagagggttatataggggaaaaaaaggccgctattaatctgttaattgcactactgggagataaagctattaaactgtcatatttgtggctgggcgtggtaacacatgcttgtgatcctagcactttaggaggctggggaaggaggatcacttgagaccaggagttcgagaccagcctgggcaacacagcaagactctgtctccacaaaaatattaaaaattaaaaaaaaaagaaattgtcatgtttgtagacttcccaaatttgccatcctaggcaaacagtgctcttgtttttaaacaaatagttgtatacataattttccccctcactattcaaaacatgtcataaatggtaagtccaagaaaaatacaggtattcccccccaaagaaaactgtaaaatcgacttttttctatctgtactgttttttattggtttttaaattggttttccaagtgagtaaatcagaatctatctgtaatggattttaaatttagtgtttctctgtgatgtagtaaacaagaaactagaggcaaaaatagccctgtcccttgctaaacttctaaggcacttttctagtacaactcaacactaacatttcaggcctttagtgccttatatgagtttttaaaagggggaaaagggagggagcaagagtgtcttaactcatacatttaggcataacaattattctcatattttagttattgagagggctggtagaaaaactaggtaaataatattaataattatagcgcttattaaacactacagaacacttactatgtaccaggcattgtgggaggctctctcttgtgcattatctcatttcattaggtccatggagagtattgcattttcttagtttaggcatggcctccacaataaagattatcaaaagcctaaaaatatgtaaaagaaacctagaagttatttgttgtgctccttggggaagctaggcaaatcctttcaactgaaaaccatggtgacttccaagatctctgcccctccccatcgccatggtccacttcctcttctcactgttcctcttagaaaagatctgtggactccaccaccacgaaatggcggcaccttatttatggtcactttagagggtaggttttcttaatgggtctgcctgtcatgtttaacgtccttggctgggtccaaggcagatgcagtccaaactctcactaaaattgccgagccctttgtcttccagtgtctaaaatattaatgtcaatggaatcaggccagagtttgaattctagtctcttagcctttgtttcccctgtccataaaatgaatgggggtaattctttcctcctacagtttatttatatattcactaattcattcattcatccatccattcgttcattcggtttactgagtacctactatgtgccagcccctgttctagggtggaaactaagagaatgatgtacctagagggcgctggaagctctaaagccctagcagttactgcttttactattagtggtcgtttttttctcccccccgccccccgacaaatcaacagaacaaagaaaattacctaaacagcaaggacatagggaggaacttcttggcacagaactttccaaacactttttcctgaagggatacaagaagcaagaaaggtactctttcactaggaccttctctgagctgtcctcaggatgcttttgggactatttttcttacccagagaatggagaaaccctgcagggaattcccaagctgtagttataaacagaagttctccttctgctaggtagcattcaaagatcttaatcttctgggtttccgttttctcgaatgaaaaatgcaggtccgagcagttaactggcgggggcaccattagcaagtcacttagcatctctggggccagtctgcaaagcgagggggcagccttaatgtgcctccagcctgaagtcctagaatgagcgcccggtgtcccaagctggggcgcgcaccccagatcggagggcgccgatgtacagacagcaaactcacccagtctagtgcatgccttcttaaacatcacgagactctaagaaaaggaaactgaaaacgggaaagtccctctctctaacctggcactgcgtcgctggcttggagacaggtgacggtccctgcgggccttgtcctgattggctgggcacgcgtttaatataagtggaggcgtcgcgctggcgggcattcctgaagctgacagcattcgggccgagatgtctcgctccgtggccttagctgtgctcgcgctactctctctttctggcctggaggctatccagcgtgagtctctcctaccctcccgctctggtccttcctctcccgctctgcaccctctgtggccctcgctgtgctctctcgctccgtgacttcccttctccaagttctccttggtggcccgccgtggggctagtccagggctggatctcggggaagcggcggggtggcctgggagtggggaagggggtgcgcacccgggacgcgcgctacttgcccctttcggcggggagcaggggagacctttggcctacggcgacgggagggtcgggacaaagtttagggcgtcgataagcgtcagagcgccgaggttgggggagggtttctcttccgctctttcgcggggcctctggctcccccagcgcagctggagtgggggacgggtaggctcgtcccaaaggcgcggcgctgaggtttgtgaacgcgtggaggggcgcttggggtctgggggaggcgtcgcccgggtaagcctgtctgctgcggctctgcttcccttagactggagagctgtggacttcgtctaggcgcccgctaagttcgcatgtcctagcacctctgggtctatgtggggccacaccgtggggaggaaacagcacgcgacgtttgtagaatgcttggctgtgatacaaagcggtttcgaataattaacttatttgttcccatcacatgtcacttttaaaaaattataagaactacccgttattgacatctttctgtgtgccaaggactttatgtgctttgcgtcatttaattttgaaaacagttatcttccgccatagataactactatggttatcttctgcctctcacagatgaagaaactaaggcaccgagattttaagaaacttaattacacaggggataaatggcagcaatcgagattgaagtcaagcctaaccagggcttttgcgggagcgcatgccttttggctgtaattcgtgcatttttttttaagaaaaacgcctgccttctgcgtgagattctccagagcaaactgggcggcatgggccctgtggtcttttcgtacagagggcttcctctttggctctttgcctggttgtttccaagatgtactgtgcctcttactttcggttttgaaaacatgagggggttgggcgtggtagcttacgcctgtaatcccagcacttagggaggccgaggcgggaggatggcttgaggtccgtagttgagaccagcctggccaacatggtgaagcctggtctctacaaaaaataataacaaaaattagccgggtgtggtggctcgtgcctgtggtcccagctgctccggtggctgaggcgggaggatctcttgagcttaggcttttgagctatcatggcgccagtgcactccagcgtgggcaacagagcgagaccctgtctctcaaaaaagaaaaaaaaaaaaaaagaaagagaaaagaaaagaaagaaagaagtgaaggtttgtcagtcaggggagttgtaaaaccattaataaagataatccaagatggttaccaagactgttgaggacgccagagatcttgagcactttctaagtacctggcaatacactaagcgcgctcaccttttcctctggcaaaacatgatcgaaagcagaatgttttgatcatgagaaaattgcatttaatttgaatacaatttatttacaacataaaggataatgtatatatcaccaccattactggtatttgctggttatgttagatgtcattttaaaaaataacaatctgatatttaaaaaaaaatcttattttgaaaatttccaaagtaatacatgccatgcatagaccatttctggaagataccacaagaaacatgtaatgatgattgcctctgaaggtctattttcctcctctgacctgtgtgtgggttttgtttttgttttactgtgggcataaattaatttttcagttaagttttggaagcttaaataactctccaaaagtcataaagccagtaactggttgagcccaaattcaaacccagcctgtctgatacttgtcctcttcttagaaaagattacagtgatgctctcacaaaatcttgccgccttccctcaaacagagagttccaggcaggatgaatctgtgctctgatccctgaggcatttaatatgttcttattattagaagctcagatgcaaagagctctcttagcttttaatgttatgaaaaaaatcaggtcttcattagattccccaatccacctcttgatggggctagtagcctttccttaatgatagggtgtttctagagagatatatctggtcaaggtggcctggtactcctccttctccccacagcctcccagacaaggaggagtagctgccttttagtgatcatgtaccctgaatataagtgtatttaaaagaattttatacacatatatttagtgtcaatctgtatatttagtagcactaacacttctcttcattttcaatgaaaaatatagagtttataatattttcttcccacttccccatggatggtctagtcatgcctctcattttggaaagtactgtttctgaaacattaggcaatatattcccaacctggctagtttacagcaatcacctgtggatgctaattaaaacgcaaatcccactgtcacatgcattactccatttgatcataatggaaagtatgttctgtcccatttgccatagtcctcacctatccctgttgtattttatcgggtccaactcaaccatttaaggtatttgccagctcttgtatgcatttaggttttgtttctttgttttttagctcatgaaattaggtacaaagtcagagaggggtctggcatataaaacctcagcagaaataaagaggttttgttgtttggtaagaacataccttgggttggttgggcacggtggctcgtgcctgtaatcccaacactttgggaggccaaggcaggctgatcacttgaagttgggagttcaagaccagcctggccaacatggtgaaatcccgtctctactgaaaatacaaaaattaaccaggcatggtggtgtgtgcctgtagtcccaggaatcacttgaacccaggaggcggaggttgcagtgagctgagatctcaccactgcacactgcactccagcctgggcaatggaatgagattccatcccaaaaaataaaaaaataaaaaaataaagaacataccttgggttgatccacttaggaacctcagataataacatctgccacgtatagagcaattgctatgtcccaggcactctactagacacttcatacagtttagaaaatcagatgggtgtagatcaaggcaggagcaggaaccaaaaagaaaggcataaacataagaaaaaaaatggaaggggtggaaacagagtacaataacatgagtaatttgatgggggctattatgaactgagaaatgaactttgaaaagtatcttggggccaaatcatgtagactcttgagtgatgtgttaaggaatgctatgagtgctgagagggcatcagaagtccttgagagcctccagagaaaggctcttaaaaatgcagcgcaatctccagtgacagaagatactgctagaaatctgctagaaaaaaaacaaaaaaggcatgtatagaggaattatgagggaaagataccaagtcacggtttattcttcaaaatggaggtggcttgttgggaaggtggaagctcatttggccagagtggaaatggaattgggagaaatcgatgaccaaatgtaaacacttggtgcctgatatagcttgacaccaagttagccccaagtgaaataccctggcaatattaatgtgtcttttcccgatattcctcaggtactccaaagattcaggtttactcacgtcatccagcagagaatggaaagtcaaatttcctgaattgctatgtgtctgggtttcatccatccgacattgaagttgacttactgaagaatggagagagaattgaaaaagtggagcattcagacttgtctttcagcaaggactggtctttctatctcttgtactacactgaattcacccccactgaaaaagatgagtatgcctgccgtgtgaaccatgtgactttgtcacagcccaagatagttaagtggggtaagtcttacattcttttgtaagctgctgaaagttgtgtatgagtagtcatatcataaagctgctttgatataaaaaaggtctatggccatactaccctgaatgagtcccatcccatctgatataaacaatctgcatattgggattgtcagggaatgttcttaaagatcagattagtggcacctgctgagatactgatgcacagcatggtttctgaaccagtagtttccctgcagttgagcagggagcagcagcagcacttgcacaaatacatatacactcttaacacttcttacctactggcttcctctagcttttgtggcagcttcaggtatatttagcactgaacgaacatctcaagaaggtataggcctttgtttgtaagtcctgctgtcctagcatcctataatcctggacttctccagtactttctggctggattggtatctgaggctagtaggaagggcttgttcctgctgggtagctctaaacaatgtattcatgggtaggaacagcagcctattctgccagccttatttctaaccattttagacatttgttagtacatggtattttaaaagtaaaacttaatgtcttccttttttttctccactgtctttttcatagatcgagacatgtaagcagcatcatggaggtaagtttttgaccttgagaaaatgtttttgtttcactgtcctgaggactatttatagacagctctaacatgataaccctcactatgtggagaacattgacagagtaacattttagcagggaaagaagaatcctacagggtcatgttcccttctcctgtggagtggcatgaagaaggtgtatggccccaggtatggccatattactgaccctctacagagagggcaaaggaactgccagtatggtattgcaggataaaggcaggtggttacccacattacctgcaaggctttgatctttcttctgccatttccacattggacatctctgctgaggagagaaaatgaaccactcttttcctttgtataatgttgttttattcttcagacagaagagaggagttatacagctctgcagacatcccattcctgtatggggactgtgtttgcctcttagaggttcccaggccactagaggagataaagggaaacagattgttataacttgatataatgatactataatagatgtaactacaaggagctccagaagcaagagagagggaggaacttggacttctctgcatctttagttggagtccaaaggcttttcaatgaaattctactgcccagggtacattgatgctgaaaccccattcaaatctcctgttatattctagaacagggaattgatttgggagagcatcaggaaggtggatgatctgcccagtcacactgttagtaaattgtagagccaggacctgaactctaatatagtcatgtgttacttaatgacggggacatgttctgagaaatgcttacacaaacctaggtgttgtagcctactacacgcataggctacatggtatagcctattgctcctagactacaaacctgtacagcctgttactgtactgaatactgtgggcagttgtaacacaatggtaagtatttgtgtatctaaacatagaagttgcagtaaaaatatgctattttaatcttatgagaccactgtcatatatacagtccatcattgaccaaaacatcatatcagcattttttcttctaagattttgggagcaccaaagggatacactaacaggatatactctttataatgggtttggagaactgtctgcagctacttcttttaaaaaggtgatctacacagtagaaattagacaagtttggtaatgagatctgcaatccaaataaaataaattcattgctaacctttttcttttcttttcaggtttgaagatgccgcatttggattggatgaattccaaattctgcttgcttgctttttaatattgatatgcttatacacttacactttatgcacaaaatgtagggttataataatgttaacatggacatgatcttctttataattctactttgagtgctgtctccatgtttgatgtatctgagcaggttgctccacaggtagctctaggagggctggcaacttagaggtggggagcagagaattctcttatccaacatcaacatcttggtcagatttgaactcttcaatctcttgcactcaaagcttgttaagatagttaagcgtgcataagttaacttccaatttacatactctgcttagaatttgggggaaaatttagaaatataattgacaggattattggaaatttgttataatgaatgaaacattttgtcatataagattcatatttacttcttatacatttgataaagtaaggcatggttgtggttaatctggtttatttttgttccacaagttaaataaatcataaaacttgatgtgttatctcttatatctcactcccactattacccctttattttcaaacagggaaacagtcttcaagttccacttggtaaaaaatgtgaaccccttgtatatagagtttggctcacagtgtaaagggcctcagtgattcacattttccagattaggaatctgatgctcaaagaagttaaatggcatagttggggtgacacagctgtctagtgggaggccagccttctatattttagccagcgttctttcctgcgggccaggtcatgaggagtatgcagactctaagagggagcaaaagtatctgaaggatttaatattttagcaaggaatagatatacagtcatcccttggtctccctgggggattggtttcaggaccccttcttggacaccaaatctatggatatttaagtcccttctataaaatggtatagtatttgcatataacctatccacatcctcctgtatactttaaatcatttctagattacttgtaatacctaatacaatgtaaatgctatgcaaatagttgttattgtttaaggaataatgacaagaaaaaaaagtctgtacatgctcagtaaagacacaaccatccctttttttccccagtgtttttgatccatggtttgctgaatccacagatgtggagcccctggatacggaaggccagctgtactttgaatgacaaataacagatttaaaattttcaaggcatagttttatacctgatggccagctttgtttatttgaccaagaatctgagttagctagttctaggtactgacaggataaataaaacacaacactgctcccgatcttctcagtttagcagagggacagatatgcactcaaataattaaaatatatcctgataagaatatagcataggtacgcgcgaagaacttggcaatcgaaattttgttgttcaggctgggcgaggtgtctcatgtctgtaatcccagcactttgggaggccatggtaggatgatcgcttgagcccaggagtccgagaccagcctgggcaacataacaagaccctgtctcaattcaaagaattgaattaaaaaaaacaaaaaataatttttttaaaaaagaaatgttgttgttcaaggaacaacaacaaaaatctagggaggtgttagagaagccatttgcctgagctgagagtaagttgctagtggttctcttgattggtaggtggggcctgggtttccaggcatggtagccaggaaggacagccacatggcaggtttgggtaattccaaacagtggaggaagggtgtctgggggaagacttgtaggaactcagctgaaaaaattgggggatgatactctgaaagaaaaacaaagttttaaaatttctactcttacacttaacacataatgcttctgtgaccggatatttaggggttttccccccacactctgttaggagaaaaattttagacagattaaatttaacagagtttaactgagcaaaaatgattctcgaaccaggcagctgccggagccagaataggttcaaaatgactctgggggtgccacatggttggatgacatttagggacagaaaaaggaaagtgatgtgcagaaaatggaagtcaggggcagaagcagccagattggttgcagttcagcatttgcctcatttaaacagggtttgaagagttggccacctgtgattggctgagactctgtggtataagagtaagttacagtctgtttacacatccagttaggttacagttcactatgcagagagaaatctttagcctgaacttacacagggaggcagttttatttatttatttaattttttttttttgagacaaggtctcactctgtcacccgggctggagttcagtggtatgatcatggcttattgcagcctcgacttcctggcctcaagcaatccttccgcctcaggctctagagtagctgggactacaggcacatgtcagcatgcctggctaattttgttttttaatttttagtagagatgaactcctggccttgcacaattctttcgcctcagcctccgaaaatgctgggattacaggtgtgagccactgtgcccagctaaggcaactttaggctaaacctttttttgagacagagtttctctcttgttgtctaggctggagtgcagttgcaccatcttggctcactgcaacctccacctccagggttcaagtgattctcgttcctcagcctcccgagtaactgggattacaggcatgcgccaccacgcctggctaattttgtgtttttagtagagatggtgtttcaccatgttgtccaggctggtctcaaactcctggcctcaagtgatcctctggcctcagcttcccagagtactgagattacaggcatgagccactgtgccctgcctaggctaaacttaatttaacaacaccaaacaatctccagcagacaccaactgggtatcccataattcaattcgattttgattggatctacctggagatggtgtcagatcccgctggttgagggttcagtcccacaagactgccctccacttcagatgccaatcacacattgtaggttgttacctctacttctgactgaccagctggaaaccagaactcccatgactgcctccttgactttggttaatttgctaggacagttcatatttaccaatctattataaaagattaaaggctacagacgaataactagatgaaaagatgaatagggctatatgtagggggttgtggtggtgacagtccatgccctctccaggtgtatgccaccctcccagcacctccacacattcagcaaacaggaagctcatcgttcaagagtttttatagagcttgatctccagctccccttcaccttcccagaggtggatgggtgggggtggaagttccaacacactaatcttctcatcacttggtctttctggtgactagcaccatcctgaggctatctaggggcccaaacctatgagtataacctcattagcatatactcaagggttaccaaagaggcttattattaataataaaagacactcctatcactcaaaattcaaaggattttaggaacttctgacaggaactggggacaaagaccaaatgtgtttcatattataccacacttacctaggccattcattaactcttcacctggctgcaaactaaaattacatgtagagtttgtaagaacaaaacaaacacacacacagacacacacacacacacacacacacacacacacacacaaaacaacaaggcaggcacggtggctcacgcctgtaagcccaacactttggaaagtcaaggtgagcagattacgaggagttcaagaccagcctggctaacatggtgaaaccctgtctctactaagaatacaaaaattagccaggcatggtggcacgtgcctgtaatcccagctactcaggaggctgaggcaagagaatcgcttgaacctcggaggcagaggttgcagtgagccgagatcatgccattgcactccagcctgagtgacagagtgagactccatctcaaaaacaccaccaccaccaccaccaccaacaacaaacaacaacaacaacaacaacaacaacaactcaccagcttcccagactcccatccaggccaattaaaccataatctctcggtatggagcccaggtatagtgttattttttaaaaaacctctagatagttttaatgtacatccaagattgacagacccattgagttcagtcataaagaactctctctccattccatatcattcaacagagctattttgtgaggggctgctctgctggctgatattacaaggtaatactatgtcaaagtcaaatgaaatatagagttgaatctctgaaattaaaatgttttatttgggaggaaagaattgcaactcagggcatacacacagaccagctggtctttggcatgtctgaagtacaaaaaggttttataaaatgggaaaatgttacttatcgctctgagaaaatttcactggtgctagtaagttttgaggagctggcaagttttgattggcaaatgatgacaataaacagaactagtctcagagttgtagcaggtcatttcagtagccattagttaaacctggtttcagatgatagcaggcagtttcagcttccaggcttgcagaaaatcgcatttttggaacaatgttttgtgccctgagtgcttctccctggcttcttgactctgttttagttgagtaagacaaaaatgacccagtttgatgaccaactttcacagttcctttggagcatgccttagtttctctttttagaagagagcaagcaaagaggaggaatacaggaagcttaattaaccttattaaatataattgtgcaatgcaaattaaactgaaaagtcccaacatcagtaatagagaagtagatcctacatactgacatggaagcatacccatactatattgctgaaacaaaaattagtttctacaaaatatgtgtaagaagccactttaaaaaaacaaactaggtggggcatggtggctcacacctgtaatcccagcatttttggaggccaaggtgggaggactgcgtgagctaagaagtttgagacaagcctgggcaacatagtgagacccagtctctctctctatttatgtatttatttatgtatgtacatatttattgatttatttatttgagacggagtcttgccctgtcacccaggctggagtgcaatgtcgtgatctcagctcactgcaacctccacctcccaggttcaaacgattctcctgcctcagcctcctgagtagctggaattacaggcacccgccaccatacccagctaattattttttgtatttttagtagagacgggatttcatcatgttggtcaggctggtctcaaactcctgacctcatgatccacccgcctcggcctcccaaagtgctgggattacaggtgtgagccaccgcgcccggccgagacccagtctctttaaaaaaaaatggctaacatggtgaaaccccatctctactaaaaatacaaaaattagctgggtgtggtggtacatacctgtaatcccagctacttgggaggctgaggcaggagaatcacttgaacccaggaggcggaggttgcagtgagcggagattgcatcaccgcacactagcctgggtgacagagcaagactttgtcacacacacacacacaaaaaagtggacgcttgcatcacttgagcctgggaggttgaggctgcagtgagcagagatcaggacactacactccagcctgggtgatgaagcaagtccctcaaaaaggaaaaaaaaaaaaagtagacccttgcaccccaaatctgtattgttcaaaggttaactgtatcctcctttaaaaaaggggttactgttaaataataatttttatatcttactttttttcatgatccctaaggaaaacatgtcacaaatggatatgtctttctagttttgtcaacaaccactttcacggtatttttgggctgttgctttttacttgtcatttttgtgttgtaaacccttgaagcaaaactcaaggtcttttctttttttcttttcttttcttttctgagacagggtattaccctgtcacccaggcttgtgtgcagaggcacaatcttggctcactgcagcctcagcctcttggactcaagcaatcctcccatctcagcctcccaagtagctgagaccacaggtgtgcaccacccattcctggctaattttttttgtgtatttttttgtagagatgggggtctcactatgtttccctggctggtcttgaactcttgggttcaagcgatcctccagtctcgcctctcaaagtgctgggattacagagccaccacactcagccatttcctataataaaaaaatattttgtctgtgatgtagccatcaaagttttagggggaaaaattggcattgtctttccctggagtctagacctataggaaaaaaattgaaggctaatatttgggttctagatgacgcaaaataaataataaaacatctgtgattaccttgattgaaaagtttgtgcatagaaattattctggtactttggagagctacgagaaggcctaacagaaaaaaaaactgataaatacaattaaaataacagtcgagcatatattaaagcacttactatgcactaaactctatatatctcctgtcattagttggatgcaattattagacatctttggtcctccacaacataggtgattaaaaagtctaagaaactgaggcgttatctatgtctttggtaagacacacaggcccaagtgaagcctgcaatgatgtgcaggcttcccctcccccacggaccacatggaccacttcctcttttttttttttttttttctttagacagagtctcactgtatcgcccaggctggagtgcagtggcgcaatctcggctcactgcaacctctgcttcctgggttcaagtgattctcctgcctcagcctcccgagtagctgggaatacaggcatgcaccaccatgcctgactaatttttttatgtgtgtgtttttggtagagatggggtttcaccatgctggccaggctggtctcaaactcctgacctcgtgatctgctcgccttggcctcccaaagtgctgggattacaggcacttcctctttttactgttttcacttagaaaaactgagaggacttttgctgccactgaatgacacagcatagttgaagcggttttcttgtcatttattatggctcgaatgtttgtcccttctgaaattcatgttgaaacttaatcctggctgggcacagtggctcacacttctaatcccagcattttgggaggctgagactggaggatcgcatgagcccaggagtttgagaccagcctgggcaacatagtgagtcctcctctctacaaaatcaaacaaacaaaaattagctgggtgtggtagcacacacctgtggtcccagctacttggaaggcggaggcaggaggattgtttgaacccaggaggagtttaagagcagtctgggcaatatagtgagacctcatatctgtctatctatgtatctatgtatctatgtatctatctatctatctatctatctatctatctatctatgtatctatctatctaaaataaattaaattaaaaaataaaaaataatgaggcaaagaaaagaaagttaatcctcaatataacagtattaagaagtagggcatttaagaggtgactgggtcatgagggctccttcatgaatggattaatggattaatgggttatcctgagaatgggtctgttataaaagccagtttcgctctttctcttgtgcccctctaaatctttatctttagccatgttatgatgcctctctgatatctttacccatgttatgatgcggaacaaagccctcacccaaagcaaaccagatacagcccctcaacgttgaacttctcagcctcttccatacatttttcttcctttcttttttttgagataggatcttgctctgccattgtgccattgcagcctcaaactcttgggctcaagtgatcctgctgcttcagcatcctgagtagcggggcttacagatgcacacccccatgcatcactaatttttttttttttttttgagatggagtcttgctaggtcacccaggctggagtgcagtggtgcaatctcggctcactgcaacctctgcctcctgggttcacaccattctcctgcctcagcctcccaagtagctgggactacaggtgcctgccaccacgccaggttaattttttgtatttttagtagagacagggtttcaccgtgttagccaggatggtctcgatctcctgacctcatgatccacccatcttggcctcccaaagtgctgggattacaggcatgaaccactgcgcccggccgcatcgctagtttttaaaaactttttgtagagacagattcttactatgttgccaaggctggtctcaaactcctggcctcaagagatcctccagtcttcggcctcccaaaaagatgggattacaggcatgagccacctcacctggcctcttttttttgtatattacctgatctcaggtattctgctatagcaacagaaagacgaagacagaatccttagctgtctgcaagtgtgcatgccattttcatcctctgaagagtcagcgagtgtcttaggtggagtcttgcaaaagcaggccctgagccaaagatttggatgcaaatgacttgttaagaaagggctcttcgagaccgtgccattgcactccagcccgggcaagaagagtgaaactctgtttcaaaaaaaaaaaagtggggggctcctaggaaaagaacagtaaaggagtgggggatgaaggacagggaatgggaagaagccaagcgagagcatgatttccgaagtcctacactcagcctgatcacacgggaagctttagaacaaagaacacacctcagagtttttcctgcctcaacacaaaggagctgggctttggtgctcttcatcagcctgtctttggctatccagggttgtggaacgaggtgaaacataaaactccgaggtacttccggctccctccagtgtctgagggtaatctgcaggactgagggtaattgcagatgctagctgttagcagcaaactatgcaaaagctgaggactggcttataaagccagatctgggtgagtcatgtttcctgtcaacatcctctgctgggcccataacacatgcaaccccaaacttccattacaagttcaaagtttctaaggggatagcattacagtgtgtatgatattggactcagacctgagtttgaatcctaattccacaaaagaaattggaaaagagtcatattgctgacttgaccctttgtcaccatatccataaaatgggataattattcctatatcataaatttacttatttattcacttagtcatttgttaaataaatacggagtgtctactttgtgccgggcactctttttagggtggttctgagaaggggatggcaatgagaagggctctctaagatgcaagactccaggcaactgcttttacttccagtggttctttattttcacagctcattagagcaaattaccacagcagggagatacaggttgagtgtcccttatccgaaaagcctggcaccagaagtgttttaaattttggatttttttttgatttttggaatatttgttaattatcagttgagcatctctaatgtgaaaatctaaaatccaaaatgccccagtgaccctttcctttgagcatcatgttggtgctcaaaaagtttgagatgttggagcatttaggatttcagatttttggattaaggatactcattttgtacaatggaaaacttcttggcactaatctgatgaaagaagaaactacgggagaatccctttccctaaaaggctttcagtaacaagatggccctgactcattctggacagttcctccaaaggtaggcctacaggtagaactcttttctggcagcataggggttttccagaatgaaggtgtattttttttttactgaggccaggaaaggtgaagagaatgaagggttcctagtgacgatgcagcaaccaagtcatttatgtaatggagccttatctgacagatttctaggatagaaactcagtatccaagctcaggcttggcagactgaggtgggcaccgtccccaggattgcagtgtggattagaggtttcaaccccaatcatattcaacagctccctttcccccaacaacccctttttataacagttgttttgtggtgattcttttactaatatgatcatgaaaattaagtaatttagcttgtgaatgctctagcttggctgcactgctggtataaagaagtgccagacacttgcaactgcctaggatctctgtgaaccagcggcatggaagactgagaggcacgctggattgatggctcagattcaagtatggtattgcaggttctggcgtaattttctaaaatggcgaaaatctctaggtaaaactccaaaaataaaaaaccaacatacatcttcctttgagttacctggtagttatattcctggaaaattcagtgtatatgagcctgaggtagtagatggtcaataaatactcaagaaataaaaaaatcaaaaaatataaaaatataaaacacatttcttacatgtccttggtgcttgtaagcccagattatatgcaggcttttttttggacggagtctctgttgcccaggctggagtgaagtggcgagatctgggctcactgcaacctccacctcctgggttcaagcgatcctcctgcctcagcctcctgagtagctgggattacaggcacgcgccaccaccctcagctgatctttgtatttttagtagagaaggggtttcaccatgttggccaggctgatgtagaactcctgacctcaagtgatccgcccacctcggcctcccaaagtg

SEQ ID NO: 872 - DNA, 1307 bp, Homo sapiens
ggcgggcattcctgaagctgacagcattcgggccgagatgtctcgctccgtggccttagctgtgctcgcgctactctctctttctggcctggaggctatccagcgtactccaaagattcaggtttactcacgtcatccagcagagaatggaaagtcaaatttcctgaattgctatgtgtctgggtttcatccatccgacattgaagttgacttactgaagaatggagagagaattgaaaaagtggagcattcagacttgtctttcagcaaggactggtctttctatctcttgtactacactgaattcacccccactgaaaaagatgagtatgcctgccgtgtgaaccatgtgactttgtcacagcccaagatagttaagtggggtaagaggtttgaagatgccgcatttggattggatgaattccaaattctgcttgcttgctttttaatattgatatgcttatacacttacactttatgcacaaaatgtagggttataataatgttaacatggacatgatcttctttataattctactttgagtgctgtctccatgtttgatgtatctgagcaggttgctccacagcttgttaagatagttaagcgtgcataagttaacttccaatttacatactctgcttagaatttgggggaaaatttagaaatataattgacaggattattggaaatttgttataatgaatgaaacattttgtcatataagattcatatttacttcttatacatttgataaagtaaggcatggttgtggttaatctggtttatttttgttccacaagttaaataaatcataaaacttgatgtgttatctcttatatctcactcccactattacccctttattttcaaacagggaaacagtcttcaagttccacttggtaaaaaatgtgaaccccttgtatatagagtttggctcacagtgtaaagggcctcagtgattcacattttccagattaggaatctgatgctcaaagaagttaaatggcatagttggggtgacacagctgtctagtgggaggccagccttctatattttagccagcgttctttcctgcgggccaggtcatgaggagtatgcagactctaagagggagcaaaagtatctgaaggatttaatattttagcaaggaatagatatacagtcatcccttggtctccctgggggattggtttcaggaccccttcttggacaccaaatctatggatatttaagtcccttctataaaatggtatagtatttgcatataacctatccacatcctcctgtatactttaaatcatttct

SEQ ID NO: 873 - protein, 158 aa, Homo sapiens
MSRSVAVLALLSLSGLEAIQRTPKIQVYSRHPAENGKSNFLNCYVSGFHPSDIEVDLLKNGERIEKVEHSDLSFSKDWSFYLLYYTEFTPTEKDEYACRVNHVTLSQPKIVKWGKRFEDAAFGLDEFQILLACFLILICLYTYTLCTKCRVIIMLTWT

SEQ ID NO: 874 - DNA, 1434 bp, Homo sapiens
ggcgggcattcctgaagctgacagcattcgggccgagatgtctcgctccgtggccttagctgtgctcgcgctactctctctttctggcctggaggctatccagcgtactccaaagattcaggtttactcacgtcatccagcagagaatggaaagtcaaatttcctgaattgctatgtgtctgggtttcatccatccgacattgaagttgacttactgaagaatggagagagaattgaaaaagtggagcattcagacttgtctttcagcaaggactggtctttctatctcttgtactacactgaattcacccccactgaaaaagatgagtatgcctgccgtgtgaaccatgtgactttgtcacagcccaagatagttaagtgggatcgagacatgtaagcagcatcatggaggtttgaagatgccgcatttggattggatgaattccaaattctgcttgcttgctttttaatattgatatgcttatacacttacactttatgcacaaaatgtagggttataataatgttaacatggacatgatcttctttataattctactttgagtgctgtctccatgtttgatgtatctgagcaggttgctccacaggtagctctaggagggctggcaacttagaggtggggagcagagaattctcttatccaacatcaacatcttggtcagatttgaactcttcaatctcttgcactcaaagcttgttaagatagttaagcgtgcataagttaacttccaatttacatactctgcttagaatttgggggaaaatttagaaatataattgacaggattattggaaatttgttataatgaatgaaacattttgtcatataagattcatatttacttcttatacatttgataaagtaaggcatggttgtggttaatctggtttatttttgttccacaagttaaataaatcataaaacttgatgtgttatctcttatatctcactcccactattacccctttattttcaaacagggaaacagtcttcaagttccacttggtaaaaaatgtgaaccccttgtatatagagtttggctcacagtgtaaagggcctcagtgattcacattttccagattaggaatctgatgctcaaagaagttaaatggcatagttggggtgacacagctgtctagtgggaggccagccttctatattttagccagcgttctttcctgcgggccaggtcatgaggagtatgcagactctaagagggagcaaaagtatctgaaggatttaatattttagcaaggaatagatatacagtcatcccttggtctccctgggggattggtttcaggaccccttcttggacaccaaatctatggatatttaagtcccttctataaaatggtatagtatttgcatataacctatccacatcctcctgtatactttaaatcatttct

SEQ ID NO: 875 - protein, 117 aa, Homo sapiens
MSRSVAVLALLSLSGLEAIQRTPKIQVYSRHPAENGKSNFLNCYVSGFHPSDIEVDLLKNGERIEKVEHSDLSFSKDWSFYLLYYTEFTPTEKDEYACRVNHVTLSQPKIVKWDRDM

SEQ ID NO: 876 - DNA, 127767 bp, Mus musculus
  misc_feature (1)...(127767): n = A,T,C or G
atgacatgaaaaattaattttcagtgaggctaattcaacaataatttataaatttggggtttacattatgcacagatttgtataccaggtcagaggaactatgtacataccaagaatgttgttctttgtaactcaaaaggttaaaacacagatataactctgcctctccttctagtatctgtttcttcttcagcagctagccagacttcaattaggatcaatgttctcatctgtaaaatagggttgattgtttttatatattttttaaattggtaatacatagtctttattaggaatgctaagaattgttaatgtcttatagtaacaattgataagtatttactgtgttcacattgcattgtgattttgttttattttagtaagatggagtctcattagatagcccagactttcctccaagtctcaatccccctgccttagccttccaaccactgttattactgctatgtgtcagcatgcctggctttggtttagcttatgtgtcaaattctctagtacctagaggtacactgtagttgatattattctctattttcagtaatgaagaaatgcatttctttcttctttttttttttttttttggttttttggttttttgagacagggtttctctgtgtatctctggctgtcctggaactcactttgtagaccatcctggcctcgaactcagaaatccgcctgtctctgcctcccgagtgccgggactaaaggggtataccaccatacccggctaagaaatgcatttctaatcaccatgtttggattatactcatctgatcataaagctgattctagtgatcataaggtattttgtgcttttatatttctgttgctatctaaaggaagctataatgtaaaaatacatactttacatactgctagctaaaatagaggcatgactttgaattattgggtaaatatcaacataggaaaatatgctatattaaggacatctggtgtgagcaacaaatgtcctaagttggaagagatgagttgcaggtgtccctcaggtgtcctgttgccagaacacagggaaaaggaatggtcataggtcaccgtgtccattgcattgaaggaaagcagcaggtcactggggccttctctccagttctagtgtctgaatggatgttccttccttaaaagccagtcctacaaagatatcaaaaatacacattagaaaaaaggcagcaccttcaataaatggtgctaggacaatctgtagaaaaatgaaactaggttcttatctctcaccatgcacaaagctcaactccaagtggatcaagaatctccatgtgagacctcacacttagaaactgccagagaaaaatgtaagcagtctacttttatagggagacacatgtaaggacattctgaacagcactccagtggcacatcagtccacaaatgagataacatgaaaccaaaaggctctctacaacaaagggaactgtcaattgagtaggaggcagcccacagaaagggggatttgccattcatacatttgacaagaggattcatgtcttaggatttctatcgctgtgaagagactccatgaccgcagcaactcttataaaggaaaacatttaagttgggactgccttacagtttcagagagttagtccatttttgtcattgtggggatcgggtggggagcatgggactcaagcagatgtggtgaaggtggagttgagagttctacgtctggatctgcaggcagcaggtcttcctgtgactctgagccactgagcccgagcttgagcttctgagagcaaaaagcccagccccttatgacgcattgatatagggtactggctagtttgtgtcaacttgacacagctggagttatcacagagaaaggagcttcagtagaggaaatgcctccatgagatacaactgtaaggcattttctcaattagtgatcaagggtttcaggccccttgtgggtggggccatctctgggctggtagtcttagttctataagagagtaggctgagcaagccaggggaagcaagccagtaaggaacatccctccatggcctctgcatcggctcctgctttctgacctgcttgagttccagtcctgacttccttggtgatgaacagcagtatggaagtgtaagccgaataaaccctttcctccccaacttgcttcttggtcatgatgtttgtacaggaatagaaaccctgactaagacacatagtttttttgtttgtttgtttgtttgtttgttttgttttgttttgttttgttttacaaagccacaccttctcccacaaggccaccttactccatcaagagcacacctcctccaataagattgatcacacctattccaacaaggccatacctcctaatagtgtcaccccctatggacctatggggacaattttaattcgaaccaccacaataagtatctacactatacaaagaactaataaaaacataaacatcaagaaaattaagaaaaattaggctatgaaactgaacagggaggtctcaaaaaaagaaaaaaaaagaaatgcagatgtttagcaaatacgcttaaacacattcagtggccttagccgtcagggaactgtagattcagactatcttaagattttatgtcaccccagtcagattggccctcatcacaaaatcaaatggtaacaaatgctggtgaggatgtgggaagaggagaccctgcacactgttggtggaagaataaaccaaagccaccactttagaaagtcaatctgaaggtttgtcaaaaaagtagaactcccatgtgacccagctgcccactcctaggcatataaccaatggaacctatatccccgtacagaggtaattacacacccacgttcattacaatatgcaggaaagggaagtgccctcggtagctaccatctgataaacagataaagagaatgtagtacatatacacaatgcatttctattctgtgctgagcgaataaaagcagcacagatttagtatcagagatattggctcaaatctcaggtttgtaactcattggctcattgaagaaattcctctactgtgaacattgtccccccttggagaacatgtactgcctgtgctggtagccactaatctcatgttggtattgtcattacaatcatgatacacattgtgatcctctactgcccaccacatttcaagagcttcactgttctgggtggctcacagtcatcatatgtcacatttgcgtcgtcgtggtaaatctactaaaacccagcaaagctcttgttcattttaactggagtagtgcttctgatttgtgtgacgcaaaaccataaattcatttgtatctgttctctcctgttcatggctatttgttgattcggcattcaccttgtgccaactcctattccctttcattctttgaatgtcccttgaggttagtgtccgtttactttcggatagagaggaaagcttgagcttgcgaagattaatcaatatggctaccaagatgcttgagcagctgtctgcagagaggagcttggagtcttcaagccactgtagagtgccacctcatttgaatgtctttgtgttagttgcttttctattgctctgctaaagcaccatggcaaaggcaacttagtttatctgggcctgtggttccagtggaatttgagtctttcatgacagaagctgtaggcatggtgactggattagcaggttgagagctcacatctggaactggaaacaagaggagagagagagagagacagagagagacagagagagagacagagagagacagacagacagagagacagacagagagagacagacagacagacttgagaatagctcatggctttgaaacctcagggaaatccttcctccagcaaggccacttcctaaacctctccaaacactgctaccagctggagacccaatagtcaaacatctaaacctataggggacactctcattcaaatccccacagccctcatcctcaaaaggtgtgaaagcatcatgtaaggcaaaagcccccacaccgttctcttctccatatcggaatcttcccaaacagtcacaaacagaaaaggggagtcctacaccattcctgtgtcaataaagtggaatcaaattccacatgagccaatccagaaaagctggccatagatggaggcaaggctttactcgtccctagtttgtgttgcaaagcccacagtataaacatagatagacaccagcggttcacctggatagctgatgtaaaggagggcaggaaagaaagacatactatagtctactttgaaatcaaagttataggactagggagatgtctcagtggggaaagggtttgctacccaagggttttgattcatcagcacccactcttgaaaagcagaaatggggcatctccaaggtaagctggctagctagactagagaaattagcagactctgggttcagcagaaacccctgcctcactatatataaacagtcaatgtaaactccaggcatcaactgttgaatctcacatgcatgcaaacatacatacatgtgtaaccatacacacaaggcacatgcacacccacccatccccccacacactcctgttatctaggtacccatgcacccactctcctttttattcagctggctgagttttctgtaattcctttcaagaaaaaaggagattaaattttatttgacagagtaccttttgaaataggaagaatggagaaatattactaagctaaatcaatttgaatattttctcaggctacactattgaattctgtgaagatagcatacactaaaaaatggcatccagcttaatcaggcagtccagggttgatgagatggtaggtgtctccagaagccctgagtggcacgctgctttctgagcagggatctgagggacagaaatagactctgccagcagggcagccagcgagagtgatgcttctgcccctctcaagaaaagtggcctctgtctgccacttgttcagaatttccacaagaattccggaccctttttcgtctgcactctctgtagcctaaagtaagagtggggcctgacagccaaccaggcctttgaacgtcaaggttagcttctctccgagagctgaaaacactgcttccaggaagaagttctcttatggtttgttttcttactagcagattcaactactgttaactggaaaaacagattttcaaaggacacaaagtctggcttccttttacaatctcctccacagttccccggatggtagacagcgtacctgactatgggtctcggatatcattatgtcggtctggctaggctgccacagcctgagttctagtttgaaagtgcacatgtgaaattgaaaactaatgttggagaaaaagaatagattgtgtgtatttacttctagaggggctcagtgtttattttgttggcagaaacctaagtagggttattatacgtcctttcagctggctgtcactttgttctcagacttgagttctgaactgtccagagtagattggatgggtctggtgaggaaacttctcggctatgtcaaggagctcattgtgggcttttatgtactgtgcctttagaatcagtcagggcttctccataaggtccctggaaaatatctactctggccattacttctcacgataacaaataaggaattatctcatgaaccagataggccatttgtaaatatctctttatctttttttagttgctgaggaccccagaggcaaataggttttgttgtctaattgttggggatcatccagcacctacctgtctctgtgggtttctgcctttcacgctctctgttttaccattctactgtaccttgtttcttcttgatcagttttattatcttggtttggaataagtttggaagaaagtagctgctgctgcttctccttcttctccctccctccccttctccttctccctctcctctctctcctttgctttcctgtctttcttctttgtttgttttgtttttcacttttaaggtcacaggaattgaacccagtgctagttaagtgcttgctattctacagatcctgatccgtagttaactgttgttttgtttagtcttgtcttgctaagttgtacaggcaggaattgaatttgtgatctttttgtcttagctcctgagtagcttcgattatgccatcctgctgtgcgagaagtaacttctttacaggggcattcaaatggtggccctatgcaaactgggcttcccagtcagtccttctgagccatcccaagttttgaattgagtacgtatgaattaggaaaagatgtcccttcttccacacagctcactttaacatgttgccttatgtgtcaccttctctacctgaagttccagaagaactgatggatctggcctggtgccatcccttcagtatgaaaaagtttgttttttgttgttgttggtattttttgttttgttttttctgttggaaaatattttatttgaaaaatttatttgtccacttatcctttcatgaatgaattagttttaagttgattttgaaataaatacttcaagtgcaagaaagccagagatgcgcaaggccattttaaggtctctcatgaatgtgacattctagagcgtgagtcagtcaatccgaagatgacaaaacacagaccgtgtttggtgccagaaaggaagtaagcaggttgttgtgactggtacagaaaagcatagtatggagatttgagagcctctgaagagaagagaggatggatcagtcattaaggtgagaactggaaagtgaagagccacagacaccaaggggatgagagagacactgaaaaggtggagctagaagtgcaaaggccttgagactttaagaaaagcaggtctgttgctaatgagcaaaaagagtcgagatcaggaagccggtaagttaagtacaacagaaggaaggacccggatcctttagaccactgtaggtgaaattttaccctaaatataatgggaacttattagtttaggatttatttatagaactggctaaaacttaaagactcagtctggctgctgtggggtaaaccatggaatggagaacagtccacagcagtggtgacaaggtcgtgatggtagaggtggagttagtgggcataacacatcagtgcgatgaaagcaaacttagtgaacaagaggagaaaccacaaggaaggaaaaggcaaggatgactctcagtctcagtgagtgagttggcagagtgaaaagttagatgcaccagtcacgtttcttgaagtaaggacagtctgtgatggtagagaagctgagagaggagagagggaacttaagaagtcccacccggacacgttcagttcattttgaaacatcccgggatgacaactggggagttaaatgtctgatctggatcccacaggtcattaggctgctattttaaatgtgggaggcagcactaatttgtcagtattgatgccatggcattttacagaaacctaggtgcatgatggaaatgagacatccaagaaccaagtcatgaagggcatacggagtttgggtgtgtaaggaaaaggcaggaaatggcattagaggactggggcttggtcagcgtgtgatgagagaaggtatttcaagaagaaaggaactgtcaaccacacagaggccaaatcacacacatactaccttcatacaatttgtttatagttggtcaccatggtgacaatactgcgtgctgcaactcagtgagttgtgtctctgagctgtgtaccttgcatacatactttgattagttaggattccgagacaaatttaggaggaagtaaatacttaatggtgcagctgtattttgtccccaaaggcagaggtcttccctcaccttcgcctctgttatattcactgctctgtctccagttctcagtactgttatgaatttcccagtacctggtatggagttgaatgtttgtggtggttcttcgccaggaatctaaccaaactgaagtccatctttgttcagggataccatgcccctggattctgccacctgtggtggccttctcttgacatcagatttattgtgatgaatattgctttttttcctagaatttagaaagataattttggatggatgaaactaagaatctgaaatacctttcttaacatgttaatcttgtaattgctatttacttactggtgcttttatctatgggggaggacaggttcctaattgttagctttgtgatgagctaggaagacatctttagatcatgtgaagaatgcctaaatttgttgaagcacagagccatgtcttggtattatacaaacatagggcacattgcatctgagttcatttcctaagcatcccttttctctcactgacagaattttcatggtactcctaaatgtagtggaccaggaatcccttgggcataggtggctctaatgcggtgcttgagtttgtagaacacttcttctcgagggaagctttcattctgtggttttcattgagtttctggaggcagagtccacagtagtgggacacaatgcagttgcagcagaagccccggggggctcatgagaacatgtcactgatgctagtgtaggtatggaccaattccaggcagcagtgtgtcctgtatggtgggcaagcaggtgacacttagttaccttccaggagctcctatcacaagccctccacagaactcttctatataaatccaagacagcggtgtcattaatttcaaacctgttccagaggaatgttctctgttaaagaggtaaacctttcagtatacagaaagaacacactgtgttcttaataaaaatgttcaaggggccaggccgtggtgtcctttaatctcagcacttgggcagaggcaggtggatctctgtgggtttgaggctgtcttggactacagagtgagtttcaggacagccagggctacacagtgaaacctgtctcaaaacaaacaaacaaacaaacaaacaaacaaaacccaaaaaaaccaaccaaaccaaaccaagccaatcaaccaaacaaaaaagaaatgttcaacagtattatcagaaatggagttgttaggatgcagatacaaaaggtgcctgcttgtggtcctgtgattggataccatgttgtaagttatgaataccctcccacttctttttaacaggaatcttttgtgtttgagcccaactgcctcttcaaagtagatgaattcggcttcttcctgacgtggaagagtgaaggcaaggtatggcataagacagcagcttgtcctgcctgctgtccaggtcaagccacttcccttcccaataggtggaccaagctcctcttgagggcatgcagaccacgcttcctccttcccttgagattcttcactgcatgatttcccgtcccactccttggggatacccttggaactgaagacattatacagtttagctctcagagattcaactggaggaacaaagcttgcattttttaaaagagctacaagtcattgggaaaaggaagttacattgttataaaagcttggacaaaacaggtctggtttaatcttgagagttagcaatattttctagaacgtaatgttcaagctgagacaaacatgatctgatgtgcagcgcagcgcacacttagtgaacactggagatgaaccaagacaggtggagttggcagtgtataaaaactggcgttattcctacttaatgttttatatatgcagatatttaatgatgcaaggcattattatgcatataaatgcagtaatactttataaacattttactaatcatttagaattacactcatatatatgtattcatatttatgtgtatacaaatatgaaatagttttgagtcttttctttctgatcattagacatcattactgttatttgctttgcattttgctatttgtatgaacagcgttgattttatctttagaaatgtttgttaatactctgggccaccaggctggcagaattgaagttcattgccggggtgtatgctctctctgcaggaaggacaagtgctagaatgttccctcatcaacagtattcgccaagcagccataccaaaggtaaatgcaattggtggtgttcttcaattttattttatttataatgtgtaagtgcatgcgtgcatgagtgtctgtgtgtgttgggatgacgtgagtgtgcatgtgctatccacgttcctgtggaattggttctgtctgtccaacttgacatgggttctgggaatacaactcaagtcatcatgcttgtgtagcaaacacttttaccctcagagccatattgctggccctgctgttcttttaaacatagatttacaagagtatatttttcatctataactcttaggtgacttgggttacattatttggatttcagttatattagcaatgttttaaccctttgctcttcatgtttaactgatgactgtgtgggtttacatggctgaggcacccatactgcttcatctgtgcactcaaaacactagtgcacacaaaaatcctggctgaactctgagagggaaggcacctggagcacagaaatcagggatcgtcagagattggtgtgcttgaagaagaagcggtctacagagtgctgtgcggaatttaaaaggtttctcttcatagaatgttcaaccacagaatttatttccctcactgtaactgccttgtgtggtttcagatttcccaaacaaagttctattcctgattgtttgtttgttaatttttacttgtcagttggcctctttcatgttagctatgtttcctgtgtaactacttattggaatttcctctggaaaacaagcgtggtattttatgtgggaatcagggtaaactttcacagctttccttccatgtgaggatgcaaacattatagaaatgcaagtgcttgttctttgtatccaagctgcatgtgagtcttaacttcatttcctcagagtagcctatgctagtgactgtggtggtggtggtctcattcctggtaaggaagcccaagcctgtgttctgttgtaacaggctccgtgggatattcatggacacaagcaaacaccagtacagtctttcctgaacatcaccaaagctgaacttttctgagagtgacaatcaaaaaattcagacaaggaggcgggacatgtggttcagcaatgaagagcactggctgttcttctagtggaccccagcctgataaagtcccagagccctcatgatgactttcacctatctgagcacttggcacaaacaatcatagacatacgtgccatcaaacaaataattgagatttatttttaaaagatgtatacaaaagactattgagccaagttttcttgaagaagaaagaagaaggagaaggaagaggagaagggggaggagggaagaggaagaagaagcaggagcagcggaagcggaggaagaaggagaagaaggaggaggannnnnnnnnnnnnnnnnnnngaggaggaagaagaagaagaagaagaagaagaagaagaagaagaagaagaagaagaagaagaagaagaagaagaagaaaagtatgatgctcttctgatgcagtttttgtgcactgtaatgctggggacttcagccctccaggttttataatagtgctagttcccctggggggttttaatgcagcagggaccatttccctttaggtatattttttgcatgaagtgtggtttcttttcaccgcatttttctccacactctgcaacctaccatattttttcctatttttatacatctacaggatcccaaaatcctggctgctctcgaagctgttggaaaatctgaaaatgatctggaagggcggatattgtgtgtctgcagcggcacggatctggtgaatatcggcttcacttacatggtggctgaaaatccagaagtaactaaggtaacatctcaatggcctccctccccaataagtgtatggtgtgtgtgtgtgcgccgcgcgcgcacagttgtttaatgtttaatataattttaaatatgaagttgagaattgtacacgcattttaatcgtttaaaagttcactgctctgctggaatatttctgtagaaaattcagcatcccaaatgctttcattacccatcacacacagaagtcagccctgcctggcatgatgtgttttcagaaaactagcccaggcctcccataacttgaatgtgcccaggagttcctgtgatcagtaggtctgagttaagagacaagagattccttttcagttaagctcagagaagcacactctgagtatcaaataccttggtcagtcctgcccaccagaaacaacgtaaaccatgaatatggcttaggtgtagctgtgtgcgagagagcaagcatggtatgcatgaagttctagtataaaaaaaaatgaaataaaaacataaaacggtaatgagtggctcagtagtatatactgtgacaagcgtgttcaatatcctgggttctaccctcagtgccagagaccaacatggctataactatttctgtaaaatatggttatttaacccaatatattctaaccattgttgttttagtatgctataagcataaaatttactaatgacatagtttacattcacttgttcatggtgtttgacatctagtgtgtatttttacatcaaacatgtcaaattaaaagtgcaaagtagccgctgtctaccctattgaacagtgtaaactcggttgcttaaaaatctcaatctcttttcctcagtaagctgtttgaagcattgagttaagacccatcttatatcatgatgcccattacgtagtaagaaaccattgccctagcaaggtagtccctaaagagattttgatgcaaaaatcttcccaacttgacttccaaacatatgtaatctatatgaaagagaccaagtcttttctatcatagagacctgggtttgggaaaggagaggtctttcattttccattaatctcataattagaaacacagcatagatttaatgagaaaggtagagatgctgagttgtataggaaggatagtcaccagctaagatcaggtggggaagcaaaggaccatcacagtcatggactctgggtctaacaagaggcagaattgagtgttgctcattctgggaccacggggcttactcaccatcacttgcatggcatggccctcattctagaagcactggccttaccagggatgtccttgcgcacgtgtcccagacccacagaggcactgatgcagagcctgcattggtaaaaaacagcttccaagtgactagtgtgtgtgtgtgtgtgtgtgtgtgtgtgtgtgtgtgtgtgtgtgtgtctcagaggctcttgctttgtgcctttggaagaaggcatgggccctccaaggacagcctttgctctgtccttgtggaagtggctttgtaggttttgtgcttttgttctgtgtcatctcagtttgggagaacagcttttacaggcctctcaagtttttatttctctgctcagacaggagcctaatttgaatggattattgaccttgatctagacaaatagctttgcatatttgctgcaaaggtctttctgcttgccgtttgccatagcaaccttgactcttggggatccgttctggctaactgtgaagagaatgacttgcttgtcacatacacatgtttggctacttgaaattttgcaaaaaatattgtaaactttgttgttttgtgacatcaattcctgacagaaaaacaaacaaacaaacaaaaacaacaacaacaacaaaaaccactgtgattccttctaactccagaatctgcactcgggctccaattagctgagcagaaatccgtacttttccttctcagccaactgggaacatagacaccatatttactcttctgtgtctcacttatttttttcttctgtgaaatgagacttgcataaaaagtacctgctgtacgattgtgagggttgctggacttgctgctttgaaaacgcacgatgcatttcatccccctgttagctatgatgatcccaaagtcagaatgtaagctggaggggtggggtgggagagatcaggatgagcctcctaccatcttatctctcggacatgacaaatagactgtggaataccaaagaccacatgggaacatagaccaaagcccaggcttaacctcacgctgtctgcctttgctcctcaatactggctacatcgctctaagacctaagctagtaaggtcctgggacaatgtctcaaatcagcaaatctcaggtgcttgtttcccataatttgattgctgtcgatcttggtccattgtgtttaagaatctccttttgggacatacaaaaatgaggaagttctatgcagaggagggataaggtgggcagtacatcctcaaagacaaaacttaactgtttttctttaagtagcagacacgttttaaaaaaagttttatttcctagaaaataaagactctaattttgttctgattttcagttcaaactcacagatatttaatcctactgtttttagggggaaaatattttagcttcttggaactgttacttagaagaaactgttatttttttaatatttctctactggtataaaatacaaataataaatctcattatccagactgaagagtgttagttagttaatgtccttctggttaatgagtgcttgctgacagcattaaataccatattttccccaactatgagtattaatttttccctgaatttttcagtgaatatgcatgtgaatgggtaatgatgctcatatcttgttatcaatacttaaaagcttatattagtcaacaccagaacctttatcgacttcagtattgacagtatctcctacattcccatttttattcctaatcttggatagatgcatccctaacagattatacaaaccgagaaatgagtgattgggttaggtaaaaaagatggaagagtccatcaattaactcaggtcaatgagaaaagcagagtagcttaaggctatgcaggagagaaggcagatagcccaagtttaagcctgggctttggtctgtcttcctgactggtctttggagtttcacagtttatctgtcatgtctgaggtggagaggtggatgtgactcagtgataccagtcacatatgagtggaaccaaggacccctgaattatgggatcacaagatatgctaatggcccaattagcccatatggaagatgttcatggtgagttcattacaaaagccagtaacagcaaagaagtggtttttatattaatctgtagagatcttgagtgctttggctgaaagaaactacttgtgctttgctttctggccgttctctcaatggctgagctgcagacattacatgtcatctgttggtgggatgtcatggagcttgttatatataccccagccattaaggaacgggctgctattaagcccacatttcatagctctgtgacttcccttaacctatcgcttgtctagtgctgtgcagactagcacatggacagcatctggaggaaacaaatagcagcctacctttaaaaggattgctctagaatatccaactctactagcagcaggcctttttcttttcactaggctttcatttgtttatgtaatgttttattataaccgacatgcacaggtttgaaaattaatagaagtcttttgttgtaagcctccaaatttggggcaaaagaatttactatctatatcaacatgtggcctggagattgagtttagtgtctgggtatccaagggctttgaatgtcttaggagcattccacatttctttctctgaccaaggagggaaacaggaagagagtttccagcactgcatttgattattgaagtgcttgaatctcctccgaactcctagactattatgctacagaacagtctgattgttctgaaaaactcacttctccaaacatttaggcgaagccaactttctattcatccagactccagaaggaccgaatttaactcaagagaaattttctgactctgagcgagtccttcaaattgttttcaaagagtgtctgcaatatgtgtgtgtgtctgtgtgtgtgtgtgtgtgtacatgcctcattttacatggctgtttggtgagtcagtaaagcccagatgattcaactttctccaagttcaggttgcaaatccttataaagtgttttctagtcatttgactgtgaaaatgtggctgtgttttttccaaaaatgcaagtcttatataagacatcctggaagctcagcttgtgcggtctccagctgctctctgccatgtaaacagcctagccttgccactcgccactgatttaggcttgtgctnnnnnnnnnnnnnnnnnnnnnnnnnnnnnnnnnnnnnnnnnnnnnnnnnnnnnnnnnnnnnnnnnnnnnnnnnnnnnnnnnnnnnnnnnnnnnnnnnnnnnnnnnnnnnnnnnnnnnnnnnnnnnnnnnnnnnnnnnnnnnnnnnnnnnnnnnnnnnnnnnnnnnnnnnnnnnnnnnnnnnnnnnnnnnnnnnnnnnnnnnnnnnnnnnnnnnnnnnnnnnnnnnccacctcctcccctctcatgtcttcatcttgaccttgccccttatagtccattctcagaatagcagctgaagataagcctcttcagatcaggggctttcatcacgtgggatgctctaaggcctccaagtctctatgaaatccagcctcatctgcttccctgcctgccttcacctccgttttcctcagccatgtttctgtcagatctctgtggatatgctggccgtttgctctttcccctgttataaaggaaggttttacgtttgttgtttgtttgtttgtttccctgttttttttccctggttctctttccatccctactggactattcactacctactgcagctcctgtcctctcaacacacttcagcccttccccattcgttcttctttccagaacagtttccagccttttgaaagtgctcaataaacgcatgcttactgaagacagctatgctggccaggctaatatatcctaacccagctggttaagatgacagtagtcttgccctaatttttgggaaatgggttccagtatcccacagtgaattcctaaaaccacaaatggtaccaagctccgcatgcacttctccattgtttcttcttcctgtaaatacatctgattaggtttaatttatgttaaaggaagtcgcaatacatagtgaattgtgaacaatagattgtgatagaattgccaacatcagtacagttatgcatgaggacattattaagtaaaatagggacttatttgagcacagcccatctgataatgaggtagcgctgagtgcccaacaagagggcggtacatcccagttgtttagagcaggacaatatgggatttgattctgctaccagagggtgtgcaagttataacttatgagtagcttgcttcatccattttcatttaatattttcagacatgagccactaatatcattgacagtgaaataagggtaagggggtgccactgtatcagctcggtgttgtacacttcgattttatacagactcgctgaggaggagctagggaaaacggtacttgacaagcaggctgagaaaatgtgatttgatggcagtccaaggggaacggaatgatctataatcccggggtgttatttttagagtcatttttcaggatgtaatgagattgctgccactgagagtccatgacaggacgggaggtttcgatgctgttctcttggcttcctcccaatcaggatcaccgtagcctgcttacctcaatacttcctgtccctccacttagaaaaatgtcgctttcctttcctctcctgaaaagccctctgttaaaaaagaaatgctaacaagttgctgccacctttatcccaaccccagggtgctgctgggtaaaaggtgtgtcttctctgtcctgtagctagaaacacttgagaagaagcaacctcatgctgaaagctttggccctttttccaagaaactgtaattaagctttttattcttcctccctgattcctcctccctgaaccatcttcatccctctgcttattattttatcataggctatgcaaattacttagttagcacgcttacatcttatttacttagaaaaccaactctggtttgtttttgtttctttgtttgattctcagaaggcagctagctcaggagggtttccatctccagcaaataggagttcagatgtcagttacagctggtgctgcacagtgcaaccccagtcactgtgctgtgcgccaggctcaagcacatcccacattcaatgcttccacacataaatctgctattttatagcaactcgaattttcctttgattatagaaataagctgttattgtgaggttcaaaatgcagagattggaactgagttcaggcaatttccatcccgctcattatactttcttcaggttgtcaatattgggagaacttcgtaaattatactttgtgactaagttaccaaataggcactagactaattactgcagaaattaagttatgaaaagtaatgtgttcttttttggggttcaaaaatgataatagggtgtgtgatttattgcaggcaatacagtatcattttaagaaactgagttgaatgttaaaggctccttgcttgcacttggattatgttgactaactacagaggttcctggagaaggaagggatttactctttgtttcactgggaaaacaaaagcagatctcgcttccttctgttggctctgctaacatcctccatgacctcaaagacctcagtggagttcctgcgtggatggccaagcactgaggaacttcaagggatcagactgagcttcagccagggtcttctagaggtgccagttctcgggccccttcttgcctgatagtgagaaatctagataaagaacctaggaaagtttcaacaggtagacctaaacccaagtcaccaattttcaagcccacaagtgttaaggtaactagagcatacaagtagacaaatgcagctccctgccctcccagcctgaacatgagttcaccaaggcagagcaaagaaaggcacctggggtaaaccagggtctgtgactctagaaagctcacactggcttcacaggaccccattttaaaatcctttcatacagtagtttgtgttagtttgggtatgatatgcccagggtcttgtgtattctaggcaaatgttctaccactgagctagacccccaaacattacaatggtctcaattttcagagtataggctagcggctcccagagccctcgcacctcccacagagcttcaaagtcatgtccaggcccaaccttgggccttctcaatcagcaacccatgttctggtgatccgatttgccctccacatgattgtgctgcaccctggaaagtgtggctatgggaaaacggtccaccagtagccttaatatcccaccgtcctatggagatctaggagaaggggcattcgcctgctggggtgagctgtgcttgccgccttaggcagctggctggtgcatctgaacctctctccccaccctcaatattcattaagtctcttcgttaccttgcctcacagtgaggctcaaacataacgagcatagaggatgtgtgtggatctgtgtgcatgtgtgtgtagggtgtatgcatgtatctgtgtgtgggagaaggtgtgtgtttatgctatgcatctgtgtgtgtgtgtctgtgtgtgtctgtgtgtctgtgtttcagggggaaggatgtgagaggagtctctctctctctctctctctctctgtgtgtgtgtgtgtgtgtgtgtgtgtgtgtgtgtgtgtgtgtgtgtgtgctcgagagtttcatgcttccaaaactagcagttggcattttcgtgccaaagtgttagatcccatgggaagactggagtgagcgtttacgtttctctgtttggcaaggatcgtagctagctttgagtgccaagcctcattgcatactgaagagtctatggaggtgctgaaaggtcatgacttgtgctcagcaaagaatgccttggatgctttaccttctcaggagattattgtatggtaagaccatgggggtcaaagtatggtcagggtacagcaggagccagtgtcagagtcaccaaggcaaaaaaaaaaaaaatcattgtgccaagatgctcaggtgcttcctgtggacactaaggtatgagtggtcctacgggagagcatgaaagtctcagtggttctctactcatgtgagctgtacacagggagaaagttttgtgaggcattggaatgttgagtccagattggtccccggttgccactagagaaaagaggttgccctgaatcaataaatgtaatgcaattttccctgtaccctcagtgagtatagtttttacaagggaagcaatcttttcatcacctaatcaaatgacaggcaaaatgaaataaaatggtcccaggattagctggcttactataatacagagctagagaaacagaataagaaaaccaggcaaaaagcatatatgaaaatatagacaaatgtaaaggaaaattgtttagtgcaatgcaccacaaacaaaccaaacactgtccaccggaaggagctgtccaaatggtgggagaccaggccctctgggtaacatttggatggatccagagagctagctgccaggttgtcagagtaaaggaaaggacattttattcatatggagtatctgcatgagaagttcaagagtggcttcacaatgagctgtgtctcatgacgtggcagtctgaaggcacccagggtccctaaattgcattatctcagcttgcactcatcagctgtgaggcatgagtcccatacaccaactcacttaaatatcagcatagagttgctactgttggttgtcaatcagtctgtgataatattgagctagtcgcctggcttaggtatatcttctgtgattagaaatctcaaactggagttaccaccgcattctgcataggaagtacagaagaatacagtcaaacaaaaccagcagtcccttaaaatgagttttccagttcctgtgtcatctcgtaaaaattgctatgaaatttgctttctataaaactgcttcaaaatgaacaaattgagtgttctttatgactctgtagcgttgtataaccacccctaccgtatagttctataacacatcgccatccggaaaggaaacccatccttccaccaccatccctgcctgcaacctgagctcatcctgttatcagttggcctcctgctgtttatcagcatagtgtatcacattctatcactaggagtttcaccacattcatttgctggtctttaaaactcggtcctggactcgaatgtcatcaagtttctgtgatcactgaggtaggcttccttggagttttagcttccttttctttggaaaatgtccagcatccgaagcacttccctttgaggatctgtggtgacaacgagggccatactgttcctggctggtgccctcccaccattgtgtttctggaatgtactggttgaggagcagaatctaaacctgcccagagcacgtattttgccctgattttcattccctccagcaggagagttaaaataatctccacggctcctggaaggaaaaatgtcactagccttaaattacttcttcattttccatagagctccagtttttactgctagcaaaaccagctattgggaacattgtgtgtgtgtgtgtgtgtgtgtgtgtgtgtgtgtgtgtgtgtgtgtgcgcgcgcgcgcctgccatgtatgtatgggtgttcatgcatgcatttgcgcgctaccaagaacacatatggtcctggaagctgaaactattatacctttcagaagttgtgctgactcttagtaataatacaaactgaacatccttactttcagaattccaaatctgaagtgctccccagtgtctgtagtacaagcatgaaagaaagatgggacctggtgtcacaggtaatagtcacagtgtaggtgcaggaaaaatattgtgaaaaattacacaacttacaaaattacaggatatgggaataaagtatatataaaacacaaatgaactttatgtttaatatacggactcatccctaagatacctcattccatatgtactggctaattttgtgttaacttgacagaagctagagtctttttagtagaaggaaagtcaactgagaaaagtcccccatcagattggcctgtgagcaagactcttgtacgttttcttgattgatgattgctgtaggaatgctgaacccactgggtggtacctcccctgagcaagctaagggagcaagccaggaagctgtgttcctccgtgattgacttctgcatcagttcctgcttccaggttcctggaacacttgaatccctaatctgactttcctcagtgtgatggagtgtttgtcacctgaatgatgtaagatgaaataaaccaagcattttcgacgtgtattagactctgttcaaagtgttgtgctgttgtgcgtattatttaatgtcacaacagctcaactggaagactattaatgatggtcttccttatctagaggagatatgggctcgagagatgaacttgccaaggtcataccctcagtgacattatacacccgtcgtgccaggctgggctccagatctcgagttctaacactgctgtgctgcagctcacagctatgaatttttcttaccaatataaagacaaaagtgtgaccagctcctttacctgtaacataatacggttttcacatagcgtttaaatgaataactttaatgaggttgctattctgtgggatgtatgtgcttcaagaaagctaccatctcaacactgttgatctgcgcccaagtcaagcaagagaccgcacattcggagctactccattctcattgaagctcagcaaggagaagggtggggatttacttattttccacagtgcttcttccttttggacgaataccaagttagtatttcagaaatgctgctctgcagacagaacagtgacgtcatggaggcatcattcggcccgatgttactgtagcactaccaaaacattgatgaagtcttggcattcatctatttattgacactgtgaatatcctattgactgtcagggtgccctctagtctcttccactggatgaatttatggtaggaagctttccttaaaagatagcacctcagataacaagacttttctcagaagtttatgtcacttctaatccctcttatgttgatagtgtttataggcttctctatagatctgacttgtttgaactaaacaggtcgatgctgcctggacagagtcagtcagccagaggacccctgactgagtttggtaacatagcatgctttgcaggtcaaaataatacttagtttggtctgagataattttccaaactgtgttatttggtatattatgcggaagaatgggagctttggtactatggttgcaggcttcaatacatagatgcgtacatacatacatacatgcatgcatacatacatacctacatacatgttgatgtttggctttgaattcactagatacttccttattcttcatcatcagtatgctgtagaataaacaattaagaaaaatctgactctaaccaaattggtggtttctgacatccaaagattgatattcttggttttattaaagttttaaaattcttcgaatattttagagcatcccatatgaatgccagtttgctgaaataaatgggattacttgaattttttcaaatgccttttgggctttgtaaggatataggtgtgccatggactttgaagtgtattaatagatgttatttatttatgtcaggaagtagagcgagtataaggcccaggttttctttcttctgttcaatatgtaacagtctgtggacagaaatggggaaagtggagtaagattctatagattcaaaaggacctgttacaagatatctttgaaatcaggcttaggcaaagcaaaaaacaaaacaaaacaaaacaccctgagtaataccactggacagatggcatctgaagtgacacttgcctgagttataacccagaacagcactttgtcctctcctctctagggactgtttagaggtcctttttgacctaaccatctagcgttgtcaacataaccagcaagactgacagcctgttttgactgtctggatggcgctaactgtggccaacagtatctaaacccaacccaagccttaccagctctgtcaaacacagccaccgtgtgcctagccggcagcctgcatcctaccaggtaccattctccatgctccgaactagttctaggagtccattccgtctctaactctctccagcttctccctggaaagagaacagaatgaagaacatgtgtggcttggagactttcaggccatgtcaaggaaaagggcctggtcacttttccattcccccatctctgcttccaaacttggacacattgtgagaatgtcagccgtttcccaaaggcctctgtgattctcactgggttgtgtttcttctcttgagttgcaggcagatcccttatagcttcctggtcactggtctctgtagtttactatttgtgaattccactgtctcaggcttttttgctgtcctttctcaaccccatcatagcccgaccccgttttcttactctcctttacacatgcattgttggtggtgactttcacatttccttgcctggtttgttctcacctttggcactatcgtcatctgcctgtttgcatgcgggggtgccaaccccttgggagatatgctgagtgccagaatttcttcatgtaggatcaagagaaagtagttgacatgacttattttaattttatcattatttatttattatttaaattgttattattattatattgcttgataatttcatacatgaatataaagtatttagatcataatacagtctgttatttggtatataaactttggtagccagctcctattttctcttaacctccactctctacagtttcttcgttcttgcaccttacttagtcctgtgctgagggctatggtgacaggagaatcattggtctggagtcagtgacccaagttatagtcttgttattactactgtcctgagaagggtacttctgtctgctttctgtatccagtattctagtaggcattccatagtaagccttgattttgttgtcttgattttgtgcaaaagcctccttcgagcaggagatgctgttgttgtgacaggcttctctaggcctcctgctgctgcctagatcctggaaacccacatctccatgggttccctgtttgtgttgtgtcttctctgtcaagctgccagtgactgcttgcacagccttagtaataactgaaactccataacctgtttcagcaatgtagtgggacatatgggtacttgagtggtacttaaagaaccaaggaatgaagatttaaaatatagaaatgtcccaatgtgcagagctcactatgagagtggttattcctcatttggaagacttgatttaaaaacctgttatttattatatataaattatgcataaggagaataaattacaatgaaaataaaacagggccctagttatcaatggagaagacaccggtttcctgatgcaggttcattctgcagtgatcacatctccttcaattgtcttgttctctcactggtgagtgattcttgcattaaagttaccttcagggttaaaatgctgaataatggggactgactcatagaattactgattcttttggttcaggatagggcatttctgaaaaggacctagtaaattcttaaattactagctggggaaatctgcttcaaaattacttgtatattcactagtcttcccattcatgactgtgaaacacatgaggaaacttaattgtcttgagattttagaaggttcagtccattgtttttatgggccctatgatgtcatagaatctagagtgtcatagaatgtagaatttgcaagctgagcttctgagcatgcccatggatagttatcttgataacattaattaaaatcagggttccatcttaattgtgggtaggagcattccataggcaggggatccatggctgaataaaatagagaaaatgaactcacccttagcaacattcattcccctcagcctctttttttggggggtggggtgggtggggttggtttgttttgttgttgttgttgttgttgttgttgttgttgttgttttgtttgtttgttttttgtttttcaagatagggtttctctgtatagccctggctgtcctggaactcactttgtagaccaggctggcctcgaactcagaaatccgcctgcctctgcctcccgagtgctgggattaaaggcgtgcaccaccatgcccggcttcccctcagcctcttatcgggatgaccgggccagcttcttcaatctcatcctaccttgacctccgcaccaggatggaagacagttttgagtcagaatacactctttctctcttacgttgctcttgtcaaggcattttacggcagcaatagagaagtaactaagatgcttgggtagaacaccatggcaggagcacatgacagaggaggttcttcatctcatggttgcaaggagcaggagaaagatgaacagagagaagcccaaactaagatgtagctccctgactgcttggctcctactcttacaagtttcaggatctctcaaatagcatcacgggatcagagagtcagcatctctgagccagaatgtgggtactcaccaaacacctcacttgcttgtattttgggagatgcactcttttaggtgcatcacacctttcaaatgaatctgcacaggctcacacggcagatgtaaagtctaatccaggggaagacacctaagactctatttctaacaagtttccctggaaatattgctgccccttggccaggaatcatatgtctgtgtgtgtgtgtgtgtgtgtgtgtgtgtgtgtgtgtgtgtgagaaagagagagagagagagagagagagagagagagagagagagagagagagggagggagaagagagagagagagagagattgctgaggttatagttcagtggtaaagccctcacctcccatttatgaaaccataggctacacaccctctcccaaaaaattaaaaagaaacagatttctgttctccatcctctgagtctccatacctgcaaactgagtcaggaggttggacatgatcacttagatttaaataatttccaggttatcttgctgatattccagaaagaagggatggaaggagagggaaggagcaagaaggaggaaaggagagagggaggaaaaggaggggtgggggcttttaaggtctaacccaggctagcactcctggcatactttacctagcaggtctgtgctactgttgggtgtatttccttgggaagacttccacagtgcttgaagcagggacagaagaatgaagagaaattctgtgagtggtctcctcagatgaataaggcgatttgggctaatgtcgtagaaagagctggactgggatctaggacatggaaaaggaaagaggaagctaaaccacagccctggctgagctggagctctgtggatccctctgacctcgagcttgtagtgataaagcagtggttctcagcctatgtgtcatgaccctgggggggggggtcaaacaaccctttcacagggttgcctacgtaagaccatcagagaacacagacatttacattacaattggtaagagtatgaagtagcaacggaatagttttatggttgggggtcatcacagcatgaggacctacagcatcaggagggttgagaagcattgttctaaaggaaaattgttgctatagcaactgagtttcagttcatgtgggtttagtctagttttgttataattgtgtgtttctgcattatcttaatgaggaggggttccttttgtttgtgacagtgttttctagtgttctacagcaaggagacacataatgaggaaggcccagacatttgccaggagcaggatgcttgataactcggtgtctgcatgaagaaaatcaggtcaagaagtgctagaagccagacccagtgtccccaggcacctcttagctttccacatgcccagacaatcctacacaagactcctcaaggattttattttcctgagaagggatactggaaaaggtcaaatcaatctataaagtatagaaaggattatagagtaagagaacaaagtggttatcagtgctaatatgtgtagttagtatggtcaaggctttgtcttcaatattcagcacaaataaagtaaataaaactaaaatataaaagaagggtgagactttacggaagccacacctctctgtattcaggtgctgtttttcctgtcatggtgaagttacctggtacccctgctgcgtgtgcccaccgcaagcaactctgagaccccaccaaggcatgtctgttatccaatagctcaaagatacacctctaagggtgacatgctattaaagtattcaagcttacctacagcaattcaaacaggtgtatttttaagtcaccactttaaaacctgttaatctggaaataagcaaaggcctgtagctcatacctggagaaactttccagagaaattctgggactctactgacacctgctggcatctcatctccttaatgtttgaaaagagcaacaaaacacgtcaggcattaatatttcctgtagttactggcacgcatactatgtgtttggcctgagtcatggcatggacatggaggaggtctaaaggaccttgccttccctgacagagagacagggagcaagcgattgggtgaaaacatcccaacatggggacctgacccaagacgggctctgtgactctgggcaaggccctcagacctgctttcatcttcataaaaagaacacgtcacagcctcccactcagggctaagctatccctgaggatggtggtgacatttgcgatgcgtgagttctgtcatgagtggtgatatcaaaggtcatcacctttccattctgataaataagagtcttccccaattctattaaaaaagaagaagaggagtaggagggggaggagaagaagaagaagaaggaggaggaggaggaggaggaggaggaggcgaagaagaagaagaagaagaagaagaagaagaagaagaagaagaagaagaagaagaagaagaagaagaagaagaagaagatgatgatgatgaaggcagtttaagcctcctcaatacctccccctcccccagtatctggtggttatttctagaaacaactaaattagtgtgatcaaaaaacgttgtttctctgtaccggccacttctgtgccctaggaaactgtggactttgttctatgttttggaacagatctcaagccttcaggttgagaaaaatactcccagttaatgccatccaaattatttgtgctttttctgtctgctcctgggaaactgtgtgggcctgtggtttgttaggccagttacaggatattcaataatctccggggagccaagtccatatttagcccgacagaggaagagaggtctggtaatgagaaaagaagcaattctttaaagctcctgtttcgtttcttgattctctctctgtgtccagaccttacctgtttgttgaagcttttgatgctatttgcagttctcagaaaacggcctttgctagctgcaaaaggaaaggtgcctcctgagagttcttccgtcttccatcagaaagctgtcagcaacgtctgggactctccagggcaataaaagccattagcttcacacccaacagaacggcactagtgaggatgtagaagttagcaccctcatgcactgttgggagaaatgtaagatgatgtagctatcacagaaagcagtatggcattttctttaaaaagttgaaaggctcctcgtgtcgtcctgtgacccttgcctgtgggcatttatgccaagtaattcatatcagttatttacagtattcaagacaaagaagctcaggtatccatggagagaagaacggatggatgaccgtggcatgcacatacaattgaattctgccttgtaaaagcagaatttggcacattaaatgaaagcataatgccgagagaaatagccagtcagaacatggaaaatcctgtgtgattattcttgtgcgagatacttaacatcgtttaaaacatagacccaggaaactgactagcgagggtcagcgggagaggcacagatggggatgatgagtgcaaggtattgaggattagctaaagctcctgagacagaaccatttatgtcctgtgtgtctttaccgaaattaacaggagaagacatcaaataacaagacccaaaccacactgctataatgcagttatcagctcagggctttcagacatgaaatccctcatctggtaacgtgaagcctggtgttttggggcagtgctgtgcaccaggagcttctgtgatgacaacagtgcttctcctgggcactctcaggacagggcctcgagtcctcgtcatggctttttgtggggcacttgaatgtcaactgagacatccaattttagacttattcaatttgaatttaaggaatcctatgatcaacgacagtgacattcacatttatgtgactacccattccaaaatgtcttcctccccttggcagtagctgcaaacttaaggaggtagagtgggccggggaggagccttagctctgtttattcccaagctccagtttgctgcacagcatgtcgccaatgtgtcattcctttgtggcattcattagcatcagacattggatccaagagcagtgttggctttggttcatgggctagccttttctagaaaaatgcccttttacagacccaaagttctttcctgtcatgcgtaatctgtcctcacttttccttgtaaacccgtggagtggtggtatgaactgcagctgaggttcaggtccttatacagaagttctgtgaacacatccctgcttgctctgggtaccgtggcagcaggcaacgaatctttgactttttaaggctttgctggaaaagacaaacaggtaaactatgtaagcaggccagatggagcagcatcctgacactgcagtgaagggccttgtcacatttgtcctctaaactggaataggtaaacgtatcggcatgtacttgtacagcatgacttagagaaggctgaacaactaaaataataaggcttatattgaaacaggctgcaagtgggaagcttaggaagccagccagtctttcatggcattgtcatgccacatttaacttaatgggaaaaatgaaacctgcagaataaaatacaaccgtgtaaaatatagatgcctgtgcagcaaggggggataaaagaagagtctgtagttttattccacagaggagacaggctgtattatagtaataataataataataataataataataataataataatgaaaaagcctgtacctggctacagaggactgctcactgtggactttttctttctttttcttccttttccagcaatgggtagaaggcctgagatcgatcattcacaacttcagggcaaacaacgtcagtccgatgacatgcctcaagaaacagtgagttctgtttgtcttgccttttcttcaaaggagttatttagtaagctttctggctaggagggaagaactgtatcacatccatcaggccagtgtccacctttccttctgtacccctggctttggaagttgaccaactcccacctgtatttaaaccacttaaatacatagcaaggcatatgtgatattcttgtcatgagatctgtagcagacaaaaggttggtagcacaggtatcaagcattctttttgttgttgttgttgttttcttttcttttattgtctcctaaactccattttctgatggatagcttgcatgcctcacctgtaggataagttctagggcacctcaggtctccactgcatgaaactgacaatttagggatatagccaagagaagcatttggaaaagcatccattgcataagtaaaacagaaagtcctgcccccccccccccaagaatactgcttccttgaatgtgcggtcagggttctttgacatttctttcgaaatttcagtcaatggttcagtcaactcctgaaaatcttactgcaggtcactgttcctggagttccaagtggcttactacactgatagattgtcatcatgctcagatacattactgggtcaaataattagttttcatggagaaatcacagaaaagcagtggtctgtaattgtgcttggctgcaaaattgtctgtggcttcgtagtgacaacaaatggcacatagctatgaggtaccaagataagaatatgatgaagatgcaaataaccttgtggagataaacttccacgtctgaaaatgaggccctagcaccaagagagcgatccagtgattcttcaccctgctcagtgggccaacaggccagtccttaggcacttcctgagtagtcagcaggtacttaactatatgaactctaggttgtaaaccccagctttgccacattgggcaaatctttagccacttagtccccatttgtgaaccagattaccatatggatgaaatcagaaagcacctcacccagtgtctggcatcctcggtggaaggaagttatgaaggcttgtagattcctatttgctgtgcagcaacacttccttcctcagagtcattgcgttctctttctcagagataaccttgtgaatgttgcacactgtgactttgggtgctggtagcttcaagggatcctacttatacttgaatggccaatatgcagacaccagatctttgggcaatggagccactgtttacccacccacaggctgcttagcaggggtgcagacctgcttacttgtccagaggatgcgtctctactaaatcgaagcctccatgcctgggagattatactcctgttgccatgacaaattccaatagggtagcagagccagcccatgtgctaccaagggtggaatatattgtatgagggcatgtaaagaccacttgaaacacaagtttgcttaagccagctccctgcccattctgcctccttcgctccttttgtcccattgtgcttctggaacttaagatagaaactttcccaaagccatgataatttgtaagttgttagactgttagtgcctagaagtagtaggaataagactcattagctgagaacaatcttgattccagtgtgttctggagtgttctgaggcattgaagctcctcacgtcctgagaccctggggaaggcagagttacccaacattctgagaccctcactggggattgaaaatgaaggcgggcttccactcattctccatccaaaccttggaagccgggagtagtgaatcccctttggccttagcctaagctgcatttcttgccacctgagtgttttcagaagagcaaaaccaacacaaccatggacaggtgccatgttttgctcagtgcaaatatccaagttctaattcccctaatggtatcagattttaaaacataggcctctcggttaaatttgaatttcagctgtagctattttactgtaaatatgtagtaaatgttaccaggacacattaaaatagtaggttactcgtcttaaaatcaaatgttactgggcatattaaaatctgagggccctaaattcatcccgtaatgatggggctgttagaataggtgttctgtctgaagaagcttttctctggggttctcggtgatctggagcaggtgctggtggatctgctggtgggttctgaggctgtgttgctcttgttttccagctggatgaaactggcctttctgaccaacacaactggtaaaatcccagtgaggaggtaagtgagacacgtgattctctgtgtcaccttcaccgcatcaagccaaacagagccttccagaccaaaccaaatgcccaggctgccacactgaaccaaagatcctccctgccacaccaagtcaaaggcccacccggctatgacataatcacatatgatccttgccttcaagatatttccagaagtctagactctgctatttcgtaaaaatcacccatggaagtaaagttgtacctccctcagaataggatgcattgctgtggtaaagaatgtctgaaaaaaatgtctgaaaattgtagcactagattttcatcagtgaatcacctggctttcatgatttatattgtgtcttcccccctccagcccctttacctgagcaacaactacctccctcctttcgagctggaccccagtacactgatcttctggcaggtctatgcctctggccagcacttccccattcaaggttgctgcttatgcagtcccccgagaaggtggagctttccctaaattcagctgctgctgcaatatgctgcatagtgtttggctccttctcacactcaccaagagaagctggttgtgggtgcttacattgactgaacatgagagaagttcatttctcacagttggggaagctgagaatgcatgaacagagtgccgtcacgggccttacagactgcagactgctttcttccagttgtgccctcatgagaggttagagggctagagaaccgtctcaaggacatttttataatcctattcccaagagctccccacccctcaccataaaaccacctcccagaggcccctaataccagcacggtgaagttcagttagattccatatcagaggaatttcatccctcacctcctagcgttaacaatgacagagaacaaaaggcatatggaacccaaagggaagaaggcataagccagacggattcttcccatgtgctctttaatagtcctgacatggttcaccctgggaggagtcctcacacatcttctctgcttctcacttcctttcacagtttagggtttgctactggtctgtgtgtagctggaaggacttgtgagggtagctatgggaattcttgacgaaactctccagaatcatattgtttgatgtttgtgtatgcattcacagacatcaaagaagcttggctcagactcaggacatcatctgtccacatgaagccagacgttatgtgcccttaacctgaagcaaatgcagactccctgtataccaagcccctttgcccaggtttctcaactcaattccatgttgatgttgtctctggagatgaacttcagtaaagacacagacttgcaaaacaccaaaatatagaagagagctgtcctagactgacctacctttagcgcacaagacaaacaagtcacaagtgcagatcatttgaatgcatggatgccatttagccgaggcattcaggttactcctggccctttccaggtttcttatcctacttctctgctcacatactccattctacaccaagctactaatctgtgcccctgtgcaaatgtccccatacccccactcacattgtcacacaggacagaatcatcctagacaccatcattttggtccattccatagatcatggggatcctgaacctaagtacccaggtgacatgtctaggattcttattaatgagaaactggactacactgatggcatgaggatgaccctgtgcagtgtccctttttattcaacctttcatgattatcgaccaggttaaagatcgcaggcagttgttgtgacttttaaaaactccgcatgtagggttctttgctgcctcgttactgctcaagtgagcggaggttttcaataatatttttttctaacaagtcaggtttaagtatagtatagaagtttataaaaaaacaaaaacacccaaaaccctgtgtgtgtcctgactggtagtttttatgaaagacatttcagaaggatccttaactaattgaaaacctcccttcacttgagcaggagcaaggcaattatttcaatgtatccaaaccatccttgtcatagagacagtgtgtgcccagactcagagtacatttgttggtgtggggaacagagggtacatacggcagtgcagagggggaactctgtgcattatgcttcatttttttttccataagatttggaaagtggaccgagtgggatacaagattatgatccaagtgcttctagccagtagttctggtttcagtagcctgccttccacccaccgtgctatcatccctcagggttggaggcctgttgaggttctgtgggtccccatatagcatgttcacatacaaaatcattacaactgtgcttgaaatgctctagatattttgccattgacatgggttttgtgtgtgcgtgcatgccattattaataggtccttaacacaagacatctgtgacatggggcagcttgttagaattgctgtagtattgatgccaagccaacaaaaggggaataactctcccggtagatagtctgccaagagttaggtagaaattgttctgaatgttttaatggatgtgaagggtaaacacttttaaaaatgtcattttttcaccaacattttaggggtttaaaatggaaactattaatatagtgcacattgtgttaaaaggggatccagcttcatagtcattgcgtaacttgtgaaaggcttctgctcttaaacgttaaacctaaatataatacccaggaaattgcaggaatgattgatgaaggcagcctcactccttccctccctcttctctctttctttatctatatgatcttacacattccgcctttccctcaaattcaccagcttgctgcagttcatcctcccacttagaccattctctgaaagtaacttgtctgtctcacattccctgtaacatggagtactacctagagctagagagttgggtgatggagatctgaatggctttgagcagtaactggagaggctactaaagtggagaccaagagcctctgtataataatactggcaacctggtctgcatgacccatctatctattcaggtcctgaagctgcaggaccctacaaagggtggtaccctggtccttcactttaggagtctcctgtgactgtgtcagcagtcggtgttcaaaactctcagaaacattgaagaacagttatgggcaaaaagatgaactcccttgcattctagactcatattctctagtcgtttgcagggtagcgtgggatacagtatttagccagctctgtgataagactgagtacaacttcagtgtgcttgcttttgtacatttctttaagggaaggagtgacagtttgttttgaatgaataaaatctcattgagaaacttggagtgtagcttagttggtagagagattgcctagtgtatccaagtccttggtttccataaatccaggtttgattgtacacactcaaaaccccagaacagcaaggttgtagggttctaggctgtagaccctgtctcaaaaaacaaaaacaaaagtgaaacctcacttagcaccttgtaccttaaagcattaagcagatgcctttggccacagaattttatatatatatatatatatatatatatatatatatatatatatatataattatattattatattattatatagggcttgttatatatattattatatagggcttattatatatggttcttaacctttgtgttgcaaccctttagcaaacctccatctctaaaaaactttatattatgatttataactgtagcaaaattccagttatgaagtagcatcaaaaatgactttatggtgggggttcaccacagcatgaggaactgtattaaagggtcacatcattaggaaagttgaaaaccacttatatagaggttataataatgtcacagtccctttatcagcacactgctctcggaatgctggttaaagtgcaccgttgtggaaaccaaagaatgcatattccctctctagcctccatatcacagtagatgaatttttcagactcagtaatgatttggaaaggtgtctggagcaaaggaaacagacattactccagggaaatagtctgataaatgcccttgtggctattttccattctgaggttcttctctttttacgtacaatgagcaaatgtgccttgaggctgtgctgccgaaccctactcatgtctgagaagtcagcacctctctcccccatctccttgctccctgatcttcttgttcttcatcctgtttcttggcacacagcccagcgctcaccacacgccttccttccttgcctcacttcccatggtgccttggttctgatataggaggatggctcaggctccatacctgctgcctcgttcgtggccatggtgattagttttcatgttagaaccaggcctgtctaacccatcagccttgagtcattgctgtggagagtttttcctcctgatgacaggttcttaactttgctgtggcaccacatgtatttcctcattgcatcattttgtcaagaaagacacactgccatttgtccttacattgaaattgctaaatggcatctaccccaagtcagtgtttaaaagttgaactggactctaaagacttgagaaaatatagtcataacaccttctattctagaatcccattatccatgtacttagtctgactacacacctaggcgccgctgtcgggctcacttatccataagtagaaccgtctcaagaacacttgattatgcttcctggcatcttcatggactgactataaaacaataatggtttaaatggacgcatcataatgtgtttatgtaaatctccttcctccgggtctattttgataagctggatcctgcagctcaagtctgttttgctaagctgtatcctgcagctcctcacactcaccaagagaaactggctgttggtgcttacattgactgaacagaaatgctgaggcatatgtgaaggtagcgtgcgagatgctaaagctccattgaaaagccacacttcacaggtgaaagtcaccctagtcttcaagtcaagtctacccacccccatcggagttcagcctttcaataatcataggaactcacaaccagggcttctaaccagggagtgcataaagccacctgcgtagacaaagcaaggctgagagccatgtgcatgctgtctggataccaaatatcctctgatctctcccactcagtaattttcattctaagtatcttccacacatttatcatggggtgggggatgtctctctttcttttacataaggaagtttgaccattaaggcattacaaacttgactagcatccatgctccctatactacctagttaaaaagctattgagaaataccatgtcctaggaagtaccaagtttctgatgaagtaactaactgggtccttcccccatcacgtttacagtaaagtcccagacttttagctagctagcatggcagggtgtctcaagcgtgcttagatgaaaacagttaaaatatgtcttgtactgagtcactgtggaaccatgcaagccagaagacgagtcacaggcctagccaatctggcatctacagggctactactgttttccttaagtgtgggcctcactcacagacacctgtagaaccactgcaccaccagccacgtaactttttcttaagaacaccgtctcttaggattcgaatgtatcattacatttgtccaacacccacttggtcacaagcacataatgggacctcttatgttagaattgagtctcatcagtgacagagttgaccctggtaagcagagggaagcttgggaattgaaaagccccatcaaacacaaggtagctttattcttttccttcccctgaacccattgtatccctaaggtattttgtattgctgcgtcagagaaagcaagatgagcactaactcggtttgttttttctttctttctcttctgcgccagtatcactagaaccttcgcatcagggaaaacagaaaaggtgatctttcaagccctcaaggaactaggtcttcccagtggaaaggtattgactaacttaaacacatttctgaatctgttttcatggttggttgtctgtgcaggcatatgtgctaagccaggtgacggttaagctgacctcagtttgtcagtcacacggagggcagatcactttctttctttccgttcgtcaatcacttgagaagtgttttaaaatccagctagttcacttcaaactgatctttgtcaactttattaagctaagaaaaagaaaggacgggcagctgtcctctgtacagtttatggaacctgtttagaacacccagccgtgctgccttaccaagcagagcagcagcatgaattattgactaagaaattcagtttctccagaaagccttgcacaatttcgtgaaggattcctctccctcccacacatttatactcatgacacttcgtattcaagtcattaaaattagtttttacactgcaagcaagacttacgcctctgactctgtttaaaagtcttgtttgtaaattgcattgcagtgtgatgggtaaattattggttgttccagtacctttagaggatcccttgtgatcctctaaatattcacaaaataaatgtacttaaatattcggcctgattatcccatatcctctataggagcacttcctttccttcctcaaggagagatagaaaaatgtctgtgtacttggtcaatgaggggtttcccagagaaagctgtgctgcaggcaggtatcaccaagtgtcccatgtatcacccattccatggtgacaaccagggaagcctaacttcacatgctgtggttgtcctaaatgtccatctcaagtctcccaggagaaagatgtttgtttgttttttaaatgcctgtcgttcttttattctccacagaatgatgaaattgaacctgctgcatttacttatgaaaagttctatgaactgacacaaaagatttgtcctcggacagatatagaagatctttttaaaaaaatgtaagttctagttatgagaaagtgtcatatagtacttgttattttgtccctgtaaaatttgaaacattttttttgctgtaatgtttaaatatatgttgctagcgttaggcctagtcagggttacatttttcaccccttaatttattggcgtagaagcccattgtgagttttttagaaaacttgacatagattaattacagcacttggaacatccccctcccccacccctgcattggctttactaacgacctacaattttaacctgctcctttaggtattaacccagtatgtgaactaactagatttggttcggaatgctgttgagaagttcattcattccagttatttcaaatggatgacttacatgttgtttttggaggaatgtctcttgataatgctaaagaattgcatagagcagtcactttctgtgacctcgtgggaatgttatctttccgctatcattgtccttgagttcctcgcacccacccctcccccccctccactacagtctctgactactctaagaattcagggttagaaaaggagtttagaattatcaacaaatgtcaacatgtaaatcgtacctactgtacatcatattcaaaaacttactttttctaatacatttcttttcagcaatggagacaaaactgattatttaacggtagaccaattagtgagctttctaaacgaagtaagctttttcatacattaactccatcagtctgtgtgcagtggcttgcctcccccgtgtcctcactgcatgctggcctcacgcaccctttcctggctcggcttctgacctgctgatctttccatggtggcttgaccaggtgcaaaaatcagctcctgtctgtgcgtccatgtgcttcctccaggctggctttgcacacctcctgttggtctcacgctgtggttctgtgtgtacgtgtgaaatttgtgatgtatttattcagttgaatgtgtctgatattgcaagatggtttttaagatagtttgattctgttgatctcgtgaacagagaatggattgagtttgtgacactaaatttggattctccattgctaacttttctcatacctttgcatgacctggaaacctgtattttttttttttttgccttttaatagattgcatgtaagaaaaatacataggtttaaattgaatatttgacacttgagcccctagataaaactatagtgttaggccaactagattgcaggttaaaattttatgtattattttcaaaacaagctcagagctgaatttagaccacgattcatttagcaactaaaactggctagcagcgtttgcttaagaacaaggaagatatttcagaacaggtaaaggtcgaaactttcattattataactaaaacgagacttttcttctcatgtgcaaaaaatacattttcgcaaaacccacagaggctcttttttttttgtctgaaaaaagaaattcacctttcccctgaaacacataagtagttagaaaagtttaactatggagtagacagtacagtcttgtctggaaagcatttaagttctaactaggggatctaaagagaaaggtggtaggagaggttgagaggcctctcggtgtggtaggacatacatagcatacaagagttcaatccctagccaagagacagggaagttagcatcacgttagacaccacctagtgccttagaggaaagaatgggcagtccctgacttgccgccttacaggaacaaatgacatctttttcaaaggactcctcttcatgatttctgcaggctcacctgcttccagtgtatgaggctacacaccaggaactgttaccccgaacataaatgcactgagacaagaaacagagggggtccatatatgcacacagatgcctccaccccccaggggatccgttcagggcagtactgttttgattttactcaaagctgttttaagtctttccggttcactgcaccttgggcatcgaacgctgtgtttgtacacaatctttacccagatcttatccacatacttggcacatttctcactctctttccttaaccctctgcctcctccccttctttctctgttgcctgtttttcctttcaagtggggggaccagcaggaacccagcttccgaggaggtggaagatgctttgggacagaggagaaaactttaccatgccatcagttcatcatcccttcctaagccagccatcttcctagatagaagctcgtgctttctgactgtattttgcgttgtagtccaggaccagttctgaagtcccaaggacaggtgctgctcttgcaggctcctgcaggcttcatttcctctcacagatggttttcctttgtctgcctaataataaattttataatattgaaagaatttagtttttttatttgtaaaccctataagcttttatttttaattggacaatttaaaggaaacataccattctggctctgccatccatattcttcattatgaggcaggtctttccccatcactggtccagtggacagccatacctgtgttcttcatatttcctcccatgtagcttcagcaagcaaggagatactttgactgtgtggatgagactgatggaatggacatgtttctagatttctgcagattgtagtatatgccttttaagtttatgccgtgggatttcaatcatagcatcgtctccaaagacctctttcttctcccaacagcagtccctcgtccccaccccttgccagcttcttgcacattctatgtgcagttctacttttatcttgttaacgtctccagagtcaagacagcgtttggcagggcagattcacgtcttgtaacgcaaggacacagggctcatcaggaaatcaagagggagtggaacatgaaggtctgtgaccctaaaaaataattagacctcgacattttctaagtatctcagccttgtagccttagtaggcagtttcactgctgcctgggactcagcctcatgcagaaagacaagagtaagtgaggcccacctgaaaggaggccctggcctccatatacgcagaatttagagcagattgttatacctcgatgacagaaacagtcagcttggaaacccattcagtcaactagagaaccagttatagcaacagcaaaaatcaataggtgcagatacaacaaggtcaataggctagaattgactggggaaaaagaaatctccttcccattaaccagtgacacaatggctcctaccatcttgcagcctgaagtcttgttccttctttgtaaatttctgtttagtatactcatctcctaccttcaagagacaggagggagggaaagattcagtcctttacttggttgccgagtaccttatgtgccccctcctctgtcagtgatagctttggattcatttctcatctgctttccagggcctcttgctcatagaatgccgcagtctgattccccagacaggtatcattagcatctcctagtagtccactaacaatgcacacacactgagttggtagttgtcccttaacaaggtggtccaggtaatgtgtgcacatggaggtttatgcagcactgtctaagctaacaggattcttctttgaggtgcttatttgagtgggagagaagctgagcatcatgcatgcctacatacatgcatacatacatatacatacatacatacatacatacatacatacattacggtattccccataaagaatttagtcagccaagttcactactcacatctaaacttctcctatcactctgcctctgggttctgtacagtggccaaagggaatctttcttgcccacatcatgaactaacaggctggagtcaagaagagccagtggaagcacatgctgggagctgccagggttgggttctcctcgaagctcagttgtaattcccaggactagtcgccatctctgggatcagttggtttcatattcttttcccggttgctaatgagatacattgattttagtatcacctccatttctgtttcacttgtctcacagaacagctaagggcttgtagaacggagggctgtgtagagagcgtgaaacaagcaaaatgaggaagagggaatgggcctcctatggtgagagcaataaaaacaaagctttgttttcttacctctggttacctacgccctcacacacatcaccacatcatctgatcaccatagcactaaagctgatttttccattttccatttttatagttggaaataggtaagaaagcaccccaaatctctttctctttatgatatctttatttttttatgaaaagggagaagagagagaaagaggggagggtatttcattctatgagtgaaccaatccttgctgatttttattttcaccttttatataatttttgaaatgatatcatttatattgtatatcgttctattatatcatcatctatccttcccagtgcacttgtaataaggtcagttgacaccttttctcagtgaggctaaggacagaggtgtggagactgtccctaatagatctcatttacctgggcacagttttctgtgacctactcttaacagctatttagaacctcattttgcaaagcactgggtaccaggaagtgaaaatcctgggcatgttgtttatctgactggaagctgatgttatctcagagctgtgaagaacagggcctcactgtgcttgtttctaactagaactcctctgcatataatgttactctgaatatgatatgatatgatatgatacgatagatatgatatgatatatgatttgatgtaatatatgcagcattggtccttactctgatgcagtgatgaaaaccttaccatttgtttccctgcctctcagttattcagagggaccatgctatgttgccttttaaaatgtgaaaatttgggggaaagaaaagattctattatttggctgagcaggtcgaaatggagttttatttttgtctgcacttaaagctcttttgctaagactgtatccattaggtagcaaatactgatatgtgctgtgttccctggctatccagtctgctatatggatggtctaatgagtatgatgtcctctaatgacattttaatggataaagctttattaggtacacaggtcaaatgattagtcctaccttgcagaacttaagtatttgggatattttgttttagtttggtttgttttttgcttttgttgtcatggatatacaagtgtattaaaatgcatgtggttacaggttaaagcaatgctttttggttccgttctttctttccttttattttttgagacagggtctcatattggctgttctccaactcactacatagcataggatgcccttcaactcccgatcctcctgcctctgctttccaagtgctgcaattacagacaagtatcaccacagctgatcagtgcagtactggagattaagcccacagggctgggcaaacactctatccattgagacacacctcctatcttagagcagtgctgcttaaaatgaacaagataggatcacctggaaagcatactagccctcctctaccccaaataaggcctggtttcacccacgaatcagtgtcagtagatctgaggagaagcccccagaggctacattctttaaaatcacccacatgatcagaatgctgctggtgccaggcacagagaatattttaagtagcgccatgtttgtatgttcccctgtgtataaaacacccagatatgtctgaattcccttcctttttccccgttgccatatattttctctctcgtggctatattcccattttacctcccacatggatttgctccatcatttctcttaaggtccaaacgctcaacagtgattatgacctaattttcctaggaaagatagagaggatagctctgtgtgcaaccatgccggggtgtgaaagaaccctagccatcccttatcggtcttctttagtgctattgtttatgaggaaagaatgatttctagcgagtggttgaggttctatttctttgaatgtgtttaaatgattcttctcaccccagggtgggttcttatccccctgaatactggagcgtgccgcatggtgcagctccttcaagggtgcagcatgtcttcacttgcctggcagcctcctgatcacatcagtctctctttctctgcagaactcagcagcattctctccagaaccaaggcctgctgttgttagtataatagtttccaacatatacatagcttaatcaataattttttgttattacaaaagaagcatgcttcttcttgatagtctgtcaaaagatttcatccctttaacacccctaactaaacaggacaaggagacgtctagacacatctttgttttagcagttaagaccaagtgttccatgggctgaaggtgttgtcctgtacatagtcctcctttccgaacctgtaacagctgcttctaagtgtcttcctaataatattgcaaagtctgtgcatgcatctgggtaaagagttgttgccaaaatactatttgttgagcaattcttgctcatatctgctaattgtcattcttccacaaaagtttgtttttactcctttgagggataatcatggacacaatgcaatcctgtcattctctgaagtataaggaagtatagtggaccctctatttccagacatgtgccatgacatgtgagcatatgaacatacacacacacacacatacacacacaaacacaagcacacacacctgtgcaggcacatacatgcaagcacacacatacatgcacacacacatgcaggtacacacacctgtgcaggcacatacatgtaggtgcataccatgcacatgtgctcatacacacacacacacacatacacacacacacacacacacacttaaatagtgattgggtttctcacaattctaggaagttggggtgaaagaaatgtgttgctcctgtaacacaagaaacatcttgtgtgctggttaggaaaggttgctgtcagcagcttctgccagagccttcttccatacactgcacttggagtcctagagtaaagtgtgttcagctttagagtgaagatgttctgcaccattgctttttaatttcaaggtttttaaaaaatataatatacacttataagtgttatgtgcttattaattttcattattacaaccataattttttggaaaacactggactcaagaaaattaagtttgcagggtattcaagaacctctcattgttagcaaaagacagattaaaaactatttacttattctgtcattaagagattttgctaatactgttttggagttttgggcctctcagtgcatgatcttgttgcttattttaatttttttcactttttaaaattagatttaatactaaacttttacatattgtaaagattcgttgctctcatttttacacatatttgtagcaagtcacatccctataccacagccatgtgaatcgtagaagtagaagccagtgcagctgacattctctgtcatgtgtccctcagcatttaaacaggagaaaagcacacatctctttcttctctgccaggctccatcagagtaagttcagatatggactttctgaagactaggttagggagagagtcaggaaggcagctaagcctgatcttggtgattataaatacaatagtctagatgtaccttgttttacaaattatatgcttagaaatatgtttcaagtatgagggttatagatctaaatggacttattttgtcatcacagcatcagcgagatcctcggctgaatgaaattttattcccattttatgatgctaaaagagcaatgcagatcattgaaatgtatgagcctgatgaagagctgaagaaaaaaggtaacatcaatggaaaactttaattcaattttgtttttgttaagacagaaaaagtgcacaggctttaaaacccttgaattttaattaaaatatcttaaatgctttcgagcactgaagattcaaagatttgtaatttatttattcttttcctgctcttaaattaattcaatctgtatattttatcaagcgagtccacactgtctgaagtacactactactgaatatatcatgttgttaagcacagtccctgtacatgcttaaaaatcaagttttaattttgcatagtgtgcaaagacagtctctctgcagttttcgaaagaatttctgtcacataagaatctgcacctttcttttctcccttttgttttgctaagcttaataaatttagtacgtaatgtgaggtgctctagaattcctagaattgtgagcttgggttgcaagattaaaaacactgatagaaaattaactagtcaggaaacatgtccataagttgttcatatccctggacctttgtccctttcattttattttggaaacaatatgttgttcaaatattagtcaaaggaaaaatgtggagaagacttcgggtcatccctgcagcaggggcatgcatgcctgcgaccctggcatgtggaagtaggaagcaagcaccattgctcttgctttgagcagctttgtcttatcattgtgaccaggatacctgacaggagcaactcagtgggggaaaaggatttcatttggatcatattttgaggaaattttcatctgccatggcaggaaggcatggtgtcatggtgtgagacacctggtcacattatagcaggactaacaagcagaagcatccagatcccagagatgcccccagtgacctacctcagctagtctgttcagtaacctttgaaacagtgccacctactggcgatgaggtgtcccaacagatccacctgtgagggatatttcacattcaaactgtaacactgggaattcaaacatgagtaagcacccccctcccaaggcagttgtagtttgttcagagcaaagacaagtggaacagttccttggcagtgtgataatgttatgatttacgtatgtctttgttactgctcaagatctatcaagacctaaagtctaattataactggcaccacctaaaaacatagcttctccctttcacaagtgacagaaaattaaagcctgtcttaacttggtcagtgtaagaacacagcacaaaattctttcctcataggaggttaaatacatacattgggattgggacagtagctcataaaatagaaaacgtgcctctctgctagctcagcatttccacatgcaggtatgtaccctagagaatctctcatactcaattctagacctcagattcttcactgcctctgcttgaagaaggggtggtctgcaggccagtagcttttgttatcttctgtatacatgtgactttgagagtaaaccctccagtcctaacctctaccgtataccaaggcctttccatctgcacgttgtaaggggatgtttgcagcacgctttgatttccctgtacccagccttcttcctttcccagcctataaaatgccaccctgctcacttagctttccaagccagaaccccgtagttttgaattctttcacatcacgtatgatctttcaggaaaactcatgagatccacttctttgttctcagcttctcagatgctcaggcctacagtgcctctcatgggcaatgctaattgccttctgatttatcccctgaccccttatccagtactatacgtcacacagcagccagagtaagccttttagaacactatttgctggtatcattgaactcttccatcccaccaaagcttcccagcacacttggaataaaatctcaagtgcttaggaccaaaaactggtgaatgtggcctttggcttcctctccagcatcattgcccaccactttcctaagatgtcgctctctctaccctacattcattgaatagatcgagaacacacacttctgcatcaagatctccgcatttgctcattcttctgcctgaaatccctgctcctgcttgtgtggtttgtccccttactcatgtgtgtccttatgatctcactggacacatatccaaaccaggatcctagtattcttttgtagctttcatcttgcaggctttgtcccttcgatacttttaaggcattatttgctcatatatttattgctcttacccataatatgttagttttgtaaaactggaatatgtatctgttttctgcatctataccagtgtgtcaaaagtatttggtgttagaatgaacgaacactctcttatgcgatcagtggagctcttctgtaggtgtgaaactgttttcataacttgcaaatggtgacatgaagatacaaagggctgaggctgccagcgcttgtgaaacattggttattcgttctgtgcttgccatgtagccttgccccattttagaaaagagtgactgaagtgagaggtgccctgtatctcaggaatgtttctcaccagctctacaggttacctccagacagttgtgaaaattacgttgttgaattttggagaggcagccattcccaggaaaggtccctcctttgaatgaatgaaaattccagtgacttagaattaatgccacacatcctacaggtattctcaagttaccagtcctggaggtaggtgagctagcattctctctatttttcaggagaaaccaggagacaggcagcgaaaggcaggtggtcatagcagagccagaggctcccaggtccctcctcaccatggttcctagcacagtttcttcatttgcaggactggaaacatctgctgctactgatatgaaaggagaatatttatagactgccttggtttgcttgtaatatgtaatcgtgtattgtttaagttctgaaaggtacgggttcttgggaaggaccatgaagttgcttctgctcttatttttaagctgtcacaactaggctgagcaaaatgtaagatgtgcatcttcagacacccagtgtcattaagatctcctttcttcctaggcctcatatccagtgatggattctgcagatatctgatgtcagatgaaaatgcccctgtcttcttagatcgcttagaactttaccaggagatggaccacccgctggctcattacttcatcagttcctcccacaacacctatctcactggccggcaatttggaggaaagtcttcagtggaaatgtacagacaagttctcctggctggttgcaggtctggaaatcaagatggcaatttgctttgtttgtatatggcacctgtagatttatagttgtcctccccttatcccttggatccccagtgttccaagatggccagaggatctgcaaagcaatggctcatacctaattctatatatctacaccccatccctatatatcaataaatatgatgaagttctatttacaaattaggcacagagatagtttagcaacaccgatattaaaatttgcccaaggatatactgtgataatatcggcagcttcactgcctttcaccttggggctgctattatgaaaggaagggttccttgaacaagcactatagttctacaatattgtgaaacagggaaggccactactggctgacaggtggtagtgaatacagcgtgatgtgctgggccctgcacggatgctgttcataggcaagatgctcagcggcctgtgccaccccatgactcacttggtgtttacgttaaatgtagaagttgcttatttctagaactgtgcatccaatattctccaaccaatgttgaccgtagttaactgaacacaggtgagggaaggctcttttaatttacttttctcaaaagtcagaaatagtaatcatcatgaaaaggctctctacatttttctttaacagattatcttcatttaactttaagtgggaacaaacaatatcacacgaaggacccagttatcctaggagtcaaaagacactaatttactatgattttaaaatatgacctcaaaaatcttaaaaccagtaaagatagatattttaagaatccatattaagttgtatatacccatatttaatnnnnnnnnnnnnnnnnnnnnnnnnnnnnnnnnnnnnnnnnnnnnnnnnntggtggggtatttgcttagcctgtgcaggtctttaataaaatccctaccactgcccaaaaatacaaaaatcacatttatcaaaaaaaaaatgtgtcttctgattataaagctcggaagtttagttctctgaggggaggacactgaaagtgatttttatagcaataaacaaataattaaggttgaagtggtgaaaaaaaataagaaatataattgtatttttttggaaattttttttaaggcttgctatgttttgtgtctggaagtgatgcaagagagaataactccatccttacttcattgatgagctttgtcggaatacctgtgtgtgaaccctaaaacagcatgatcatttgtttcttgcttggctttaggcacggagatgggagccccaagcctgctaagcaagggcttgactgagttatggcccaggatttcgcttcactttttattttgagaaagaatctcacttacttgccctcgttggccttacaatctcaagacactggaattgtccattttctcccccaaggtcttttcagtgatgctaacccgggcattaaaatgtagttttgacctgcatacccatgagatacccatgttacacactcagctttctgacctgtaagatgccccttattttgatgcctcttggacttagtgtgtggtttcctgttacgggctcagtgttgtaatctgactgactgtgttcctaggtgtgttgaacttgactgttgggatggaaaaggtgaagatcaggaaccgataataactcacggaaaagcaatgtgtacagacatcctttttaaggtgggttttaagtgttcacaatcatagctttcccagacttttgaacaaatgcaggaaacaagaaaacaatttttttcattttcccaaacaatgtaccttcacatttctttttctctctttttaaggagaaagtcaagacaggtattattcgttgtataatattcccttcatggtcttgtttgcaaatgataactataatgcacagagatcctttagcagagtctacctagttctagcccaatacaattaatttttggcccagttgggtacatacagcctagctactcgagatgctgaagtagggagattgcttgagtttaggatttcaaggctagcatggaagacacaacgagaaatttcctcaaattaaaatcaacaaaacattttttatcttacctatctatttgcttgtccactttctgttattcctgagagactccaaggtagcataaaaagataaacaaagcttatacatagccttataataaggagacagtgaggttggcattgtgaatgattgttaggaaatattagaaatatggaaactttaccacaaaccaagctctacactttcaaaggatttagagccaagaagaaaacatgattcctaggaccagcagtaagcatggtcatttcagtaccaaggccagtgagaagttccccactgaagcttcccacctaaagttaaatagttaataaacaaggcatctcatgggatctttgggtggtgtctacatgtgatttgaaggctagtttcttagtgtgttcttccacatatccatagtattccaccaaagctaagaaaatgtgtggtaggctgatgtcagaaacatccatgcctgctggtttgcacagtctaggatagatggtgacgatgtctgaaacaatggccctgagctctggtgactactcaaatcaccaaggtgtctttcaaaccagagatgcctcaattctgtacatggaatgttccatccatatcatgtttcttagacaaggtatttgtgactttcagtcagcaacaattcaagatcatgatttctaaggagagttagggtgcattcaagtgagcaggtatgagttcatacagttatcaaatgacaaaaccagaaatgtcctcctacaagaactaaggagatcagtcaggacacagcatgggaaagaatcacccagaaggaaagcagactgcaagggcaaagccagagtttttctcaagtgaaaattctggaacatttactaggcaattaagtgtgtggtcatttttacctgtgaataaactttaagaaataacaattaaatgactgattcaataggatattttcaagtttgtcattttatccgccctgccatggataattattgtagaaacattttctgacttgctgaggagtgacgatgcttgccctgtggttagctacagaccagtaagaacttgtagatttatagtgtgagagtgtgattatagaagctttggttcgaagtccctttctctaaaataatcatgagggctaaccctcagattcatcttgtctatgtcataagatacaagttatggggaagtgtcagcccatttggaagtaggcagggatataaaagtgaagtcagagcccatgcctgttttacctcacatgtgacctgaatacagaggagacccacttttcactcggctcaccggaaacaatggatattgcagctgtcatagcagtacagtaggtcaacaaagaacggcgggcacagacataggccaagatgattccaaactcggaggaaggacagttagaagcttccagaaatccttgtgttactaccagcacatttctccagaagagtgagttgaagaatagactgtcatgaaaatgcctgtacaaagcttacgctcgcctcgaggagagtgatgcgggccaatggcgtggctttgtggttgagcacatccttcaaggctctgcattcaaagtgctacacaaaagggggcaagaggagccagagtccctggctctgcgcattgtcaagtgagaaccagcaggccactcaagtaatgtcacttaataaatagcactggagaaatagaagagagctttgactgaaaagcaatgtcctaaacctcttgagtccccccaggaggggtgtctaggcagacgtgttctccaggtcagaactgttaaagctgactttctgaaacgctcagttagtgggctgtgaacggtgtcaggtgccttaagtctgtctgctcttttctttcataaacactctttgtcgttaaaggatgtaatccaggccatcaaggaaacggcgtttgtcacatcagaataccctgtcattctctccttcgaaaaccactgcaggtataaaggctccttcttttccacgtccctccttggtggtgtttcagatccctcactcttcgtcctgctgttcattatttcttttaactaactgagtagtttgctgtccgatgtgctaagtcgcaagtcaccctccagtgaggacacagtcattcccaccctgtctaccaagaagtcatcttcatgtgactcagtaatgctttccctgaacaaaaggccagaaattaggggacacctagtctaaagttcctttgagatggaaaatttggcaataacttggaatgcatccttaggctttttttttttttaaatttaaagttgtaccaattaaagtctgtacactgtattacaagtatagctccagttaatgctataaagacagccctgcactttgtaaagcagaggagtctagttgtcagaatggatgtctctctttcttggagagctaatggacacttgagtttacaaatgccacttctttctccccagcaaatatcaacagtacaagatgtccaagtattgtgaagatctatttggggatctcctgttgaaacaagcacttgagtcgcatccagtacgtatttttagcaaaccagagttccagcatgaatggatttgttttgaaatgtgtttttcaggggtcaagtagcactggaggctgaatactaaggattttcatatttatttagattctctggtacaaaaagcttttatcgtgcttcagagggatgtagagaggaacacaaagtaaacatctgacttggtttaatccggctgctctcaggacctcgtgttttatgtttcataaagcttccaagccaagagtccaggcccctccgtgcgtcccagtgtccattgcattctgagtcacttcagatacccgtaaaagcacctgcactagggccccacctacaccggttcggttctgattgacccagggtcataagcaggtgcatgatttaagtcctccaggtgaacaaatgtgtgcccagggttcaacactcatgggagcccgtcgctgtgggaaaagctccagactgatgtcctaagacacagaggtcaagttcccaactccaaagtaaatactcaggcaaagtcacatgaccgtttttgaacttcattatatacctgccaggttgttcattaagcacttgttattaaagtccgtggtccataggagggctttatggagtctgaatgcatttgtaagcgttccagagaattccttggatttctgtcaggatccctaacatccaagaggatgagatgcactgtggcaaggtgttacgagaagcaaggcttgctaaaattaaagtgctctattaggctgttcagccttcctgtgactatggtagcattcgacaaaaggagaggggcaggaaagtccatgcatgacaagagggtgtttgctacgtgaatgacttggctgctctaaccgtggatttttcccaaaggtgtgtgtggcagcagaaagcgcatggaggccaggctgcatcctttgctctctgctgcctgctgaagcactggggcagctgcactccccgcactccctctttcctccacacttggcctgactgttggctgccagtgcctatggctctctgtggaatatgacctctagtcagtggtcaggctccgatcacatgagagacaggccggacggggtctgagaatgaactcccccacaaatcccctcactcggtgttcctaagggctatttctgagcacctgttctcttctgacccttgggatccccagctagattccctgtttgccaccctggggtgccccagtgataacatctgaattacatccttcactggccgtctcctcctttctcttgcttctccacctctctgttgacctgtgcaggaaccggcttaaacttgtgatgtgttagttcttgtctaggaagatgactctgagggattctgtccaaagaagcatccttgatttattttattgctgtggtttccttagccttctgttctcttgggtaagagaggagacttgatatttgcaaaggccattgtgtttgtcttaattaactaaataattaatgtgcatcccaaatgctgctcatcccccaggtccctccctcacagagtcccttcccttctcctctgagaaggtgggacccgctgggtaccccccaaccctggaagtctctgccagattagacacatcatctgccactgaggccagaccaggcagccatgaagactgaatgttctttggttggtggctcagactctgagagctcacagggggccaggtttgctgactctgtagggtttgcatccccttcagggccttcagtccttaaccccaactctcccataagtgtccctgacctttgtgtaatgcttggctgttggtatctgcatctctttcagctgggtaaagcctcccagaggacaattatgctagactcctgtctacaaggataacagagtgtcattaatagtgtcaggagctggttcttgcccataggatgggttttaagttgagccagttattggttggcctttcctttggtttctgctccatccttgcatttcttttagacaggacaaattttgggtcaaaagttttctggattagttggtgtccttatccctccactggggggtcctccaggcctcttcaggttccatatccccactgttaggcatctcagctaaggtcaccagcattgactactatcccaggtctctaggacttcctagacatcccatttccatttattctctggcctctctcctatctctcactacacctgatcctaaccacccatccctctctcccacccagttccctccgtccctctgcctcctatgactattttgtttccccttgtaagtgtgatttttttttttttgtgaagggacgtacacattcccagggaagggaccagtgccaccaggcagcctgcagcaggcagccgtcagttaaaagtcctaagaagtcaatgcatagacttgcttctgaaacatagggtaaagtaatgagttgtgagataaatggttgtgtggaaagatgcataggtaagagcgtgtggctaatagctgggtggatggggagtgaataggtagacagaggccagtcccactgatcacagaaaatgacctaaacagacttaacttcctgtaaagtacaaacatgacaccacagcgaagttcagattctagccattcaaaactctcccatgtttagagaacccataaaaatcccacgtcagtctggtgagaagagaggcttagtctgtgacctgctgcagacgcaggggcgatctgaggccattcaagtgctttatgatggacctgagatgtgaaaagcccaccatacagcaggactgccacccccagcccctctcaggtcagaccctactctactagggagcttggatccatctgtataccccagaagactgggggtgctccagctttacagcattgtttaaattaaagttgaattcagtgagctaatgagcattgggcagaagcagagctgtgcacactgccatctagtggatgctggctggtatgactcccggcccctggggctcttccgctccggaatcgagcatgaagtccctacctaactgagctctttctatatatctctagcttgaaccaggaaggcccttgccgtctcctaatgacctcaaaagaaaaatactcatcaagaataagaggctgaagcctgaagttgaaaagagtaagtcagttgcacatgtggcttttgagcagttcggctgtctagatgaaatctgatttagaacagatttgggaaaggaatggtggaatgcagatagtacatttatcttccagcgttattccactacattcccattaatccttagttcttacaactggtccattcagtggaaaccctccatgtgtttacgtgcaaaaaatacagaaggaaaaagggtttgtactgctacatacattgccacggttttgttcataaaagataaattaatttacgctcacattggaaacatctcagtgttgtaaggccggggaagcggctccagggttaaacgctcaccgtgcatgcgtgaggatctgagtctgatcaacgagaatccacacgcttaacctgaacacccgtgatgcccctaaagacggaaggggaagacagagagtttctcacacttcctaagcgatctagcatctgttctcatctccgtgtgtgatgatacttacagaacagcttgaagctttgaaaagcatgatggaagctggagagtcagccgccccagctagcatcttggaagacgacaatgaagaggaaatagaaagtggtgagttgtggggccggggaagaaggctgcatgggtaaaatgctcgccgtgcaggcgtgcagattataatctgaatacccagaatccacatgcttaacacgaacacctgcaatgcccgtgaagatgggaggaggagatagaagaatttctttaagtccatgagccagctagtttggcaaaagcactagaaaccaccatgagagccagcctcaaaacaagatgggaggtgatgcctgacaaccaaggttgtcctctgatctccatgtgtgcactgtggacatatactcactgtctttcacatactctcattggcacacataaacgtatgccacagacatcacacacacacacacacacacacacacacacacacacacactcactcactccccgcacacacactcatacacacacacacacacacacactcctgcacagacacgtacacacactcacactccccgcacacacactcatacacacacacattcctgaacacatacacactcctacacacacacacacacacacacacacacatacacacttctgcacacacaaagagttatgagatgtcattttaaggtacaagtttttaaaagggttatattggaaataagaaaaacattaatctctcttaacaaactcctttgactagcaatgactttatcttgctaaatatttaggagtacttcatcttttgagggaatggcatttttatagatactgttatttccattttatctgagcactggatgttagtggcttagctgtctcccttcccattgtgaactgagcccttcagaaaagatttccagtcagagactcggcctttaatcacttgctgtattaggcaggagttgaagagaatttttgaaaggtccactctataatcctttatgttttgtaaagaaaaacatgaatgtcagttttgttactgatagtaataagacatgtgataagagaagcgagtgaagtgattgactgatgctcataaagtgaacttgagagtcaaagcctatattgcaattttgttaagcctgggtgtagctcagtgatatagcacaggtttaacctgcatgaggccttctcaaccagggtccctggaagccttactgaaaatatgaatattgaccatcacctatttagcctctcaatatagccagccatgatgtgctgtttaaaattggtgctggggttgtaacgcgatagcatatttgcctagtctgagcaaagccctcggttcggttctctgcactgaaaaataataatatactacttagtaataatagtcacaagtgggccatttgaaagtttggggatgttttcagatcgtgatctcctggccatgtatcctgagaattacctggccaggtgattggaacttgcattgctttatggaaccatggtgcacagactgacttaagactaattacttgtagaaattttcttattactcacacatatggactatgtctgattttagactaggtacataggtgaaacccaaaagctatgagagttacctaattttactcactgtctcttattgaagaccctcactgtgggagagattccattaagaaacaagccaagtttccatagggtttaacttcaatctcagagaaaaaaccatagcgtttggcttccttgtgtttctctgtgcctagtgggatctaaatgaccaaagatctctggtattattcagttagttcctataatgtttgtgccttattacataatgcaccatccacatttggaggcagaaatctgtggtgatttataattacctctcaggattttgtgagcaactggggtttatttggctagttcttgagtttttttttaatacagttgctagcaggtggacatctggagtcggcatctttttaagatttgtagacaatttagacaagattgctctctagtttaaccatctgtggagctcagctgggtcattgtagcagagcatcccctgtggcctctgtgtaatttcagcatctcacaacatttgctaagttataccatccaagaacccgggccctagatgcaggaagtaggagctgttacgttatttaagaactatgaacacttcatctctattttgttcatcgacgcagtgagtggcagatcagatatcagttcagctatctttggatgtataatatgtaaccattagatttttcagatttaaaaaaaatacaaaatatttaagaataatatatatatatatatatatatatatatatatattaagaaaataagcgctctcattctccagtgcccctgaagcttaaagatatccggtagtttgtacacaatcccttagttataagacagtgtgaggcatccggcatttagtagcaaagttaaatataactgtgagtgctctatggacttgtgtgtgctcaggaaatgctaacatatattcagatactctgtataagtcctagttactaagtatctaccaggaatatacggtttacgcctaaataatcaggttagactacttatgcaggtacccattatccaaaatacttggccggagaagtagttctgatctcaagatttttctacatttaatttttttaatttcataatctgtggcccaccctgctgagccctggaaaaccaggcttctgggtgactgctcttacccccaagctcacattttctgattcctagctatttcatagattaccaattgagtatccctaatacaaaaatgtgatatccaaaataccgtgaaatctgaaactccttgtttgttaccacaatgatcacacagcttaggattttggaacactctggttttttgactttcaaattcaagataatcaactgtgtatgaaacagacactgtagaggtggtgcgtggtctcccggtcctggttatgtgcgtaggtcatatgaaccttctctcgagttctcttaaggttatgggcagggtcttatttagcctcatgaattttctttctatctgttaagcagctgatcaagaggaagaagcccaccctgaatacaaatttggaaatgaactttctgccgatgactacagtcacaaggaagcggttgcaaacagcgtcaagaaggtctgaggcattgtattcccattcttaaatggtttttaaggggtggcagttattgtgggaaatttggggctgtgacaacaagagaaccaggtattgtgtttttctcttaattatataggacaaaattctctgctgtgggaccagaatttgacactctcacaatattaagtttcagaggacctataaattactcattaattgtaccctctaagggtcactacccaattgggcaggtacttttaaatatcaccgtttatagtagtagagctgacaaggagagacgcagtatcgcagggccaaaggttaccctgctggcatcattaggaaactgccttctggatgtgtcaggtgaagcctcggtacagagctggtccagctggcaagaaaagcatccgcctagcaaaaggatgaaaaagtccagccattcagccaaggaaagttgtcattgggttcctagaacttgtcaggcccagcttaggatgcactttcattttgccttttgttagcttctacgggtctcctacagttcaggagaacagatgggaaacacggagtaaaagagtcaaggaagcctataattcaattgtggctcgaactattatgacaataaaaatgagtgctaaagtggagaccaggagagaacagggcgactggaataaggaagagagggactcactatgcagagaaacagagaataacatttcataccacaggaccgcagtaagagcagagatggcgtgagtggagcagatgggatgattgaagggtgaagcaaggtgatatgtgtcaggtggaaatgaggtaattgagaagtttctatgagaaattaaaaatgagggtgtaacatgacctgtttcacataaaactaagtggggagagggtatcatagaagactgtggcgggccctttgtggcctctcacctagaggaaagtaaaggcaaaagtgtggaaaacagtgagagtgggcttttaactggtcagaagcagccctggtggttagagagtaaagagggaggagatagaagagtccaaggcatagcaagggcacaggcaatggtacagtttcccgatgatggactgaacttcgtgaaggtaaggagaaacaaggtaacctcctggaatccttgttggaggagcagggtaggcagtggtactgttgactggggtgggaaacaatgagaaaggactctgaagtttccagtgagacaggcaactggagaggtctgtaagctgttccagtggacgttccgaggagggacattgatccctgacctcttgttctatctaaccttgggtaagttatttaacctctccccgattttgcttccccatcttgaaaacgaaggtcataatgtctgtttcatcaggttctcatcacagagcaaaagagcttacatcggcgccgtccacacggcagccgctgtatagtagcaggtctgctatgctctcattactttcatcctcattatcacggtcgtcagcactcatacaacagcactggtgtgtagaaaggaggttgagcaagagcagtgagttcgagagataatgtttgaagtcgtgggaattgcttagatgactcacgagaggtagaaaagaaggcccgtgtggagccctaatccatagagggctcacgggagaggagccaggaggaaagagcaaaggctttgccagcagccacaccgaagagaacaggacagttaggggctttggataagaagacctgtgtccactaggttagtagcatggaggtcagtgggatagggaagttttgggagagcacttggaggaaaggaagtggcgggacagacaggcagagaggatgaggaattgtttccgtcttgaactggaagaatcaagtgcgctgatatccgagatgtgagatgtggaacggatgctcttttcaacctggctgatgtctcctgctctggaaagaaagccactggtgtggtgagactagacgagatcatagcaatgtcagggtgtggtcgttagtgaagtagggacgcctgctttgtgaggatgatggacagagatgcaggtacaaaggtttgatggcagaaggataggagattatttgtctgggagaaaagtcaaagaaatgttatcatttctgatgacagggaatcctgagtgccatgagagagcagatgcccactaagactcaggatgctgctgtgctccacaaagtactcagcagtactgtctcaggcggggctggcatgacagaaatagcagacttgctggttcagataccaaaaatgtatttcctgatgatctctgggatggatgtcaaggtcaaggtgccagtcaatatgttccagaaatctcttttagcaggtacattgtcccatagtggaaagaaaatgggaaagtaagatttttcttatttcttcttctaagaggactaacctcaccatgaggattcacctatgacctgattacttcctgcaagccccttctccaagtttggataagccttgccttacaatgtgattatgataaatccactctaaacattgaaaatgtaggttaaaaatgcacctaacacacttaaattgaacagtatagcttagcaacatagcatcctctagaactttggtcatttaccctcaggcttaggtggctgacaaggagccactgtcctgcatcacaagaggactccaaagtgtatctgtagccataaaaagagcaacctgacagtatcgagtgagtttccactgaatgaataccactcataccctcataaagaaagcaatcataaacaagccatcattatattggggaccatcagtccatcacactgaagtcagggttcaccacatgcttttggttgggatgcaaacaccgagtcacaaacatgaatgttggcttaccgacgaccgtttgcactccattttacatttaagggaagctggccacattgacaaccattttcaaccttcatgctttaatccttagtgaaatgtttacagtgaaacaactaagactgtcaacaagggagggaaatagcatcaagatgaggattgataaaagtataaaaccatgaatttttagaatacctgcgacatatgctttcgatgacggcttcatgtcatcaataatttacctaccattataagaaataaatagagtaagaagtttacatatgcttatttacccaaggacagacgaatgagtttggaaatttgccctttagagaggtaaacaaaataattctctttctctaatttagacctcagatgaccttgaacatgaaaacaacaaaaaggtaacaaaacaatcctcaagcattttctccatcaggaatcacccgcatgtggacttctcacattaaccttgatggtcttcctggcccttgcagtgccagggtcactgttcatagtattcacatgcctgattcacctagttgctgtacaaccattaaagccgatttaagacataaccaaggcaggcgagacagtttccctagaagtaagtattcaatgtactacactatctccttaaatggaatgagagttccgtcaaaggagaaggttacataattattagcatattgaatgtgaagataaaaataaccagtaggtaatcggagccatatgatagtgtggtggaatcgatcgtggttctgaaggtgccaatcctctgaaggttaccattcatcatagggttctcagaattcagtcgcattgggcactggccttactgtgaagaaaatatattacattttgttttcttttatgctccacaaggttctcgttgtttgtacacgtatttcattgtgcaatgccgagaccaatggcagtcacgcacagaatttgccaattccccggattgtcactcacaattcagaacagagaacatcctgccttgctgtctgtagggtcttgttgcatatagaatgaagtgtcatcttatttcctgactattcatcctgaagggataccctcccgtgttcacaaggaccctctatgcccggattgattttcttaagatggtagggtcagaagtacacagactggctaattcgatgttttccatgttagctggatgattttagtccccaaggcctcagttttgccctgcggctactgggagttctcatgatacacgggggtacattccaaaatccttcaagttcagtaagatgaggagatttcagtctaagtgcaacaggaccccgcagacagcacggcgggcataccctcatggctccaacatacagcactggtgttctgagcatgagacacatgggacaaaacagatttggctcttgcccatatttggcatggtgagtggactctgggcttatatggaaaaagatgaaaatgggcataagtgtcatgtactctatcacagactttcacaggaagaagcaggctgatgtcaaagatgcagaggttaggtcctcagccaaagcgagcagataagctaactgaccttactcactgtgcacccgagctgtttctgttcttagattgagtctcttggaggaaaataactccaaagttcccaacaaaataccgaccacttttcgggacacccattttgttgatgaatgagttatttttgctttaatttctcaagaaatgcaaacagtcgtttgtagtttttctctgtacaatgtaatatgtcctatgtagcaagttaccaagttcttttgatagtaagtgcattaatagagataactaaatcatatgtgtgtgtgtgctgcaagttcctgaagagattactttaaaacgtggtctccagttccccattggcagtgcctgaaaactcggctgtggaatgacaaccctttaggcctcctccagcagatctcttccagcggggcctgcagtttctgcctacaaagcctgtgggtgattttgatgtatgccattgctggatggccacccagtggagctttgtgtattggcctgaatggtaatactgcagtctatcactgtcggtgttgggtgagacctggtaaagtttcttgaacgtttgatggtcctttgaaaacctaacagataaaatgaatgctttcaggttatctccttttgtattaaaacctatgacttttaaagtaaaactttaagagagcaacaaggtctgttacatattaatttacgcaatgcagatactcttttaattaggatgcctaaactgaatccgtgagtccctttgaagccatccacttaaacgggtttgtccttgtgcttgcagggcctggtcaccgtagaggatgagcaagcatggatggcatcttataaatacgtaggtgctaccacgaacatccatccgtacttgtccacgatgatcaactatgcccagcccgtgaagtttcaaggtttccacgtggctgaaggtaacattgcaggttaaatgcagtagctttcctgtctgcttccctgtcgcactggctgccccgctgatttgttgccatcttttttctttgtggatgtccatcacttcacctgacttgattcacttgtggtggtattatgctgtcattctccaaatcatccacgaggtggcggtgcaagactgtgacttagcttgtagctttccgtatgctttcgtaaggcttctttatttactttgttatgacaaactatattagtaatatttatgaggcacagtacctgtctttgttacctgtgtgtgtatattgtgtaatctatggcttcaggagagtgaggaaaacttaatcagtgggtacaaatgccttgagttagggaagtaagatttgatgttctgtggtacataactcctattcaaaagttggttccccacgaaagcccgttcaaaagtagttaaaggtatttcctaaccatttctggcccgaagagtacgttattatcaaaaactgcatatcgcagcagtgactatgacacttgggttgcatatcacttgtttagtgagtccacatttaattcatcatatgcacagaaagttagtgaaactcagagcaaatgacacacacagtcatgtagcatgggccacgaattcttcctgagctgggatgtaagatgctggttgtgattctgtctgctgcttgctttttgaggggtttgatggctgagtttctgagtacatctttgcttgtcttttacagagcgcaatattcactataacatgtcttcttttaacgagtcggttggccttggctacttgaagacgcacgcgattgagtttgtaaagtatcctaacggactgtatgggatgaatggtgctctcaaggaccggcagggatctctgcagtagattggcagtggtctataattttaatatttagctttttgtataatttttatcatagcgctgtaaaatggtgtccccagacgtacatgcgttgtttccagaatgcacaccgcagctgtgatttcctctgagcagtgtttataaggggattggccccgtgctatctacctgcttgccattgtcccgcaccccactgttgttgttctctgttgtgcgttcgccttggctgctcttggatttccttaatcagttacccagttacaataagcgacaaatgagccgcatttaccccaagggaggccgagttgattccagtaattacatgcctcagattttctggaacgctggttgccagatggtttcactgaactatcaaaccccaggtaggcgctaatgtccagtgaccccgaattccacaagaacattgggacagggcagccattgcagctgctcccgttggcctgaggcattttctttttaaaggaagctgccatgtgaaaaaaatttgtttttcttgcatttatattaatggcaaaaaattaaatccccaaaacgaagccataacagaagatgccatttcagttttaatccattccatcaatgctatgagtagcccctattctataatatttttaatttctctctcttctgtatcaagcttacatctttgttcccagagatgggatttggtttcagtatctttgtgtgataacttagtctctttgctcctttggaaaataccacaaccaaggtggccatccagcaaacacggatggcagcagcacctaccataatatgacagactttcatcgtaaactctgtaagatgccatgcaaagagatgtcatcagagtactaatctgtagttcaatcttccagaatatattcacgggcagggtttcaacatacagtggtgcttttttttcccctacaaattctaacttttgataaatgtacaaatgcttgaagttttccaagtttgcatcagagcctctgaccataatcctgtgactacagattgggaaataggaaaataagcattaaaaaaaagagagagacagatggcacaaaccatatttattttacatgaccgtgttcttctgcatggctttaaaatttggtagaaacaggaataaaagtaaaatagctaactaaatagcaacgcatgtctggtcagtccctcactttgtgagcagcacccttgccaggactttgcaggcatggagccgttttcttttctggtcactctaacctgaggaccactgtccttgctccggactcaccacctccttttggtgggaatatgagctggctgtatttttcacgcctgggggagccttcctgagggccagagctccttaccaatggatcactgcgtggaatcctagccatcctttctagaagagtcttttccaggtcttgaaagaatctcgagtgtttttagtagggacaggacaacacgatggcagtgctttacttaccaaggactcaagcggccctccaggaggccagcgagtccgtgataaaggacagcgtgatcctaaagcagttcattgtctgggcaaacgtgtgcttcattctgaagaatggaaagaaaaatatccacttaatttagttactgctcctcttcctgctcctcctcctcctccccctcctcctcctcctcttcctcctcctctcctcctcttcctcctcctctccctcttcctcttcctcctcctcctcctctccctccttgtccttctcttatttataagaagaaagagaaacctttctctgcttacaaagaaaatttataaatcaggtcttcccattcccagggtagccctatgagagttccaacactcacacaggggctgagggagggtaagcagcaacattttatgattcttatccattttataatgttccttttaatcaagttctgtgttcttaatagccctgttgtgtgtctccagcatccctgtcccatgtggcattgagacaacgcatacccctaactatagctggtgtctatatccccaactactacgtctctactctgaatatcgagttaagcatcgtatgacttgtataccaaatgccgcttagtaagccagttctagggtaatctctatgaaaatgtacctggtatttaatttaaactaaatatatgaggtcatttcggcatggaaaagagtcatggcccctaaactaggccaatagaatgcgatggtttaatggagagagctttggaccttggaataatatggctttcattgtttccagtcaccctgtcaggatcttctctgtccagggagatgagatgttaaattactttgtcttttgacagatttagcgatgcaattgaatcaaggaaaatttgagtataatggatcatgcgggtgagtgatatttaaattattgtctcctcatctcagactctatacctcagctttaatgaaaccatgtcattttcaattacggacagctgaatgtatgctggttctgaagtgtgggtaaaaataaatgaagtccatagttagattacatttacaaatattcgaccttttctctgtcccactttgttaaactggttctttccttttaaccacaaactctgcagttcctcacatatattctagaatttgatcacttcattcgaaattcaatagtggaggttcttgtgtcagagacaggcaatgggccgtgctcatctgggcttcagccagagatttaggcatcaaatatgtatagccttattgctgatgaatacagaaatgaagtaaatttcatttcaaatgaagctgtgggtgtaaagttgaatttaattcagccaggaataaactttcatcctctcttgaatcttttgcatgtttataaataggagttatataatgctgtgaatgttgttctattttacttaaataacacttaaaaaatctgtgaaccaagtagcaaaataggaaatgttaattcttctgaaataccgagaagttgaataaaagtccggaacttgaattccgtaagcaccaaaaactcagctgagaccacagcccagtggctcccacatggatgcgtaggaattctctgttggccagtggtaatgctgtctaggagttctgtgtggtggcttgcctagtgagctaccttaatctccatcatggaaaataaggtgaggtaacaggttttcaaacaactctaatatctgaacactctctacctgtgcacatctgttagttatctgccagagtgcctgtacatagcaaaactccttccgtctgagtctctctcacccatacccgtggagtaagcactacattgccctgtgctgtggactgtgaagggcactcaagttatatagaaaggaggaaaagacccacagctaagttaacaagtagtctttctacaaggaaaagaggcagacatttggccaaatgtcaaaggactcaggaactaaacctttggtaaaaggagacagcttgtcagcataccactctcttccccttgttcaagcaaagaggtggtctgttgtttaatagcacagcacaccctgagcagcctaggttggttgatgatgctcttcaggaccgttagaaccttctacctgtaagtgtagctcctgagttatggaagagagaaaggaagtagcttgtatttaatagtcattgcacaagccgtcagtagaataaaccccctgtgtttctgtcctgccaggtaccttctcaagccagatttcatgaggcggcctgatcggacatttgaccccttctctgaaacccctgtggacggggttattgcagccacgtgctcagtgcaggtatgcccctgctcaccacagactattttatcatacagacgtatacaaatgcacctagaagaagacatgtttaacatcacggtgtaagaattgtaagttgctctcaacttggacccaatgtatgctgtcttctgagtttttgttactaaaactatgaggtgctttaagtaaagtacacagtctagaaagtatctcccatctgatgacattcacatgaagttctgagaaatgtaagctatgctaacagggagcaaattagcacctgtgcctggacacagatggaagggtcacagagaagcttcgggggcactaggaaggcttgctgtcttcactgtggtgatagttctaaagacacactcacatgtccataaaattgatcttactgtataactaactgcatatagtttagtatatatcacttatacttcaaaaaaattgctgttttaaatgagataatatgagaaccaaataaatgaacagcatagttgtttggaaggtaaatgtgaaataagttactccctagctttataaaagataaaactcaacactgacatttacaattaaacaactccctcaccgctaaccagggttaatgtcataaagaaagtaggccaagtctagcactggttgtcttttgctgtgtttctttgcaagaattcaggggttaatatgcagcctgatagaatccaagaactagaagagatctcaggacatagcccatagccgcagccctggcttcattccacaggtccggacagctccgtgacgtgtggagggcgtgatgtcttcataatatacttcacctgtatatttccttgctgtttttttccagccgtattcagaggagagtacatttataacctctgcctaggaattttgctttcaaagagtagttactcaaaaactgttttgttctaatatagaaaattccaggaaaaagatcaaataattgtattgattggaaattccccaacgaaagttttcatcacacgccttgccaccaatacaatgaggccactgtcccccctaccctgtgtctgtgtaactgcaggttatatcagggcagttcctctcagataagaagatcgggacatacgtggaagtcgatatgtacgggctgcccaccgacaccatacggaaagagttccgaacccgcatggttatgaacaatggactcaacccagtgtataatgaagaatcgtttgtgtttcgaaaggtaagacattagcagggtgtcactgttacccagtaggaagactcattttctacatgaagcccacaggatagaggaatgccactcaccacactgactcggctccttcccttcgtctactaagtgacctcggtcactgccgaatgattgtgtgcaaagagtcggctgttctggctctgccccttccttggccacctctagtcacatagaacacacttccaggttctagtctatttcagacgtgttcttacttgtggctgctatcatgcactgaagggtctcattctgtgctcacagctcaaaggttagatgaaaggctgcaccaacgctaaggtcagtgctgtgaccctggtgggccctgtgatcagaagtgaggcaccgctgctcacttcaccgctgctcagagttttgagtttcttccagttctgtatgccaggtccagggagcaagcagacgtcctctctcgtgtgcagtctttaatctctttggttgaagatgctttgaaaactcagcgagcaggcagaggcctgtcatttcctttgtcttctgtactgtcagacaaaaactgttttcttgcttttttggacgcagatttttccaggtggttctgctccatccatttgtcatggaacaaagagaaggggctcctgatctttcctaacaaaatagagactatttatttcagaacagaacaactggctgagagagaaagcaaagcaggctgatgggctacagatcagaaacgacatatgccatgtgtctgtctgtcaggtgctgagctgtctcatttgatacgattatcaccaggtccatcatttctcacaggccatgtagttttttcttttctctgagaaaaagtctctggtatacatataccacattttctttctctgcttctctgcatttggacacataggttggtttgtaacttagctctgatgtttagtgcctgcagtgaacacagatgtgcaagtacctccctggtatatgcacttagaaacgtttgggtaaatgccatgcagcatgtccaggtcacgtgacacatctagtcttagtttcttgaggaaccttcataccaatttcagtagtggctgaactatacattcccaccagcactttatatgatttctcttttgtccacatctttgtcagtattttttgccatttgttttcttaaggatagccattctgagtggggtgagatcgaacctcaatattgattcatttgcatctttctgatgacttctgaagttcaatatatttttcatatgcttatttgccatttgcatcactctttttaaaattaattttaccttatgcatatggtgttttgcttgcatgaatatcaatgtaccatttacaagactgatgtccttggaggccgggatagggtgtgggattccctggacctggcgttacagatggttgtaagctgccatgtgggtgcaaagactttaacctgggtcctctggaagagcaatgagtgctcttcactgctccgccagctcccatttctctgtcacactttgagaactgctcatgtcactgggcactgtattgaccagagtgtttgatgccttgctgattaggttttccttctttgtatattctagatgtccttcccccaactcatttatagtagctaacaatgattttctcccactctgaatgttatttactggttcccttggagttgaaaagcattttaatttcatgagtctctgttgtcacattgttggcattatttcctgagcaagtggaactctatttgaaaagtccttgcctgagtcagtatccggaagttttcctccaatattttcagagttgcagatcttatatgaagtgttttggttcatttggaatagatttttgttcaaagatagggctatagttttattctttcccagagttatttgctaatggaactatcttagctccaataatacctgtgacatctgtgttagaaacctgtgctatagctatatggaattttatatgaatcctcagctctgtctgctgatctacatgtgtaattttgggccagtgccatgctgcttttgtttctatggctctgtggtatagcttgaaatcatgtatactgataccaccgacattattctttcactaaaaattggtttggttctatggtcttttgctttggttctctggtcttttgtactttcatatgcatgctaagattttccttgctatttcttttacatttatttcaaaatgttttgttttgcttttgaaacagttgtgctgtgattattttgtgggggtgtatatgtgatgtgtgtgtatgtgtgttaattttataccctttcatttttctgaaaccgttcatcagatctaactttggggggttagtctttagggtctctcatatatagaatcatttcatctacaaataaggatactttgacttcttcctttctgctacctaacatcccaaaactcatcaaaatttgggatgtgataaacacagagaatgataatccatccagaaatggtctttatccatgaagtgtttccttgaaaacactctttatgttttaaaaaaacaaaacaaacaaacaaacaaacaaacaacaacaaatccaagcagagttcaatgttgtcagtagcccaggtagcagactgacatggggttgagtacaggagtcccaatcccaggctccactgataatctctaaactaaaaagtccttcagttttccagggtccccatctttgtgttggatgtagatgggggaaatgacaagaattggatctgcagtctttaacacgcatccacttaatatatttgatgagatgacttcctggaaacctggacccagggccttattgatgtcttgggcaccaatcttccactgcatactttagtcatgcaagtggctcattggtttgttttcaccatgaaggagattgagggaacggtattggtttggtccagattccctggagccatggttccgagaggcctcattacaaaatcaatgaaatgcccaacggtttgatttcaggtgatcctgcctgacctagctgtcctgagaatcgcagtctacgatgacaacaacaagctaattggccagaggatccttcctttggatggtctccaagcaggctaccgacacatctccctgagaaacgagggaaacaaaccattatcactgccaacaattttctgcaatattgttcttaaaacatacgtgcctgatggatttggaggtaagacaagcatttagacatggaagacagtgtacaagaggtcctgcattatgagactgtgaatcgttttgcccattcctgaaactaacaaaaatggccgtgtgtttttctccctgtgctgagaaccttggtggttttgagtaaagaaagcagtatatccgtaggtattatttcaaaatactgtaatttttgcttttgggcaactgaccttcaattttaataatgtgattttaggttcaaacataagccaggagagtttcaatcaggatggataggaattattcctttctttgtaccctttgcttgccattttaaaaggaagcaattagaggctgtaacatacagtaacagacataggagcccatcagagcagcttgggcagtgccatggggctggacaggtagacgtctgtcaggtgtgttttgaggccgcagtccatgtcaccagcagtgtgggcacatcgatagactgaagccaggaagaaattattctgtttgagttttaaagcaggggacataaaggctgcggtgatggctcagtgggtaaaagtgcttgctgcgcataagaaccagaggtcagatcccagcatccttgtaatgagctgggggaggcccaggtgctcctggaacactctggagggtggagagcagaatccttagggcttgcaggccaccttctgagctccagactcagtgagagaacttgccccacaggtaagaaggtagagagtgctggagcaatgcactgcacttcctatggcctcaagacaaatatagagatacctacacacataaacatacaccccccccacacacacacaaagagagtgtgatagatacttattacattatggaaagtgtcacacagacccatttggtaaaatttgttcaagttttgccattgcaatggcaacatttcaaataaaactataatttcttcctgggaaaagtgccatttgatttgaattgggaaaaacgatcatttgctgagctcctgcttggtgccaagcacttacataaagagaccctcaaaatgtggaattgatctgcagggatgtgagcgtgtgcaggtttacaccgagaaatgtttgtaatgtgacacgtgccagggccaaatctttacatcctgcaaacccatctctcatgacagtcctgcaagtagtctcccctgtggtcgtgcctactgcctttctgtcagattgttgcgaatctctgtacgaggttctgcagttggcatcctaacctcaggtttgatattcaacaacagcacgctcgctcagccctctgatcatctcaggctcacgtggtacctggggaagacactgaagatttagcagtttttggaaaagataacacagggcaaatatgaggattgcctttttttctgaatttctgaccttgagtctcctgacttacagtatgttcatatttggtgtctagtttacttcctacatccacacctcagaatttacctcacagtccccaagtatgctagtattcttgattttgtaaggacacgttcaagtgaaactataccatcacagggagaaagaaagagagagagggggagggagggagggacgaaggaaagaaagaaagaaagaaagaaagaaagaaagaaagaaagaaagaaagaaagaaagaaagatagaaagaaagaaagagagagaaagaaagaaaggaagaaagaaagaaagggagagagagagaaagtaagttactgtaaagatcattcgaagttaacttgtaaagaaacttcatgagacttcactgggtcattctgtaagtacattcaatgcaattagtccacaatcgactgggtggctagaatgattatcagagaagggtgcctgccttgcagcaagtgagggtcacttggaggtcctgagttcagagtgaattgctctacatctttcccagccctccctcactcccttccttctcctctctttctctcgttctcaaggtcctccctcacactctttctccacccccccccacgcccctcctggtagtactaaagactaaaccaggcgcccatgcctactagacaaacattgcaccactgagattttgggtcaaggccgtactaagttgctttagctggccgtaaacgtgtgctctcccattgtatgtgcaatcacaccctgcttagagagattttatttagttttaacaacacactgaagaaagatctgttggttgtaaaatcctcaccttaatttaccctgtagtttatgtaaaatggcacaggaaacaattatatcataagcaattcatcacccaaaggaaagaagtctttttaactccccactgagaggtttcagaactcctgtgccttggcagcaccgcagctctgtgttctgcatgacttttaaatgcattttcattgtcagtcattgtacgtgggtggaaacctttttataaagataagaaaactcttcttgagccttttccaaggtagggcccttgcttggacctagacttaggctcttacaggtcacctgttcattaggttctgctctactaagtgaccgtcaggtgatgaatacccacatatgagaaactatatgcaattgttcatagttatccctggcccccaaatcacgcccacatacatctagtgcttcttagacattctgaactccagctgacccaccatgggaatggtcaacagcccagatcttacctctgaccccttccattcacgggaattcctgtgccccgacctctgtcctgccgttccaagccctaggcaacagaaatagtggtcttgttgaagctgcttctcttgctactaaaatcagttacaatgcacagagaaataacagcaatgatggtttgtttctcagttcattttcttgtgctgaaaccaaacacccaaaattggctaacttataaagtaaagatgtatttttagttttgtaaagatttattttattttatgtgtaagggttttgcctgcatgtgcacacgtgtgcctggtcagaagaagtcatcagaccacctggaacggatagatggccatgatccactatgcgggctctgggagctacacgtgggtcctcagtaagagcaacaagtgctcttaacccttgagcccaagaaaaggaattttgtttctttgactcagttctgaaagcttagctggtccggttcctgctgagtgttagtgctgctttgtgcatttgttcagcggaatactggtataaggggcatgatctggtggggtttttgtttgggtttgttttaactttcatacagtgtgttttgatgagattcactgaccttgccccaactcttcccagacccacaccacttccctacccattcaactctctgtcatctttttattaaaatgcttcaaaaccagtttataatgtccaaatattcttagatgtgtgagcttttcctgggatatgtcggtttaccagaggctacccttttagagagaactatttcactctctcccaatagctaacaactgtacattgctccatggctaggggtgggattgtatgcccaactctcatctccttgctgggatttagtctgtcacaagcttgcacagggtctgtacaagtaagttcatgtgtgcagctcccctgctgtgtccatatgtttcctttagccatccaccatctctgactcttaaactctttctgtactcccatctgtaatgatcctgagctgtgggtgggtgatgtggtatatatgttccctttagagatgagcattttctgagtggatttaagtcttgctccatgagatgaaacccataactggcaccacctatggctatatatatcctaggcctcaggagggaacctactattaattattgcagatgaacggacataatattaaatcaacttttagtgacttaccattatatgcatagatgagtgcatttttcaaccctaacctgaaaagcttcaatttgcaacaaatgattaactcagtgaccccccaaactggccagtgtgcagaaactaaaagagaactgtttatacaacccagatggaaaatatttctgggctaaagagtaatagtagaccatcttaagtatttaaaactaaatatttactgaaaaaatagtaacattccttatttcttttttaaaaagatatgtcttgcagtgaatcaagaagccttggtttacatcttccagtgtcccagtcctcaatataatgataaaacggtcctctcttttctctccacaaagcagaactcctgggttgaatgctaagcacctccctcatttatcaaacctgagagactccatctgtgggcacatctgacctgctagtggtgtttactcaccacacagaattatcacatcagccatcaatgttggggacaggacagcaaatagttctggtgccaaaaacaatgtctcaatgttatatttcccacctccattgctgagggtttttcctctctgtgtatgttgtctttattaccaagaggtgaaagaaaggagatttgtctaatatatatattagacacatatatgtgtgtgtgtgtgtgtctgtgtctgtgtgtatgtgtatgtgtgtgtttctgtgtctgtgtatatgtgtatgtgtgtgtgtgtgtgtgtgtgtgtgtgtgtatgtgtatgtgtatgtgtgtgtgtgtgtgtctgtatgtgtatgtatatatataaaacattagcattaagttaaatgtcaccctaagaagtttgctttttaggtccttgtttcttgggcagggcccttcttcatcctgtggctcctctgttgctttatgtatattaagataaagtgactttatcttaatttttgtttggttgcctttctgccttatgattaaagatgcatccaggaaggtacaggggtgtttctcattctctccacccagatcttcaactacctctagcataggcagatgtttcatacagctgatacttccagagggagaatatcctcaattaagatgccatttctggagggtcatgcctggatttcctgatgcagattctttttctttcaaatatttgttgaaacacacataatacatgccatccaggggcagtggggagggtcggattgctggtgtttgaaccagggcagtgtgcatatgatgcccactcataaggcatcttctgcactctgcaaaagaagggagcagtgtgccttatggaaagtacaccagcagggcttgcgaagtagcttagcagggcagtgaaggtcctgtgttcagcactcggcaccacaagcaacgcagacactgaaagtggctggcttcagcacactggtcaggccctttcttacacatatcactaagataccctgccaacgcagcgagccgtgtgggaagagattggcttttcttggttttgtttagccctgattcccctgtacggggcatagagccttcacaggaccaagggcctctccataggaaagggaataacatttgaaatgtaaataaagaaaatatctcataaaaaaaaagaaaagaaaaaatgtcacaaaaaatggttatttaagctaaatattttcctaaatgaaagctaagtctttgtaaaccattttggaagaactattgatgatttctatggcaggtaataaatgatacttttgtgttctgtaaaattaaaaaataccactttatccaaactttattccaaaaaaagaaaaaaaaattgagttgcattttcgtgatctgttcatttaaacataaccttgatagtttgttgattgtttttcagatattgtggatgctttatccgatccaaagaaatttctttcaatcacagagaagagagcagaccaaatgagagcaatgggcattgaaactgtaagtgaagccgtgggctaacggcggtccagtggggggagttggcttccagagagtgactgccaaagaaagagagaggtgatgtgggaagtttgcagagggttttcaaaaccaagcttatccattcaatagaagttggaaggagctacaaaaatatagcacattttatacaatgtggccactatcagagagagcttcttagtcaccagtgagatatctgcagttgtctggtccattatgaatgaagttggaactatccattagaaattacaacaaggatttctttttataatgctgaaatgccaaatgactgagttcagtgagttaatgaaaatgaccgttattaccaggtactcatttctttgtccttggatcccaacactccctctcttcatctgtttctctattgtcaatgtccctttgctggactctttgagttggaacacaatcagccatccagtcagccatcccagtagctagaaaatgccgtgcttataaaggagttgggttgtctttccttgactggatcatttttcgtccagcacaagcaagctatatagtctcactccccttaggtaagagcttgcttgttttgtttaatttgagacacaggcacagtttgtagcttcgctgacctggaactcactatgtgcacaaatctgggcttgaattcataaagatccgcctgcctctgactactgagtgctgggattaaaggagtgccccatcaagcccaacttcaggcaaagatctttaaaggcaggaaagtctgggaggctgagggatttctcattaaagtaaaaatgcttctagggccaggtattttaatcatcgggaatatttttttgttccagagtgacatagcagatgtgcccagtgacacttccaaaaatgacaagaaaggcaaggccaacccagccaaagcgaacgtgacccctcagagcagctctgagctcagaccaaccaccacagccgccctgggctctggccaggaagccaagaaaggtgaggtgtgcagttcaactccttgtcagctttgtcattttagcctcgttgtagactgccttgacgaaggcatttagaatcgtcatttctgcccactttcattgtgatgctagatgaaaaaaaaaaaaaaaaaaaaaaaaaaaccgagagacttactggacaagttgcttgatttcctcctctgagagttgtttaatgggaaatcaacgattgtgttttatgggctggaggcccatcacctaaccagcgtgttatgcctagtgcaacagtgtttactttgacattcttcatggcagggctgaaggagcccttgctgctacagtgccaatagctaagtcacccacctctgtcttccagactccagcaggcaaggggcacatgaagcatcagagtcacaaatgccgtgggtaatttctccatacatagagaaaaggctttactgtttatttttaaaacccgtagatgggcatttgatggccagtttcaagtggttttctgtgagtgaaacaacagctcataagaaatgccataatacagaaacacgtgaccctgtgctgctattggacagcctctacataaggagacatccattttgactatttaaagtagtcttcaattcaagagaccaggcatccattttgactgatcggtacccatttccatattgacagttaaatatctaaaataccccttgaccataaataatttactacacacagtctgttaattttcatagtaatttctttttctcctaagggtttcttagcatgtatatttcctatttacaagttaatttaatgccagtggtacaaggagattaagccactcttacatatacatgtatccagtgctaacaattcaggggaagaagagacagtctttcccaaccaaagcagcctggtaatttagcaggaaactaagtgtgcactgaacttcatggagcaaattagaaaatgaagctttacaaaagtagcccaatctgtactggccctgcagctgtttgttcttctcaggaaggaacgtggggtgaggtaatgccccaagcacagaaggaacatggggtgaggtaatgccccaagcacagacacttcctttccagcgctggtcagtcctagcactgctactcctacagagatagacattggaaaatgcaggaggtaaagttcttgtctgacccgcacgtccatagtgaatgtagtaattgcattgtaaagtagctcctaaaacagcacacacaacaggcctccaaaggctcagagagtccgtagctcgaaatgggtctgtacttgggtttgttggtgagttagtttcctttgttccccaacaagactacatctgaacccaccaagcagctgtcagttgaacaccagtgatttcccccaatccaccccaaaggtagggcgtacatgctatttcttcaggaggcttagaagcctacaagaagccattaccatactaggttctaccaataattaataataattaataataatgtaacaacaataataataaacctgcattcctttggggatgtacatacacaggggggaataaggacaggctccagtgtaataggcagcccaggtaggtgcaatgaggactgaccagttagaacagaagaggaccctcagcaaggtccagagaggactcagagataagatcctaactgagctggacctggaaacataggtctggctcaaccagaagggaccagtacggagaccaagggaaggaggacacctgaagagaagtgggtagtagaaagtggaagcagttcacttgcccaggtctgcaaagaacttgggcccaccctgaggaggcagtgaaggacaacaccgatagtattgacatcaggagtcgttacaagaagagatgctacaagccgccagtggccctggtacacaggactgtattacagcacacaccgtattacgatcaaccagaggaagaggtcaatatagacagacacatccttcatcattaccttgtacctggagccatgctgggaaagctctgttggcctcctttcttaggaaatacgtggctaataaatgcctgagcagagagggcagtctggggtaagctgtggtcaccataagaaaagaacggaggaagaagaatgtagttatttggatatggagcttagaaaaagacaaaaagtgcagaccgacttcaagagacttcggggtcacactctacaagtggacagcaagagaaagagaggagctgagaggggatgatcgtgatgagaaaatggctggctcccacagcactgtgaccagcgaggagggggaagggcagagggccgagaggctaggagctcacaggcagaatgaatgacaggaaagaatgaaaatgaagactttgttttgagaaggagtcgcagatttagagaagtcatggctatagtgtttctgtgcaaccagggatacccacttgttgatgccagaagcctacccttcagacatgatggcataaggcgtaaaacacatgttctaatagcgtgtccatagcacataatgaggagagacggatggaaagtgtgagggtgcaaagtgacatggccctcgggaagctcagatgtggagacaggaagtgagcgattcgaacagcgccccctagctgtgcagccctcgaaatgactccaaccaccgctgcattgctgatttaagagaggattaagcatcctcgggtcctagctagtttctaggttagagtttgagaaaggaaagttagttgttctatggagctgtacagataatagcaaaagctttatatagtaaaactgaaattagccagaaactttggaacttaagatgtaacctctgacctggtttcctaccaggcaaggcagccgagaagcacagtccaacatggtagccacatgcaggactgtaaaggaggtaacattaagctctgttccttgcacacccacgtttcagatgctcgggagctacgtgtctctggatacctcacacataagctgtctctattcctgtcagatgttctatggaccacactgctctaagcacatagagcggaaccaattcttgttctacaaaatgggacattttccttcctacttagcaaattaaatattttgcacttaatttgtatatttttccaatagtgcaaaatgtaattgagggaaggtaccgttgtcttcaggatcctgcttataaagaatttggttaaggnnnnnnnnnnnnnnnnnnnnnnnnnnnnnnnnnnnnnnnnnnnnnnnnnnnnnnnnnnnnnnnnnnnnnnnnnnnnnnnnnnnnnnnnnnnnnnnnnnnnnnnnnnnnnnnnnnnnnnnnnnnnnnnnnnnnnnnnnnnnnnnnnnnnnnnnnnnnnnnnnnnnnnnnnnnnnnnnnnnnnnnnnnnnnnnnnnnnnnnnnnnnnnnnnnnnnnnnnnnnnnnnnnnnnnnnnnnnnnnnnnnnnnnnnnnnnnnnnnnnnnnnnnnnnnnnnnnnnnnnnnnnnnnnnnnnnnnnnnnnnnnnnnnnnnnnnnnnnnnnnnnnnnnnnnnnnnnnnnnnnnnnnnnnnnnnnnnnnnnnnnnnnnnnnnnnnnnnnnnnnnnnnnnnnnnnnnnnnnnnnnnnnnnnnnnnnnnnnnnnnnnnnnnnnnnnnnnnnnnnnnnnnnnnnnnnnnnnnnnnnnnnnnnnnnnnnnnnnnnnnnnnnnnnnnnnnnnnnnnnnnnnnnnntacagcatgaggtcaggaggggctgtgacaccagatacaagagatcagacaatagccacacacaccctgcccatcctaccctgaaataccatggatcccatcactgattccccccccaccccccatcaagatttccttctacatccactggtcatgccaatcttaaaagcaatcaaacctacaagcaagagcatgggtctccatacctatcctccttaaatacatcatacctgctttggggattccagtagaagtcagttatctttgaatacacaatcgttctgtttgcctacaatgaaaatctgtaatcaaacagaaccatctgaggattcttcttcggcaattgtgtttaccgtgactactctgagtccagcctttactcagctagcaaacaggctgagtgtcttactcaaggttttcatgacagaaccccttaaataggtagtctgatttcatttttcctgtgtttaggacattgccacactcaatagcacattgcttagatgctaaggttaaatctaccccaaagaagcttaccatgttttgcttcttggtgatggatgactaagataggagtcgagctggaagttagttgactgataccacgtacccaaatgcaaagatgaaaataactgcggcaggtcctaggtgcctggccgctcgatgggtccacttagcccatgccccagtgctaagaaggctggctgattgagagttatagctactcctcctcaattgccctgagaccgtgggtaaaaagcccatgcaagctgttttggaagtatcaggtataccttagaaagtttatattgtctgttatttactctaattttaatatacataatgatatttttgtgactttttttaaaggtattgaacttatccctcaagtgaggatagaagatttaaagcaaatgaaggtaaaatgtcttgactactttttagatgtccgagtactatgaacattgatgaaacaagggtttttttttttttttcatcacaaagtacaatcattatgattacctctggcaaaaggatagatggaaagaagggaagagaaagacagagagagggagggggcggagagagggagagagaggaagggaaggagggagcaagggtgggagacagggagggagggagagagacagacagacagacagacagacagacagacagacagaatgaatctcatttcggatcagatcctctttttctcccctgcaggcttacttgaagcatttaaagaaacaacagaaggagttaaactctttaaagaagaaacatgcaaaggtagtgtggttttgcatacgtggctgtgcattttgttggttcttttgtattttacttttagctctatgatgaagacctaccacttcattttgtgttgtgtacaatgaaccattcatcacccagaagactagttagaagctaatgctagacagcaagtgtgacccccgttatctcactggtaactgctggtgccttgttctctggttgctgtgcagtagtttataaaagcagtgtatgtggggagatgctagcaggggccatctctcacagtccttgtcaatataactagaaacctatttctgaactttctgtacttttattatttatcgctaagaagcctgtcagacagggatcagaagaaatcttaagaggaagatgcaaatttaagagaacaacaagaagtggccctgaggtttcccagataagttgagaaggttctcagttttcagtttctttcgattttcaggcttttttctgatcttctcttgcagaggagggatggaggcttatagaactgagttagggggatacagaactggggtggcagaatgctgaactggggcagtgagggggtacacaactgaggtgtgtgtggggggtacacaactgtggtgggattggggatgcagaactgaactatgtgtgtgggatacaggactgaggtgtgtgtaggatacaggactgaggtgtgtgtgggggatacaggactgaggtgtgtgtgtgggacacaggactgaggtatgtgtgtgggatacaggactgaggtgtgtgtgggggacacaggactgaggtgtgtgtgtgggatacaggactgaggtgtgtgtgggatataggactgaggtgtgtgtgtgggacacaggactgaggtgtgtgtgtgggacacaggactgaggtgtgtgtgtgggacacaggactgaggtgtgtgtgtgtgatacaggactgaggtgtgtgtgtgggatacaggactgaggtgtgtgtgtgggatacaggactgaggtgtgtgggggggatacaggactgaggtgtgtgtgggggacacaggactgaggtgtgtgtgtgggacacaggactgaggtgtgtgtgggggacacaggactgaggtgtgtgtgtgggacacaggactgaggtgtgtgtgtgggacacaggactgaggtgtgtgtgtgggatacaggactgaggtgtgtgtgtgggacacaggactgaggtgtgtgtgtgggacacaggactgaggtgtgtgtgggggatacaggactgaggtgtgtgtgtgggatacatgactgaggtgtgtgtgtgggacacaggactgaggtgtgtgtgggatacaggactgaggtgtgtgtgtgggacacaggactgaggtgtgtgtgtgggacacaggactgaggtgtgtgggggggatacaggactgaggtgtgtgtgggacacaggactgaggtgtgtgtgtgggatacaggactgaggtgtgtgtgtgggacacaggactgaggtgtgtgtgggggacacaggactgaggtgtgtgtgtgtgtgatacaggactgaggtgtgtgtgtgggatacaggactgaggtgtgtgtgtgggatacaggactgaggtgtgtgtgtgggatacaggactgaggtgtgtgtgtgggacacaggactgaggtgtgtgtgtgggatacaggactgaggtgtgtgtgtgggatacaggactgaggtgtgtgtgtgggatacaggactgaggtgtgtgtgtgggacacaggactgaggtgtgtgtgtgggatacaggactgaggtgtgtgtgtgggatacatgactgaggtgtgtgtggggaacacaggactgaggtgtgtgtggggaacacaggactgatgtggggttgggtatgcagaactgaggtgtgtgtgtgatgctgaactgcttttccctcttgagaagcctaactactgcacccactgtcaggatcctgtgagtcacagagagacagagacccaatttgtttgtctgaaaggactttgaaactctttcatgtaaacattgcttgcccacttctttgtactctgcccaggcaccatgcaggtctgtgcttcctgctgggagtgaggaataagcataccaatgtgccaatggcatggcagacaggcttgtcctttctctaatggtttgttctcagtctgtcttagtcagggtttctattcctgcacaaacatcatgaccaagaagcaaattggggaggaaagggtttattcggcttacacttccatactgctgttcatcaccaaggaagtcaggactggaactcaagcaggtcaggaagcaggagctgatgcagaggccatggagggatgttctttcctgacttgcttcctctggcttgctcaacctgctctcttatagaaccaagactaccagcccagagatggtcccacccacaaggggcctttccttcttgatcactaattgagaaaatgccttacagttggatctcatggaggcatttcctcaactgaaactcctttctctgtgataactccagctgtgtcaagttgacacacaaaaccagccagtacacagtccaaaccttacctggacccatgatgttccctgtgctgtggagttgatagttgagcatgtttactgacaggtcacttccacaactcttccatactctcctgagcacatgttgtacttatttctatattgcctggcaaaataccatgacctacacaacttatgaaagaaatcattgcatggggtctcacaggttcacagggtaaaagtccatgaccattgtggtagggaagaagctgagagcttacaagtttagactacgagagagacagagacacagagagaaacagagagacagacagacagacagggaaagacagagagaaagacacacagagagacagacagagagagactctctcactgggaatggcctatgcttttgaaacctcacagcccacacccaggaacacacatccaggaagggcacaccacccaatccttccctctcttcttggcaaggggtaaagaattgttaaagatgttccatttaaagatgagtgcgtagtctctcttcaatactttgaccaattatgagtccctgtactgagggctgcccactaataaaaggagcttttcccaccaagattgggagcagaccaggtctgtgggtgtaaacataaatatatagaaggcaacatgacaaagcgaccatttaataaaataacaatagcaggttctgtgctggggcttatgatctcctaagccctggtcttgtgactagaattaccataccagcatgaaattccttcttgtgaagcaggtctcagatcccatcagaaagtagttaccaaccctgtaacagccatgccgctattgcacgggtgggtacacagcgtctgtctttcttcaggatttaatttttagcattgaattgttgggctagagccacagggcttcacagagatgcatcttgtgccagcccagactgagttgctatctccaagcaaggtgtgaaaatgctttttatttttttttaataaaagaaaatcatgctttatgacctttttgtttctttttttccctcttttattgaaaatagggttttttttcccctcacatactatatcctgtgtagtagtagccggcccgcggcctacatgaaccaggtattcctggaaggtaggctggggctgaaagagagactaggtggcaagaaaagaatgatgaggccaagacaaatttttctctgatcaaggcccacggagtttactaagagannnnnnnnnnnnnnnnnnnnnnnnnnnnnnnnnnnnnnnnnnnnnnnnnnnnnnnnnnnnnnnnnnnnnnnnnnnnnnnnnnnnnnnnnnnnnnnnnnnnnnnnnnnnnnnnnnnnnnnnnnnnnnnnnnnccccccacccccgcgccgctgcccccgccccctgccagtccatccctggtgctttgtcgccatgctgtcagcacttcgtagccaggctgttgcttattcaggaatgtctcaggaagaccggttcagcaggtagcagaatctcagggcagttgtcacttcaaaagaagccagccaagttggaaagctgcaccgcaggtggccccacctcagtggcaacaaggtctgcaccagcccgcttcaggctgggggaggctacaattctgattttttatttccttccctcctctccttccagttcctacctctcctccaattcagattcactccctttctgtctctcattaggaaacacacaggcttctaagggataataacaaaaataatataataacataaaacaaaactaacacattggaatgagacataacaaacaaacagaagggaaagagcctaagagaaggacaggaaatagacatagatgcagagacccacttgtcacacactcagggataccaccacaacactaaactgactgctatacgtacccaaaggaacaatgctggcctgtgactactgcccagtctctgtgagtcatgtgcgtcaatcatgttgctttagagggccttgtttccttggtgacctccatccctgctggttcttatgctcttcccacctctgctcctgcagggttccttgagcctcaagaggatggagaaaacctattgagggcagagttttccaagaactcactctacatattacctggatctgggtctctgtatttgttcccatctgctgcaggagaaaatgtctctcatgctggctgagcaaggcactggtctatgactatagcagaatgtcatttggagtcattttatcactgtgttcttttatagaacagtaatgattggttttactctcgatccctgggctatctggtctcagctcactcaagcagtgttgggtatgggttctgtcttgtggagtggtcttaactcaaatcagacattggctggttggttgctcccccaagctttgtgtctccatcgctctagcatatcttgcaggcaggacaccattgtagatcaaagaatttgtagctgcttttgtatttgcatccctcctttggtagtgtttaagagttccttcctctcccaaagcccatagcacataggagtgaggctctctgtggtcataatggaatattactctgcagttaaaaccaaaacaacaaaatcatgaagttcacagataaatgagtggagctagaaaaaaaaaaaaaacatcctggggacataactggacccgaagaagacaaatatggtatttatccacttatatgtgaatgttagctgtaaagtcctcaataagtaggctgtaatccatagccacaggggttaggtgtggagtacaggactagtaggggacagatagatctccctaggaaagggaaatagactaattatggacggatggtgtggggactggaatgggagggtcaagttggaagggaaagggaggaggaagagaagggaggggatgtgaggggagagacagctaaaattaagggccatgtatggaatagtatggaaacctaagacagtagaaccttaataaaatatatacatatatgaagacaaactaaagaaaatcgacaaatgttagggagacagagccccaacttgtatatctgttgccacaagaaccaggaatagattgaactccgatcaagtcattgtccaaaggggtcccatgaaaatccccaaacaaacacggctgttttcagaactgtagcttactctccacaaacttacagaaaggccctattaccgcagacagcacctacgtcacccattgaacacggcaacgccttttaaacaagcatctctcctaagcccgtctccaaacatgaaagttagttccaaggtgaagcagtgaatgacagcaggaatgtgagtgtgagaatctgctattcataaaagtaagccctgaaaaaaggtctctgatacggtggtaggactgagacaaaagacaagggtaatgaccgctgtggcccttggctgcttatggtcaattgcttttggctctcggaatgcagctggtaattaggattctaaatgtctctccgcttccagagtcactttttcaatctgaagtggaaagtagggtaatggttcttgggagcccattagacctgacacacaagaaagtaaagaaaccagcaatcctttccaacagtgagctcaaggtccaaatctagagtcactctcattaagagacaagcatgattttcagttgtctgtgctggtcacgtccttaaaagaaaatgttttaaatcccaggttagaggagtactaccagtaagcaattagaagaattagaatccagatgccgtcagccagtgagaaggaagtagctaaggggagttggtcttgcctagacttgacaatagtcgggaaagtaagagcacttattcctggccaagatcaagagactcagtgtctacaccttgaaagtatgagaccctcgcctgttctcccgaggaaaaccataatccaagttccttatgggaattccctgctttccacacaaccctccagctctgtgtcttctgaaaacaacctgaggagggtgggaaggtagatgtaggtctaggcttgtggcaccaacatcaaatgagtcaaataaagcaccgcaaaaacctgcacatccatggcatgccacggggtggcgcccacggggcggggagtgtcttggatcattcgcttgtactacatgcagcttggcttttaataatgttaaaaatcccaccgcaccacaatataataatcaggcaaaatggtctacaatttcggtaaagctactagtgaagaatgtgtgctcggctctgcaagctgtgtaactgataacaagaaggctgcttctgaaattggcagttgtaattcacacggaggcatcaagaacattacctctgttaggagaccggacgggtgatgggactgccggctccatattctacttctccacatcctcccagtttagaaaaagcccaaatggctaatcacgatttcggcagttcatgtgggatgccacttgaaagggggcctcccttttgaagtggtgtgttcattaggctgaggcggggactcccttttggggggaagggggctcaaggcagggtttctctgtgtagccctggctgtcctggaactcactctgtagaccaggctggctcgatctcagaaatctgcctgcttcccaagtgctgggattaaaggtgagtgccaccactgcccagctgggggctccccttttagggatgctcttgaacgctaatgtttggtgaggaccagaagcctgcttggttctcagactgcattatttagtggctttccaaacaaacactaggggaagctgacaagaaccaggctggcctggcagggtaaaggttcttagcgtccattacagtccagctcataaccgtaaactctccttgctcaggagcacagtaccatgcagaagttacactgcacacaagttgacaaaatcgtggcccagtatgacaaagagaagtcgactcatgagaaaatcctagagaaggcgatgaagaagaaggggtaagactgatgattgacttgcgatgcatcccccctgtaggagtgtgactcagctgccttcatggaccacaagggactcagtgttactgcgacttcatcattaaagactacccctaggaaaaaaatgtgatcccttcatttcagtccctgtgtcatcacagcggggtgtggcatcagtcagcttagttgtggtttaaggatggtctcaatagagttctcagaacctttagttcatggcaatctgtactgtgttttggggtttttgtttgtttgtttggttagtttggtttggtttttgttgttgttgtttgtgattaagaagttagcaaaaaaaaaagaatttaattactttcaccctaagaactggttgtaacgcctttgttttataaataattttttaaagttgcaataatgtagtagttctcctcagttccactctctagtattctaattagctgcaacccaccacactccaagacgaatttctatcatggtatatgacttgttaattggtctgtgttatcattggctaccattacacttcgctgtgtataatggacacagtaatcactgccctaggcctgtgagtgggacaaatatactacagctccaaatacctggggttttagatatccacagggggaagagggtggcttggaacttatgctgttgtgcatgtaacttggcctttcataatgttaaaccccatcttccctcagtaaaataatcaggcaaaagagttgacattgctgagataccgctggtggaacagcagtacattggctggtttacccgaccccctttctttctggggttccctctgaagttgcaccctgcacttactgtctgcacagtcttctcactctgtcatagagtctgactctccctgtctttcatgggcttcagttttgcggccactcagccacctgtacaatgcctctaatgtgacttctagagtaagtagagagaggttacagatctgtgagtgccacaccctaaggggtagcctcccccccagtgcacagggtgccactgcaggtgatgatgtgttggaaatggcagtgctgacctggccagcgtccatctgcatgtcccgttcagagctttcccccctttagaataagtagcttagggaaataccagacatattctatttctttcagacatcattttgatttgctctccatcagttgattgtatggtttttgtctttgttttcgtttttcaatgttttgagcgcccccccccccactagggtcttctagccttccatggtgtgagacaaaaggaggagatagacatctttctagttttcttctttctttctctttagtgttcaatccagataccacctagaaaactaaggatctggattcagatggattgtttttgttacaatttctggtccctaaattctaatttcatgacatggagccaatgtccttggcttgaagcatcagtggcagataatgatgtgcccacactcaaccgggggctccttttggaaagcaccttcctttttattacagctacattttctagaaaaacacaaacaaggcagtatatggaagcgatccaccttctgtttctcccatggctgttccatgtttcactgaagcagagccatgtccccatgctttaaaagcatttggattttttttttttaagtgagtcaggacaagctcagcagcccatctcctgtgcgcagggacatactgggagggaatgtagtgagtgtgagagtgtctatgttgttagttctgtgacactggccacactactcctggaatcactccgtcgtggtggaggaggcaggcagagcagcaggtcactctccttggcagaagcatgcggaggatgcagacactcatcactgaggaccaggaaagataggcaccagcagcagttcacaccgtcacaggcctgctctaatggcctgcttcctccagcaagatcctgctcctaaagccccgcagcccccagaacaagagcctctaaaaccacatcacacgcaaaccgtaagagctgatgtttagaggctctgaccacatcagcagcgttaccttttttttttttttaaagaaactttcccatttttaatgtaatttttaaaacaaaatgttgaaagggaggtatagaccataataccatgtttttaaggtacaaggttttgatggatttttcagctctttccaagagtaaacttatttttgtttacctttcacttaccaacaaatgtcctgtgtttttcctggattgctatattgacattttcttggttttttctattttcaaaaaaatcattttttgttattttgtagaattctgtacatgcatccaatgaaatacaataatatctaccttctatttcctccttctgaattcccccatacacatcttcctcccaactttatatcttacttttcatttaaaaaagcaaacaaacaaacaaacaaaaaacactaagtccagttagtgcagtttctatgtgcatgggtgtggagcctctttctatatttttaaatcagtgtcttgtaagttttcagactctgtactacataacaactcttcagagagggatactagggatatattgtccctgggacattagaaaatacccatttaatcttatttttattctcaagcataagtggtatgaaggtgatacttaggactggttgttaaagatgagacaatgaccatggagccgtcctcatgagcaggagttgaagtcctacaatgtgtaaagccctttgtcacgcgaggaacaggggacccaggaagcctgcctgggggtttctttctaggtccatgctgccgaatgcagatctgcctcccgactctgcagagagaattttcccagtacttgaaaacaagacctaaaaaaaaacacattgaaagtttcttcgaagccagttaccagatgttctcatctgcacagccagctccaaggagaacgtcctcttattgcctagactttgttacctggttgctgaaattcatgtaaagggggagtttggttatatgcctttgatcctctgcagtggactggctaggctggctggggtgaatgcaccttgcatttctgatactttcaacttacagtgtgggctcatcagactccatcccatcctcagcgaaggagcgcctgcagcctgcagccgtgtcccctgttcttcatacccgactgaagggagcgatggaagcgagacagggagtttgcactgaagtgctcttgcctaactgtctctcatgagttttccattcagtgtgtttcaggtgacaggagaaggtgaatggggaaggcagaaaaagaaaagccagggttggagaaatcagaatatatgtttctgcaaaggcagacaataaataaggcatatgcaaaagggaataattatgcagccgtgacttcttaatactacagggatccttagctatgccggctgcttaagggcgctgaataaaaaccatcgtagcatttattgtgagcgttcctggaaggaagccagaggaacatttcggcatgctggagaagaaatgcactgagtgctggccattgaggagcagagggtgtgatgggagtttgcagcagagagcgtttctctcagggggtgcttctttaatagaacaaagatcgtgagccgggctagcgtaagccagagcatacgtgctgaggacagagcctaggtcctgtcctggtttcagcaataatgtggagaagaaaataccaacacagaaataagcagtaatggatgctgggcagttgcctgatatatattttctactcctaggaagctaagaagccagcctccctcccttgtcaaagtagtgccaataaatgctattttcttcctcattggcatgtttaaaagacaaaaatctggctttatgaccaacatgaaagaattagacattcatttcatgttggctgtttgcatccctaataatattctatgaaataaataaaaaacggcttgaagaaaaagaggaaccaaaatggaaactctgacaacagaccctacacaaggcaataattgctaggtctgaagtatctctttgtgctgttgttgaattgagcaatcacgctacagataatattttctaaggtaaaaatctattgctggaaatggatgctgcccaatgagccatggcattccggatatatttgatgaatatattgtcttcaccagaaagtgttgttacagaggcccaagggaactgaaagatatctaatttctggcatgcattttcaattctatattttcaggggaagtaattgtcttgaaataaaaaaagaaacagaaattaaaattcagaccctgacaacggatcacaaatctaaggtaagaaaaccccggtttttgcatggtgacttgtaaaggatactttatagtttattttagaaggggcaactctggattgatctggattgatctgatcagaaacaataggagagagttggactgctaggacagggtcggaggtttgtgtttgcctcaggtttactgtctttgagaagagccacttcacggaagtctttttgtcttgtgtgtagaaaaaaaactaatgacatttatgttgtttgatgaccctgatgcatgaagtaaaacggtgagccggtgagccaagaggcaaggaaacagtgaatgtacagaacataccttcctagggaggtaacatcaaacatgacacaggaacagccagactgcgggcggagtacacacttacatcttactgcatctttgtgaggcctggatgtcatgctgtttaaaatggatttctcctttgtgttttatctttggtgtggcaggaaccgtacacccagggatatgagaattagtgcttcatgcactattgccttgtgttttatatactttcctcctataacacggaaaccttggcgatggtctcagtttgctttggctgtgtgctacgctgccaaaacttaatgcctttaaacaactctcattgattagctcattattctatgggccacacatctgagccatattcagatgggtgatgaccctgactttgtgggggcacactcaagcatctacagttagctggggttgctatcctcactctgcaaaatgcttgtgtttcttgaatgacctccacctccagcaggacagtccggtctcatttaaagggcaacccccatagaataggggaaagacctctgctttggacatatttgccactatctcattggctagagcaagtcagagagtcagatttcaggagctggagaagcagcctctagctgttgactagagaactgcaaagccacaactttgcacaaagtgtggtcatgagaaggagaggtcttcctaccctagtgtctattgagggtgatggagtaagccagagcctaggcataagagagcgctctgctctctgttcagacctgtggactgacagaaatggagctggaaaagcatgagatgataaagagaaatatgctgaaactgaccaagatcaagacacaccagagtataagacaggcagtgaaataccgggccgacgtaagctacttaacagccagagtggtgatttagctcggtacagtagtgactagtgtgtattatttttgtgtggcttgtgaatgtccattgattcacaatataaattgtgatctggcctgcatacatagtcatgctttcagcgcatacctgactcaagagattccagatgaccccatcccatttttttctgaaacaggtcaaagagattgtggcccagcacacaaaggagtggtcagaaatgatcaacactcacagtgcggaggagcaggaaatccgggatctgcacctgagccagcagtgtgagctgctgagaaagctgctcatcaatgctcatgagcagcagacccagcagctgaaactctcccatgacaggtgggagggccagatgccatactgctatagatctttgtgtcttcaaatgactggtgcgtgtgtgtgtgtgtgtgtgtgtgtgtgtgtgtgtgtgtgtgtgtacacaaaacaagcaaaaatcaacttgacgtatttcgcatacttagtgtgagcaagctgatttgtaagaagtagcctctgccaacagtgacttataggtgttaagaaggtactacaatcaagtaaagttagctaagattgcaagttgctataatccatattaaaatatggtcttcctcttctaagtgttttgaggatcaacagtaagttatggctggaagtagaaaggacctgaatcctctaggaatatgaggcatggggagaaagcctggccggtggagctcctaggatgactctcatctcacagtggcaatgcattagagagcctcctcctttctgtatgttgttaggcatattgtgttagaaatactgccgggactgagcggactcctccctgcgtagaagagcatgtctgctgactgtatctttccatcccagtttgctagcagcgtgctttttccctattaaggatctgctgtatgccacagttatggtatgatgctggtttacacaggacagggcaaaacaaacacttttttaccaatagagaaaaatgatcatttttaaaatggcaactgcataagttatatggtagtatatgaaagttcccagccttgctttaggtgagacatcctgctgtgagaaaatagagtggtgccttaggtcccagtgcttgtgtgaggcaagtgaacagtgtctggcatgatctggttccgtcaagaaatgttctgtactctgtgaagtcctaagtacttcgtttacatattcagtgtaagagctcgtattcctttttcgtcaagactgcttttgattggatatgtgctatacaacgagtctaggcagcatcccatcctgcctttgggcaatgctgcaatgtcagcttggaggaaccccctgccattattccaaaatgtgttagagtctggggcacttcctggccatcactttagtaactgcatgaagaaaaatcatgagtctcaaacttagatattttttgaaaaaaaaattttaaatgtaatttttcattgcttaggaagtcctttttgaaaaccacaaacccagctgctaatttgtctttctaagtaagtctgtgctaagagcaactctcggagtgagagtgggactcggggtttttttcccctgcctgttagatggtgtctgttttgcttgctaattcgtattgcttttaccaaatgcttgtcattcatacagtgggcattcgtaagtgttcttgcttgaaggaaacaaaggaagggtagggggcagatcgatcactttacaaagaaatcatgggaaactctgagagtggttgctttgggtccagcgtttttctcagtgtcctgctgatgagatgtaaggtggctggctaaagcttcattttagcattgcccatctctcttgatgtagagtaaaccactggacttaggtaaccagcctcctcgcctgtacattgcaggcaaagacataaggggatgactataagttaaaattatttgtaattgcatcatttaaatattccaaactatgtgcctttattgtctacaagagtgaatcaaagatagacatgtccattatacatacctgtgcacttacacaatcattagtcacctgaaatacatacaggtctacttcctgtacttacttgaaactacatagctccactcgtgtctatgggttgtttgtcagcaggaaggtcacttgtgaaagttatagcatcctgtcgctcccatcctgtcactgctgggtcccagacagttcatggtgaagctggacacctgtgctttttttgttggttggttttgtttttgagcaaatacagcatctgatcaccgaccatgatgcatgcttccactagatggcactaccttcctcagccatctccattcacctgagcctgtcagttgtgtaaagaatgtgaacctagtcctacggttatgtattgtattgaggtttttatctttcgtgttataaatcataaaggcaccctttaggagtgtggcacaaagagccatacattcgcattgctataccctcttagcatatatcagaactccatctgaccgctcactgaccttcaacggtagtctctctggattctaactctcctctgtatgcctctacatttatttacttttatttctatttcacagggaaagcaaggagatgagagcccatcaggctaagatttctatggaaaatagcaaggccatcagtcaagataaatctatcaagaacaaggcagaacgggaaaggtaagtgtgagggtgcttgctgggactgtctagtttactgggaaccagtgtcagcaacatttggttatgtgaactcggcatagatctgagatattaatactgtggtgttcgaagagtcctgttagtacagtttctatggaagtcaattattactgcaataatagagtagtttctgatgttttcctgataactgtcactggtaaaatgtatttgcattcacacaacatatgtacaaacctgacaataattgatataatttcatataattctttagcatttctcctcccatcggtctgcaaacttctctcctgctccagtgtcagcgcgtcctgggtgagatgggtctgaatatcaggaaggcttcctcccaccttgatttgctgcctttgtcaataggaactatctgtaaagtttccacatagatttttttctcgtttgttctcagttaggtgggctttctagaagaaactgaggcaggaatccagggaagacaagatggggtggaaccagacctgctgtggtaaggctatggttgggctttaccacagctggtgaagggaacctgagacagagcagcagccatgctgctgacaagggggcattgccagtgaccacagataatagtcacccatcatgatccatctctaaagacccaaagccatctattctacaaatagaagaccaggcagagctgaggagaacaatggctatctgggctcctgctcacaaagaaatggtatctaataacgtccaggtccactgaaagactggtttctgctctacaaaacacagaattcagattagctcttggggaccaaagagtaaagtgagtttagaatgtcagactgatgcatcactccatgaaacatgggctgctagaagactctgcagcccaaagatgggatcttctgggcttcatctccagattcctggccttctgagatgctcagtggatactgacgttttaggcaggactgcctcggttgtatttattcttttcagttcttaaatggtgctaggtaataataaatcaagatatggcaaaatataaagcatccaactagttaatacatcttttatggtaaagttttataaaatgccttttaaacataatagctccacccctcaatgggaagtagcattccacagtaatctatttattattatatgtatttatttactttatgtgagtgtttgtatttgtgatgtgggggaggggagagcatacaggagctgccacaatcacacagggtgctcatatgtaggtcagatgacagcttgcaggagttggtgctctcctgtgggacccagggatcaaactcaggttgtcaggttggttttaagttcctttatcccttgagccatctcactagttcgccacagtgattttgacctggagacaaattgcttttttattttaactgtttggccaagatatttctcaatcattgtggagtgccatctgtgcctcccagtaagaaggttcaggggaggacattagtcatctgttcaagcaattatttgtaggctggtattgtagcatctctttggtgcttgttcacttttcaaaggtgccaatttctggacattttcccagataaggatcttcgtttgagagtcttgtatacatggaaatacatcttctacccggaaatctcaaatatccaaaacataataaatacaaattatttttgtttgattttcttagactctggtgttaactttgaactcctttagcctgtacaaagtgagatataacagtcagcatgaagaccagactgctaagtagtcattgattgtgttttatcaaatgtgttacagagtggaccaggttcagctgagtacaagctttccttttccttttccttatttttttttttttacatgcaatgcttccctacatttttaaggctaccctggaactcattaagctcctcctgtctcagaatattgagctctgggatggggggaccggccactcatctcagctttcaaatcaccctaaactttaaagtaccactaataccatcagctaggcttttgaagtagccaggtgttgggggtgcacgcctttaatgccagaattcgggaggcagaggcaggaggatctctgggtttgagaccagcctggtctacagtgtgagttccaacacatccagggctacacacaaaaaatattatctttattttgatttgtatgtattgactgaaattttgtatccatcattacatggttctaaagcatcaacaaattgctgtttctataataataataataataataataataataataatagtaatagtaataataataataacaaattgctgtttctataataataataataataacaacaacaacaacagcctctctgccaaaaagccacttacctatacagtagcatattatatatagtgtggctttggctttatcacactgctgaggactaaggctaaagacttattataggacttagcaagaccaatagaaactaaaaaactattcttttaaacagaaattatacggtatttatatataaaattaaaatgcagacactgtttatcatggacagaaattatagcgacttttacatgaaaatcatgggtatttcttaaaagatgtgaaaattaatgatctgaacgctcaaagaatggagaaaccaaagtgaacatcaagatcccaggtcaaaataaataacagaatgcacaaagtgctaaagtaggagagaaaaaaaaaaagcaagagaaagcatgcagaaaagtaatagcttatctaaaaatgaaaaacaaacaaacaaaaaaaacccctagtgactcactcagtagattgtcagcaagaatgatcaagaagagaaaagaaacatgaattagtgatatttgggatgaaaagtgaaaataaacagaggcaaatcactttcaaagcagctgtaatgctaatggtaaatctgaaactatgcatagaatggagaattgcttcggaaaatacacacatccctgtggacagccctgcatccatgtgaatgcagtcagcactaattggatttgggggctattaatggtgataataagaacaaaagaagacatgaacatggagggcaggccttgggggaagctggaggaaggcagtaggaaatttagaatgttacgtgtatacattttcaaagaagaaaaagaaaatactagtctaaaagagaaaacgaaaactgcacatgccgtgagcacaaacggagaagcctaagcggacaccattactgcaggagttcacccagttctgttgtgtagtcatgaaaaacctccgaactaacataggggaggaagccgtggggtgaagataaagccataggacgaagatgaagttgtctatatcctaccagcaagcaagtcttggagcttgagtttctgaaggaaatatacccaaaatatcctaagtcctgaaaacacacaaaatgattttagcgtgccgactgattttaacagtgctttgtgggatcccattagaaatgctgatgcccaggccctctcagccgcactgagtcaggctcttaggtttggagcacagcagtctgtctgtgacacaggaaaatttgagaacacttagttgtatttcctgtggatacatccattttggttaaaaatattaagatatggctaagtaagcctctgtcagcctcgggacttcctccaaggagaggaagaagggaaaatagaatgtgaaggagtacagaggaagtttaaattttatgtataaaattctgtctttaaaaataggagagcagggactggacagatggctctgtggttaagggtgcctactgttcttgcagagaacctcagtttacttcccagcgcccacttggcaggtcacaaccgcctgtcactgttggagaaagtatttaatcccagcccccgccgttgctatttaagttcctggatgaaagacacacacacagctttatatttacaataagcctgcaacaacacaagagctgggcagacatctaccctccatactgttaggatctactttcctatcaataaccccgagtactacttgctatgtttcatctgggctgctcttaactccaattggccagcccacaagctcaggttctcttgactcctaagccatcctggcttctccttcctcctcccgaactcctcttcttccctttctggttctcctcagaccccaagccctgggaaacctaaaccccacctatgtctcttctacccagctattggctgttggcatctttacttatcaatcagaaatgacttggtcacagggactacatacagacttcaggacttgggggcccgcacttagcagtacaaaatctcaatctataactccagtaccagaggcttcaacaccttctgtcttcttggggctcctgcacatgcgtggtggaaataaactcacacaggtaaacacacattcacaagaacgggaaattataaagaaacataagtattggttaatctgagtgatgtgacaaggtggttttatattttcctatctattttgtgtgtttgaaaaaaatgatacaataaaaatgaaagggaaaggatgcgacagtcttctccgggaagcgagagaagacagtttgtggtgggtgaaagtgacagtcccacaggctggtggactgacagttctttgtctccattgcttttaggcgagtcagggagttgaacagcagcaacactaagaagttcctagaagaaagaaagagagtgagtatcccatgtttttctcgacactcctctttggaaaatgtaacttgtgcttgcatctcagccttgcaagctcatttacctaatttcattttttacctgtacattaagtattccagctttgcccctccctgaaagccaaagccatctcttactaaaatcattatggaaattaactgacatggctttgtggaggtgacagtgccaccttccagtcatgcataagtgctcagccattttctaagacttgggaaggaaagatctgcccaatatacactacgagtttaaacccttaacagttttcaagctcttttttcattcctttttgaaaagtgtgatcacccccggctaaattataaacccagtaagctatccaccatttataattttaagacaacatgacattgatcatattttctttccagctggcgatgaagcagtcaaaagaaatggatcagttgaaaaaagtccagctggagcacctagaattcctagagaaacagaacgagcaggtatttcatcccgtgcaaataacagacataggcggcccatcagcttcaggggtgcagtgccatggcccacgggaaccctgtggtcaggaaatacagtggaaggtagagagactttctgggtcttactggacttcctcctcttcgtccaaaaagaacagaagtgccttttgtggagggggagaggcaagaggctctgggggattaagagtgtaaagttgtcctttgagtctatgacaggatgggttctaagtgtgatggccctaagcaagcaagttatgaaccacttcttcatttctgtttttagctttatagcttacaggctgcacgtgttagtgtattaaaagtaaaagagaagaaccgtctattttcagtgccaatctaaaaggtgaacttgtaaattcttcccagggctttatggtgggatctaaatccatgccccccacaactcaacaacccagtgaagagtgttcagcagctttatggtgggatctaaattcatgtcccccacaactcaacaacccagtgaagagcatcttctcggggtttgtttgtttcaaaaaaaaaaacaaaaaaaaaaaaaccaaaccactcaatagagaagaacagttgtacacagcagtagttatccaagctccacttagtcagtttcgacacctggacaagtctgtttccacgaagcatgccaagtgtagtatagcaggctccatcccatgtgacccactgcccagcggccttcctttgaaccctagctccccaggcgggaactcctagcaaggcgcacatcttttctgtctcacttggtcccgtttcaatcttggttcaaggcattggacttggatgtttatcttcacattttagaaactgtatagagcttttgaagaaataatcatactgcatttttcttttacatgtcttcccttctaaaaagcaatcctacctaagattttttttcagagttaataactcatcctgaagagtacttcagaaggaattatactttgaaaggtccttaagagaggaacacaaaaccacaaagtcatttttttgtgttgtagcttaggtaacaaacctagcttcttgtttcaagtcctcgctcttgctctcactctctgttggacagaacccagtcctcttgtgggcatgaattaagttcagctactcagttctagtcataaataccgcccgggtcctctaagagaggcagttcacatgtttggtcctagctgtccagttcatttgaccaactcataaatacatcaggtacacaccatacaacttatgctctttcctgaaagcacttctcagtatgtgtccccaaggtgacatgagactataagaaagggttgagccactatgatctccaaagcttccgaactcactgggggctgggggaagatgttcaaagaaagcagaggataagcatctctgaaaggctttcgaatcttctttcaaagaagggcctgatgaaaggcaaggcacgcttagggtttaactatctaaattaagaaactatttagaaattactgtgttgcttagcaacaagtttgactaaagaatgtaaatgtgctaaaaattactcatcactacatagctagagaatacagttttcaggtgttggtacttttaaagcataataaagaaatcactatgcgcattatactaatacatgggtaccttgaactatggaagcctacttgcattaaaatcctggattactggtagttgtattgattggaccatgttggaaagatccaggcttttttgttcttaaaactcacatattacctattaatatgtcataagtacatctaccacccacaaaagtgaaattttgagtcacagaaacttaagaaagcaccgaacgtgaaaaatatccagatgtaaaaatgtaatgattttcaaggaaaagtcattccaatagaaacgttgtgcaaatgtagaattggggattgaatttctacattcagctttaatttgaaaatataatatcttgttgcataaccaattaaacgcccggttttggtagtatgtatttttttaacacgcaggtcaggaagcactgagtcctcagtccctctgtctgctataatcctctcctgtgcacagggcagagacgcagggaatcccctggcttcctcgtaaacacaaaggctgaagccatgtaacggagctccattaaaagccaagtacacattcctttagcaaaacaggtcaccatattcacacaatcccagactcgtaaagcaatcttccaaccctttgttaagccccaggtttcttccttgtgtgtaaaccaaagatgctttaatctacacatctatattatatcgccttttatggtttcttactttttcctattatagtcttcctagccatgccctgtcaaccccaaaataaagcccggtggatctatggaactaacgagaccactgtcaaaggcattgggcgaaacagctaaagggctcacactgtttggtcttgattctggatcctgtcctttgtaaagcactctctagcctggcttcttttatcagccagttgttcgcttagcttcccaagggccaggacatatatgtacacatattgtaatcttgtgacttagtttttctcatagtcctccaaccacccagtgttccatctgtcttgacatgtaccatttcagacatttaatgattccatccctgtcacatttaagtcttaaaaattagtatctgtcatcaaccctatcattcaatagagtgagggaaatggctcagcaaagctaagtctccctatgcactcactggagagtgacacacgatgtgctaataggcattggttgtttgttttgttattccttttttcctttgttgagctcagcttggggaaagttgttgctgatgggtgtgtacatgttttactcttagcttttttgcttttctgtatatagttttgcattcatttctcaaaatcactttggtattcatttattttctttgttttctatatatgactcaattttgacattactatttttgtacaaacagcttttgaaatcctgtcatgcagtgtcccaaacacaaggtaggactgaaattttgatgataagcaagaccttgctttccttcctggctatgtcagtattcttggtttgatttccatttatgactgccatctggtcatagctaactgatatcttaagggtttagacttaaaaccctggctatttcatgcttgaattcctcatactacttaatgggaaatgctgtcacatttgcttgtgggagtgttttatccagcatttccaattacaaatccaagaactgggttgttaccatgaagacaacccagactgagaacattatttttatataatgtctgttggtccttttcgatgatgtaatgttgtggtctgcgtgcagaaatgttataatacaatggcttttgccatgttctctgttaagtctggtctgcctatggctagtcaccccttataaggtgactatataattgactcttggaaacagaatgtttttgagaaagatgtctgttgtaatagccaaacatctgctaagtgatcccaggcaataaaaatggatggccacgctacttgtgttacaacttagctctcagggcaatctttgaatggcatttcattatgcattttatactatgttcaatagaatccttaaatgcaaaggggccaaaatgtagggaatcttttattactgtttactgaacaccaagtcatttaatttccagtgctgaaaatgtgtcactatcatctctcacggatactgtttgtgtcattatttcatgtttgtatattttctccatttcttcattttcttgtgagtattactgtatgtcagacattgaaaataatatggctagagggactcactagcctcaaatatacatggatctaaaactctttagtgatgctatatctacccgcactaaaatgaaaacgaaagccataatgttgaaataataataataacagcactgcattatctgtgacataaattgatttttgttctgggacttcatttgggagatttaggtatttctaggatgatctagaattggccagctccttcctctgaccttccatttagctggaacttcaaagcaaacatgaaccgtaatatcatggcacttcagaattttcctttcaaaatatatctctattgatgtgtcattctccattcttacctgtcctttgtttcagtggtacatcactgaaaaaaggaggagggtttcttaccctttcaaacgttgcaagcatgtgggttgggcatctaggctttggttggaaagtaagtaaaagttgaaatgaatcacttgattgattttcccatgtccacccctagaacctgcttctatagcccctctcaaataagcttgttgctttagtgactgtcttaattcatgattttaaattcaccccagcttatatcctgccagtccgtaaaaagtaaattacttcagagaagcaagaggccagagtttgaatagtaacatttctagcaccctgcctgctcctgtaatgttctgtttgtaggactctagccaaagctgtgtaacacacatgcccttaccttgcctagccccatcggtaaactctgaagtaattacttttaattaaacttcaggctgcttggaaaattagttgtacgaaaggaaagcaatgctatcctgaaagtgatagaattatccaaaaaaaagtcacgtgacactaaattaaacagtttgatttgacatcatctaagtatctggctcaagttcttttcatgtggtttttcccagaaatttgtaggccagattttcccagatttttgtgtaccataaaagtttcttgcaagatcctgttgaaagaacgattcagatcctgtggcttttaagcaacctccaagactctgcatttctgaaaataacccctagaacttctgcggctgccggtccgcttgccatttatgtaataaggatgggtttagcaggaagagaggctagggccagtgggaatcttcggaagggaatttccatgcataaggctgtgtttctggtgttgtaggcgaaggagatgcagcagatggtgaaattggaagccgagatggaccgcagaccagcaacagtagtatgaaactccagagtgcaaactgaagctggaagaccatgcaacaccagaagatcatgcccagcttccaaacacagactccacagacaaaagctgttttctttgtgtttcttttatgtatagacacggtgttacctgaaaccacatggactggggatgaccaaacgctcttatatttaacaatttgagtattgaatttctttggccaaccaaaagtagctatgtacacatacacacacacacatacacacacacacacacagagagagagagagagagagagagagagagagagagagagagaaatcccctattcctgacaggcagagttgaatcatgatatatgacttaaacatgtttgctatgagacagcatcacaagccagtgggcttggtgataacaactctgctttgtggtgcattaggacatgtttgagctgctgctgctgcaaaacaaaacaaaacaaaaaaattagtgcattagtaacttaatagtaagcgcatgcactagaagaaacacctctgtctccagttcattagcagaagtggccgtctgctatacaaatcacttcgcagaattttctacacctaagttacctcatcagtaagtgccatgtctttaccatgccataagatgctaaccttcctgtaaatgttgcagaaatcgttaggacaatagagacacaaaacggtgtatctgtgccaagctcatcaatgctcccagggggactcggcaggctcgtttcagaaagtttacagctgaccctgctttgtaggaattgcttctgccgattccacatattgcaattcactctacactataaggatcgtcaagtggttattggcaaatgtttgtaaatgtgaccatgtacaaagtatttatactccttaattctcacagttatagctcaaagtcatctaaatattaccacacgacaagactagtgagcaggaatcatagacgtaatgttttgcatgatgcacaagcaccaattatgactaacccattcaaacacagttaacctaacaccaaataaatactggttaagtaaatgtacggcacagaatattatttgactatcaagacttttagcataatgaaaaagtctatatatatgtgtatatgaattatgtgggcattcttgatacttcaagttctagtttgaaaaatacataactaatttaattttacacaaaaatatttatgcagattttcagactttcatatcaggaaataacctttttatgtctgttaaatatccaaacaatttgctaccgtgttaatctgcatggtcttctcgcctgctgtagttgccttgcaggtgtctcataaagtggaccgatgggatggagtcatgctgcccaaactcagaggagcatgcagggatccggtagcctagcaagagtcagattcctgattttagaatacaaaatgccaacttaattgttgtatatggttgtacaaatagattctgtaccttcctctgaagagggcagagaagattatgataccatgaaggctaaaattcaatgtacaacttctctaataaaaaatgaaaacacatgtaacatctaccagagtatttgcttccacgatgctttctagaaaacctttgcctcttcatgtatgttttcttcattattttcaaaaaggggctttatttcccatccccattgtggtttcccccaactgacacagaacacacagattctacatacagaagtcatgagctttttgtccctcatagttatgagttgaatagctcataatagctctgtaccctgtcaaattcctggctttcttctttgtaaaacagtagaatcaagactgcatatattcagcaccaacatcccatttgataaaaggccctcacattgggattgccggttttcaaaataaaattgttagactctcttcctcaaagccagtgctccttccaagagcctcaggctgctgtcattctgtcatctgccctgaagctaccactcaccacttgtctttgcttttcagaaggctcctagtttcccatttttctggtcatgtgatctctgggtctccctccttctataccatggtgaatagttatagtttgcagttttagattctgaaacagttttaatttatcccagattacttttttcttttttattggatattttctttatttacatttcaaatgttatcccctttcctggtttccctgcctcccagaaaccccctaccccatcctccctccccctgcttctatgagggtgttcctccacccacccacccactcccacctccccgggctcaattcccctacactggggcatctattgagccttcataggaccaaggacctctcctctgactgatgcctggcaaggctgtcctctgctacatatgcggttggagccatgtgtactccttggttgatggcttagtccctgggagttctgggggctctggttggttgacattgttgttcttcctatggggttgcagaccccttcaactccttcagtcctttctctaactcctctataggggacctcatgctcagttcaatggttgactgcgagcatcctcctctgtatttgtcaggctctggcagggcctctcaggagacagccatatcaggctcctttcagcatacacttcttggcatccacaatagtgtctgggtttggtaactgtatatgggatgaatccccaggtggggcagtctctggatggcctttccttccgtctctgctctacactttatctccatatttgctcctgcgaatattttgttctccaagaaggacggaagcacccacactttggccttccttcttcttgagcctcatgtggtctgtggagtatttgagacatatttacccataaaggatctactggaacaacattaaagtcaaaacatataaaataacagcaaaattatgacctttgctgtgtgctagagaggtggatcagcatccaaaagtgcttgctgtgtttataggtgaccagggcttgaattcccagcatctacgtccaggtggcttatgatcagctgtcattccagccccaggcgatctggtcccctcttccctctgtacacacccacccacatgtggcagacagtcagacagacacattgtttacaagtttatgcgccaaattctataattattaaagaaaaaaaaaccttgataattaaaatgactcattttcttatagcattagaacactgctgtgttttagggcatgttgctctagtgcccagtcctattcagagcactgtctcctctaggagttcctatggcctccttctctagttgatatctggctaagaaggaagctctttgttttctgctaagtgggaggagcttctggtcttccagacaatctgaagctctgtagagtgagcctttttacctaggtttttcaagatcactgccactgttctaatcgtggctgttcattttagcatttttctggtgcatacagatgtactggatcttggctgtgccaccttggattccaccatgacaccacctttgtctgggtgtctcgtatagttgttctaatacagtggagcctcacaaatccaggatccttgctgtcacctggagctaagtcccaagaaatgcaaagtgagcctggttatactaagccacagacttaccagagtttccgctgttatctggcttctgtatataggaattttgttttcagtttaggactccgaaaacttcacttgatttctttttagatatttatagatctcacagaataaagatatcctgccggtcaaattacatgccacccaatgatcactaccacatctcttgacttaagggatggtaaaatatgaagaatgtgtacatgggagaatttgtgaaacatagtatttcaaatgttttatgcacaatcttcaagccccaaggcttaaagggggctcaaattatagggtacaagagcatccttcagaaaacctacagaactgtctgcacctgggtctaacattcagcaatgagcttcctggaaagtaattgaaaacaggaaagaaatctataattgatcacttgttgagagatctgtttttccctccattctttcatccaatcgcatgccctcagttatgcttgtgaagtgtcttacacccttgtgaggagaccctctatctttcctccttagagatatcaagctttacacagacagtgttcacattgtgtgtaattaataaaaaatggagcccggttctccatctgttctccctatgtgtttgagcgatcctagccactgcttaacctggggcaatcttgttctgcttggcctcatcagcccccattcccagctgctgacacaactacaaattatatctccctgttctgagaagcatttttctctttccattaaacttctctgcttctttgacacccaggagtttgagcattcttacttgtaagcatacatttttttgcaacatacttttaataatggttccacctcccctctagcccaccacccagcagagatagtggaaaagttattaggctattggggcagtgtacctgttcatcagtagttctttggacgtgagcttgatcttaggcagcagttcagtcctgtagcaaacaccaaacacaattcagaagctacagaccagtcctctaggcagccaagcatcaggcagcttcaggccagccctttcagcaagtagacatcaggcatggaccagcaactctagttcatttctgaagaagtcaccaggattgccaatccgcctgaggcgaggctgcaaaagaagcaagctggtgcaggaacctaaagatcagttcttgggtgagtttcaatggcggtgttatcacaagttgaactcaacatcgctgtgtacggtgaaccaatacttgtgtgtccttagtaaagaataattcggcagagcaaaccaaaccaatgctgagttcacttcccactgtctgtgaggtcatatttatactccttcatcaagtgtcctttcacgtgtttgctatatccaaacatcctttcacctgtgtctgcttcgggaaaatgtctttcacgtgtttgctttagcaagacatccacatcctttgacgtgtgctccaactaaacatcatttgacgtaactaactttccaaagaactagaagtttccactttcacctattcaacttctgttcccttcaaatcccttccatatacacagaatagttttgccaaatgatggtcctaatcatatttccatgccatctgcacataaggaattcatatctaccagctaaagaataatatccactttattgaacacagtattacatttctagtctaaacttgtctactcacgtaacccatctcagcttatcattcattgttaacggaaggataacactcatcttttctagcccactacacagtattctatcctgacacaatctctccagccaggcagtggtagcacacacctatgatccccgtacttgggaagcagagggagatgggtctctgaatttggggtcaaccaggagtatcaagaaggaagcctcctcaaagttgcctttgattttcaaagaacaatgggctgttcaccattattggatgatttgaagtatttccagtaaggtgaaatttaggacttataattgtgtaacttcataagcaggaaatatcttcaaatacctgactgaaaaatactaaaataagctttttgcagaatatgttttcaattccaagaaaaaaacaaatacttcaaatccaatagtgccttttcaatgaagtccagaactgggtaagccattcagtgttggggtacaaacctgggacgtgcatcgatcatcagcaatgcaaaaaaataaaataaaatagtcaccatcataaaggccaccaggaacttaacaggtgagtctgtcaacattaggagcatgtgcagagtgaaggatagatgttcttattgttggtgttgttcaaggatacttcattttaaacctgaagcagcttttcctttgtactctcttctgcaactctgtatgaggaccacatttctttgaacttttccgtgatactcttgttttgaagaatcccaagcacactttaatagttgcacctttagtataaatctgaggttgaagcagctgataagaatatttatctttaatatttcatgaaaagcattctgttccatcagagtagtgaaaactattgataggaaggaacagaatgtaactttaaacagcagcaccattatttctgcacaaaaagaaacccgtatgcctgagccagtaaaagaggcaaggtccctttcacagtcctatctttttctgacttgcatgggaataagtgctggagctcagttcctgagatgctttatcttggacatattagactccgtcacaaggaaataacaataaaagtcagcaaacaagaatatatccaaggctcaaacgtctgtttgctaaacactagcttaccttatgttccaagaaatttctttcccaaagaaaggaatctgaatgttcgtcaaaacacatattatttattcttaatattaaaatagtggaaaccaagttacatcaaaaggggaccacatcaacatatgtggtttctttataattccaatggcagaaaatcttcgagtagcttagaacgggttccctcgtgtgacctggcctgatgggaatggagtgtagaagtggttctcagaatgtatgccaggcaccttgggtccatcctgtgcttccaagaacttgcataatgacatgggaacatctctagtttccaggtcacctctgtagatgatcagtgtgtgtgtgtgtacacatgtgtgcatgcattatgtgcatgtgtatgtatgtgtgtgtataaatgacatcacaacacattaaaaggaaatctttcagaatgtagatgactctatgaagctagacattaaaagacgtagaatgatataaacagtgccactctaccaatattttgatgtcatttttgcatttaaaattactattaacctatattattatattattatgtattaacctatattactatattaacctatattactatgtaacctatactagttaaatattagtatgtgataggttgagtgctagttgattggactggtaaatatttgaaaattactgttttaatttctaagagtagtatttacagacaaattcacacaaacaaaagctcatattccaggctagacagatggctcagtggttaagagcactggctgctcttccagaggtactgagttcaattcctggtaaccacatggtggctcacaaacatctgtcaagagttctgatgccctcttctgatgtgtctgaaggcagcaattatgttctcatatacataaaataaataaataattctcttttttaaatttttaatattttttattacatattttcctcaattacatttccaatgctatcacaaaagtcccccataccctcacccccccccacttccctacccacccattcctaattttttggccctggcgttcccctgtactggggcatataaagtttgtgtgtccaatgggcctctctttccagtgatggccgattaggccatcttttgatacatgtgcaggtagagtcaagagctccagggcactggttagttcataatgttgttccacctatagggttgctgatccctttagctccttgggtactttctctagctcctccattgagagccctgtgatccatccaatagctgactatgagcatccacttctgtgtttgctaggccccggcatagcctcacaagagatagctatatcagggtcctttcagcaaaatcttgctagtgtatgcaatggtgtcagcatttggaagctgattatggggtggatccctggatatggcagtctctagatggtccatcctttcgtcacagctccaaactttgtctctataactccttccatgggtgttttgttcccaattctaagaaggggcacagtgtccacactttggtcttcattcttcttgagtttcatgcgtttagcaaattgtatcttctatcttgggtatcctaagttttgagctaatatccacttatcagtgagtacatattgtgtgagttcctttgtgattgtgttacctcactcaggatgatgccctccaggtccatccatttgactaggaatttcataaattcattctttttaatagctgagtagtactccattgtgtaaatgtaccacattttctgtatccatttctctgttgaggggcatctgggttctttccagtttgtggctattataaataaggctgctatgaacatagtggaacatgtgtccttcttaccggttgggacatcttctggatatatgcccaggagaggtattgctggatcctctggtagtactatgtccaattttctgaggaaccgccagactgatttccagagtgattgtacaagcttgcaatcccaccaacaatggaggagtgttcctctttctccacatcctcgtcagcatctgctgtaacctgaatttttcatcttagccattctgactggtgtgaggtggaatctcagggttgttttgatttgcatttccctgatgattaaggatgttgaacattttttcaggtgcttctctgccattcggtattcctcaggtgagaattctttgttcagttctgagccccattttttaatggggttatttgattttctggaggccaccttcttgagttctttatatttattggatattagtcccctatctgatttaggataggtaaagatcctttcccaatctgttggtggtctttttgtcttattgacggtgtcttttgcctagcagaagctttgcagtttcatgaggtcccatttgtcaattctcgatcttacagcgcaagccattgctgttctattcaggaatttttcccctgtgcccatatcttcaaggcttttccccactttctcctctataagtttcagtgtctctggttttatgtgaagttccttgatccacttagatttgaccttagtacaaggagataggaatggatcaattcacattcttctacataacaaccagttgtgccagcaccatttgttgaaaatgctgtcttttttccactggatggttttagctcccttgtcgaagatcaagtaaccataggtgtgtgggttcatttatgggtcttcaattctattccattggtctacttctctgtcagtataccagtaccatgcagtttttatcacaattgctctgtagtaaagctttaggtcaggcatggtgattccaccagaggttcttttatccttgagaagagtttttgctatcctaggttttttgttattctagatgaatttgcagattgctctttctaattcgttgtagaattgagttggaattttgatggggattgcactgaatctgtagattgcttttggcaagatagccatttttacaatgttgatcctgccaatccatgagcatgggagatctttccatcttctgagatcttctttaatttctttcttcagagacttgaagtttttatcatacagatctttcacttccttagttagagtcacgccaagatatttgttattatttgtgactattgagaagggtgctgtttccctaatttctttctcagcctgtttattctttgtgtagagaaaggccattgacttgtttgaattaattttatatccagctacatcactgaagctgtttatcaggtttaggagttctctggtggaatttctagggtcacttatatatactatcatatcatctacaaaaagtgatattttgacttcctcttttccaatttgtatccccttgatctccttttgttgtctaattgctctggctaggacttcaagtacaatgttgaataggtatggagagagtggacagccttgtctagtccctgattttagtgtgattgcttcaagcttctcaccatttactttgatgttggctactggtttgctgtagattgcttttatcatgtttaggtatgggccttgaattcctgatctttccaagacttttatcatgaatgggtgttgcatcttgtcgaatgctttttccgcatctaacgagatgatcatgtggtttttgtttttgagtttgtttatataatggattacgttgatggatttctgtatattaaaccatccctgcatccctggaataaaacctacttggtcaggatggatgactgctttaatgtgttcttggattcggttagcgagaattttattgagtatttttgcatctatattcataagggaaattggtctgaagttctctatctttgttggatctttctgtggtttaggtatcagagtaattgtggcttcatagaatgagttgggtagagttccttctacttcttaaaaaacaaatttctgtaagcacatgaaggagtcccaaaaccaaagatttttaagaattgttgagctataatttggcttgatcaaaggttatgtgaacataaagcttatccaggtgtgcaattaagattcatgttcctccacagagcccccaatggaggagctagagaatgtacccaaggagctaaaggagtctgcaaccctataggaggaacaacaatatgaactaaccagtactccccagtgcttgtgtctctagttgcatatgtagcagaggatggcctagtcagccgtcaatgggaggagaggcccttggtcttgcaaagatcatatgccccagtacaggggaatgccagggctaggaagcagcagtgggtgggttggggagcagggcagggggagggtataggggactttcagaatagcatttgaaatgtaaatgaagaaaatatctaattaaaaaattcatgttcctcattatctgaacatagttcaaaactgtttgaaatatacaatggaaaaataggtatatatttatgacacaacataaattagggggaatagcacatcgtttattatacataaataaatacacattacctcaagatcattaggaattatgtcaaaataacaaaacttgaagccaaatgggaaccagcaaagaggcataattatctaagagttcggattaaaaaattaaatctttgttcctttatggagaggttagtccacatccctcttagaagaagtggaaaattctgtgttaagggatactgtgagtttaatattttctactctaagagttgcttttgctaataggatgtgttacaaaacagaaagaagaaaaaaaaaaaaaacagcctagaacactttcattgtttcccatgccatgtctccaagttagcaatggaaaatggtttgaaccaatccaagaaaaactaagagattggcagggaacaaaaaattacacacagaaaagaacagttacttgataaagatgacagctgtcatctaaagggaaactgagcagtaagcagactggacgtaagcagtccttaagagactgtgcagtaccaggaatagcagagaagaagcaggaaagcctgttgggtggacggaacagatggaatttctttcagagatcactgttgcattattaccattttgtaaaaaccatccccgcctctgtgtgtcgggggagggggaggagggtggcattacattatcaagattgctactggagtcaagcatgcttagtgtacatatcgattgcctgaatagccttgtgtctttcattctcttgtcttcttttattaattcagaaatatctgttcagagccttgcctttttaaagttgattgccatttttaggtgaatttcagatgttctttatacatttcaggttgcgtcctattttagatgtgtgatttaatttttttctcattttatagcatgcctacttcctactaattttttttttaatgttgtgtcttttaaaggacaaaagttttgctaaacatggtggttcatgcctttc

SEQ ID NO: 877 - DNA, 5087 bp, Mus musculus
tgcaggaaggacaagtgctagaatgttccctcatcaacagtattcgccaagcagccataccaaaggatcccaaaatcctggctgctctcgaagctgttggaaaatctgaaaatgatctggaagggcggatattgtgtgtctgcagcggcacggatctggtgaatatcggcttcacttacatggtggctgaaaatccagaagtaactaagcaatgggtagaaggcctgagatcgatcattcacaacttcagggcaaacaacgtcagtccgatgacatgcctcaagaaacactggatgaaactggcctttctgaccaacacaactggtaaaatcccagtgaggagtatcactagaaccttcgcatcagggaaaacagaaaaggtgatctttcaagccctcaaggaactaggtcttcccagtggaaagaatgatgaaattgaacctgctgcatttacttatgaaaagttctatgaactgacacaaaagatttgtcctcggacagatatagaagatctttttaaaaaaattatgagggttatagatctaaatggacttattttgtcatcacagcatcagcgagatcctcggctgaatgaaattttattcccattttatgatgctaaaagagcaatgcagatcattgaaatgtatgagcctgatgaagagctgaagaaaaaaggcctcatatccagtgatggattctgcagatatctgatgtcagatgaaaatgcccctgtcttcttagatcgcttagaactttaccaggagatggaccacccgctggctcattacttcatcagttcctcccacaacacctatctcactggccggcaatttggaggaaagtcttcagtggaaatgtacagacaagttctcctggctggttgcaggtgtgttgaacttgactgttgggatggaaaaggtgaagatcaggaaccgataataactcacggaaaagcaatgtgtacagacatcctttttaaggatgtaatccaggccatcaaggaaacggcgtttgtcacatcagaataccctgtcattctctccttcgaaaaccactgcagcaaatatcaacagtacaagatgtccaagtattgtgaagatctatttggggatctcctgttgaaacaagcacttgagtcgcatccacttgaaccaggaaggcccttgccgtctcctaatgacctcaaaagaaaaatactcatcaagaataagaggctgaagcctgaagttgaaaagaaacagcttgaagctttgaaaagcatgatggaagctggagagtcagccgccccagctagcatcttggaagacgacaatgaagaggaaatagaaagtgctgatcaagaggaagaagcccaccctgaatacaaatttggaaatgaactttctgccgatgactacagtcacaaggaagcggttgcaaacagcgtcaagaagggcctggtcaccgtagaggatgagcaagcatggatggcatcttataaatacgtaggtgctaccacgaacatccatccgtacttgtccacgatgatcaactatgcccagcccgtgaagtttcaaggtttccacgtggctgaagatttagcgatgcaattgaatcaaggaaaatttgagtataatggatcatgcgggtaccttctcaagccagatttcatgaggcggcctgatcggacatttgaccccttctctgaaacccctgtggacggggttattgcagccacgtgctcagtgcaggttatatcagggcagttcctctcagataagaagatcgggacatacgtggaagtcgatatgtacgggctgcccaccgacaccatacggaaagagttccgaacccgcatggttatgaacaatggactcaacccagtgtataatgaagaatcgtttgtgtttcgaaaggtgatcctgcctgacctagctgtcctgagaatcgcagtctacgatgacaacaacaagctaattggccagaggatccttcctttggatggtctccaagcaggctaccgacacatctccctgagaaacgagggaaacaaaccattatcactgccaacaattttctgcaatattgttcttaaaacatacgtgcctgatggatttggagatattgtggatgctttatccgatccaaagaaatttctttcaatcacagagaagagagcagaccaaatgagagcaatgggcattgaaactagtgacatagcagatgtgcccagtgacacttccaaaaatgacaagaaaggcaaggccaacccagccaaagcgaacgtgacccctcagagcagctctgagctcagaccaaccaccacagccgccctgggctctggccaggaagccaagaaaggtattgaacttatccctcaagtgaggatagaagatttaaagcaaatgaaggcttacttgaagcatttaaagaaacaacagaaggagttaaactctttaaagaagaaacatgcaaaggagcacagtaccatgcagaagttacactgcacacaagttgacaaaatcgtggcccagtatgacaaagagaagtcgactcatgagaaaatcctagagaaggcgatgaagaagaaggggggaagtaattgtcttgaaataaaaaaagaaacagaaattaaaattcagaccctgacaacggatcacaaatctaaggtcaaagagattgtggcccagcacacaaaggagtggtcagaaatgatcaacactcacagtgcggaggagcaggaaatccgggatctgcacctgagccagcagtgtgagctgctgagaaagctgctcatcaatgctcatgagcagcagacccagcagctgaaactctcccatgacagggaaagcaaggagatgagagcccatcaggctaagatttctatggaaaatagcaaggccatcagtcaagataaatctatcaagaacaaggcagaacgggaaaggcgagtcagggagttgaacagcagcaacactaagaagttcctagaagaaagaaagagactggcgatgaagcagtcaaaagaaatggatcagttgaaaaaagtccagctggagcacctagaattcctagagaaacagaacgagcagcttttgaaatcctgtcatgcagtgtcccaaacacaaggcgaaggagatgcagcagatggtgaaattggaagccgagatggaccgcagaccagcaacagtagtatgaaactccagagtgcaaactgaagctggaagaccatgcaacaccagaagatcatgcccagcttccaaacacagactccacagacaaaagctgttttctttgtgtttcttttatgtatagacacggtgttacctgaaaccacatggactggggatgaccaaacgctcttatatttaacaatttgagtattgaatttctttggccaaccaaaagtagctatgtacacatacacacacacacatacacacacacacacacagagagagagagagagagagagagagagagagagagagagagaaatcccctattcctgacaggcagagttgaatcatgatatatgacttaaacatgtttgctatgagacagcatcacaagccagtgggcttggtgataacaactctgctttgtggtgcattaggacatgtttgagctgctgctgctgcaaaacaaaacaaaacaaaaaaattagtgcattagtaacttaatagtaagcgcatgcactagaagaaacacctctgtctccagttcattagcagaagtggccgtctgctatacaaatcacttcgcagaattttctacacctaagttacctcatcagtaagtgccatgtctttaccatgccataagatgctaaccttcctgtaaatgttgcagaaatcgttaggacaatagagacacaaaacggtgtatctgtgccaagctcatcaatgctcccagggggactcggcaggctcgtttcagaaagtttacagctgaccctgctttgtaggaattgcttctgccgattccacatattgcaattcactctacactataaggatcgtcaagtggttattggcaaatgtttgtaaatgtgaccatgtacaaagtatttatactccttaattctcacagttatagctcaaagtcatctaaatattaccacacgacaagactagtgagcaggaatcatagacgtaatgttttgcatgatgcacaagcaccaattatgactaacccattcaaacacagttaacctaacaccaaataaatactggttaagtaaatgtacggcacagaatattatttgactatcaagacttttagcataatgaaaaagtctatatatatgtgtatatgaattatgtgggcattcttgatacttcaagttctagtttgaaaaatacataactaatttaattttacacaaaaatatttatgcagattttcagactttcatatcaggaaataacctttttatgtctgttaaatatccaaacaatttgctaccgtgttaatctgcatggtcttctcgcctgctgtagttgccttgcaggtgtctcataaagtggaccgatgggatggagtcatgctgcccaaactcagaggagcatgcagggatccggtagcctagcaagagtcagattcctgattttagaatacaaaatgccaacttaattgttgtatatggttgtacaaatagattctgtaccttcctctgaagagggcagagaagattatgataccatgaaggctaaaattcaatgtacaacttctctaataaaaaatgaaaacacatgtaacatctaccagagtatttgcttccacgatgctttctagaaaacctttgcctcttcatgtatgttttcttcattattttcaaaaaggggctttatttcccatccccattgtggtttcccccaactgacacagaacacacagattctacatacagaagtcatgagctttttgtccctcatagttatgagttgaatagctcataatagctctgtaccctgtcaaattcctggctttcttctttgtaaaacagtagaatcaagactgcatatattcagcaccaacatcccatttgataaaaggccctcacattgggattgccggttttcaaaataaaattgttagactct

SEQ ID NO: 878 - protein, 1057 aa, Mus musculus
QEGQVLECSLINSIRQAAIPKDPKILAALEAVGKSENDLEGRILCVCSGTDLVNIGFTYMVAENPEVTKQWVEGLRSIIHNFRANNVSPMTCLKKHWMKLAFLTNTTGKIPVRSITRTFASGKTEKVIFQALKELGLPSGKNDEIEPAAFTYEKFYELTQKICPRTDIEDLFKKIMRVIDLNGLILSSQHQRDPRLNEILFPFYDAKRAMQIIEMYEPDEELKKKGLISSDGFCRYLMSDENAPVFLDRLELYQEMDHPLAHYFISSSHNTYLTGRQFGGKSSVEMYRQVLLAGCRCVELDCWDGKGEDQEPIITHGKAMCTDILFKDVIQAIKETAFVTSEYPVILSFENHCSKYQQYKMSKYCEDLFGDLLLKQALESHPLEPGRPLPSPNDLKRKILIKNKRLKPEVEKKQLEALKSMMEAGESAAPASIDDNEEEIESADQEEEAHPEYKFGNELSADDYSHKEAVANSVKKGLVTVEDEQAWMASYKYVGATTNIHPYLSTMINYAQPVKFQGFHVAEDLAMQLNQGKFEYNGSCGYLLKPDFMRRPDRTFDPFSETPVDGVIAATCSVQVISGQFLSDKKIGTYVEVDMYGLPTDTIRKEFRTRMVMNNQPVYNEESFVFRKVILPDLAVLRIAVYDDNNKLIGQRILPLDGLQAGYRHLRNEGNKPLSLPTIFCNIVLKTYVPDGFGDIVDALSDPKKFLSITEKRADQMRAMGIETSDIADVPSDTSKNDKKGKANPAKANVTPQSSSELRPTTTAALGSGQEAKKGIELIPQVRIEDLKQMKAYLKHLKKQQKELNSLKKKHAKEHSTMQKLHCTQVDKIVAQYDKEKSTHEKIKAMKKKGGSNCLEIKKETEIKIQTLTTDHKSKVKEIVAQHTKEWSEMINTHSAEEQEIRDLHLSQQCELLRKLLINAHEQQTQQLKLSHDRESKEMRAHQAKISMENSKAISQDKSIKNKAERERRVRELNSSNTKKFLEERKRLAMKQSKEMDQLKKVQLEHLEFLEKQNEQLLKSCHAVSQTQGEGDAADGEIGSRDGPQTSNSSMKLQSAN

SEQ ID NO: 879 - DNA, 171398 bp, Homo sapiens
gcagatcttctttattcattccatcaattcaaacacaaatctcttccagaaacagcctcacagacacacccggaagtaatatttcatcagccatcagccttagcccagtcaagttgacatataaaattaatcatgacaggtgttttttagcacagacagtagtaaatcactactactttgagcactcactaggtgctggaccttgcacttgacaaatggtataaatgatcaggaaagtatcctgatctagaccctaagagagaggattcttggatctcgcccaagaaagaattagaggtgagtgcacagagtaaagtgaaagcaagtttattaagaaagtaaagaaacagaagaatcgctattccataaacagagcagccctgacagatgctggttagctatttttatggttatttcttgatcatatgctaaacaagtggtggattattcatgagttttccaggaaaggggaagtaattcctggaactgagggttcctcccctttttagactatatagggtaacttccggacattgccgtggcatttgtaaactgtcaaggcagtggtaagaatgtcttttagcatgctaatgcattcatatgaacatataatgagcagtgaagacaaccagaggtcactttcttctagccatcctagttttggcagcttttggccggcttccttagtgcatcctgttttatcagtggggtctttgtaacctgtgtcttgtgctgacctcctctctcatcctgtaactaagaatgcctaacctcctgggaatgtagcctagtaggtctcagcctcgttttacccagccctgttcaagatggagtggttctggctccagtgcctctgatttaagcattatttcacttaagcctcgaaacaaccctgttttaagtaggtctttttagcttccttttgcagtttacaaaactgaggattaaaatggttaagcatgttgcttgaggtttcacaggctggttacagacttagcagaaaaatggcctgccagctagcctacagtggatctccaagtatggtttcagacagcatcagcaacatttgtgagcttgctagaaatgcagattattaggccccaccccagacctacagaatcagaaactctggggggagggtccagcaatctgtgttttaagagccctctcagtgattctgatgatgcagctcaagtttgagaacctaggcctagggaaaggtaaggaattgtagacttactagaaggaaacaaaattagatccatttaaagttctttacagctaatcttcctcaaacaggcaacacagagaaaagggtgaagactgttgaataaaagagacttctttatctaggctgaacatattagatttattgaacccttgacacagtgcaaagtacttgacatcagtcatctctttaaaccctcaggtggtggtgagggctaaatgagattttccacagtttacagatgaggaaagagaagcttaggtcacttaagaattgcttgttaatcaacatgtagtacgtgatggagctagcgtccagaactaatgtattgctaaagagaacatacacaggtcacacagctttatgacccagaatggctgtcagcagagaaacatgtttttgaagatatatatgatgtataaaatacataattaaaaagtctttctaaagttcattaataggctggaaccaaagacctgtttaactttttactcaccgtttgcattacttattctagaccataagtattatactactaagtctaggtgtctttagtctagttctcttagggaaatgagaatgggaagactgtatttttcatataatttcccccacattccccaaggaaagtgtttaccagggcttttttaggttttttgttttttgtttttttgagacagacggagtctcactgtgttaccaggctagagtgccgtggcatgctctgggctcactgaaacctctgccccccaagttcaagcgattcttctgcctcagcctcccaagtacctgggactacaggtgcgcaccaccatgcccagctaatttttgtatttttagtagagacggggtttcatcatgttggccaggctggtctcgaacttttgacctcatgatctgcctgcctcagcctcccaaagtgctggtattacaggcgtgagagccactatgcctggcctttcttttttttctttttctttttttttttttgatacaggacctcactctgtcacctaggctggagtgcaatggcacaatcatagcttactgcaacctctaactcctgggcttaagcaattctcctgcctcagcctccctcccgagtagctgagattacaggcagagccaccacacccaggtaattttttttttttttttttttttgtagagacagggtctcactatgttgaccaggcaggtcttgaactactgggctcaagtgagcctcctgctttggtctcccagagtactgggattataggcatgagccactgtgcctggcccctagtctttaatttttgaggggggagaaaaactaggtaaaacatactatatggaaagattataatattttctttcaattgatggacatagacataaaatattgtcagcgagaaagcctatctttttaatatttattttgataaactaacaaggagcatataatttataaaatactttctcttaaagccataaatagtaagcacttgctccgaaatgctgctttgtcaagaacgttaattgaagcagatgagcagagtcagtatagcttcccaggtccagcctgcattccctttctactgcagagttacgctgaggacagcatgctggcacctccacggctcttctgctgtcaacttttcttctcccaagtacctgaaagggcaggtgatcctcttaactttgtagacatgtgaaaaggagactagtttttgaatgctcaccaaaagccaagttgccaggatattgtttgcaaatacagaaagggtttttgtactaagtggtatttaaggcaaaatctttgccaaagaactctatccaaaagcttgaaatacacatagttggttaagggaatgcatttggagttaaacagaaataggttcagttttggctttgctactcaagagatgtgaccatgagtcagtcttaacacccaccaagcactaagccagagcttccttgtttgaaaaatgggagtgataatacctacctcgcattgccatcataaggaataagtaagatggattttttaaaaatggaagtcagattatgcccttcttttggtttaaacctttaatgggtttctacctcattccaagtaatttccaaagttctttctgtgtcctgcaagtcccctacatgacctaccatttcgctgtcccattgatattccctgagcattctaggcacactctgacctcagggcctttacacttgctgttctccctctggactactctcctctgtacagtcctcatggttcacttcctcacttcattctgtttctgctaaaatatcacattctccaagaggccttcttactcacctacacacacaggctcctgacccttctggatgttttatttgttacatttatcactacctgataacttactcttttttgttcattgctgaagtccttctagaagataagccctgagagtagactttgtttcctgctgtatccccaccagggaattaattcatcactcaacatatttcataagtacctactatgatccagcaattccttagttacttatctgagactgaaattcattgatatttccatggttcctaatttttaaggaattttaaagccccaaagaactggaactgaaaatgtcactttggaatgtggagaaaggttaagccagagacactatctgtggcagctatggaggtgtgtcgcttaaatctcccttcaagagacagctgccccaggagtcccctcattggacagttttgctgcaggggcttcagcaccctcaaaatgtccctgcccaggctgtactgaacatggcaagctgctacaaccgggcctttcctgcccaagtgaggctcctctggtgggcgttctgtgctctgcagctgcaatccagcaatgttctcagctgtactgcaagctgagacaattcctccccagttctccctgctccctcctctcctctctcaggtgtttgttctgaggtctggtttggaggctctccctgtcactcggtttctctcccctttctctttcacaggcatttgccctaatgaattgctcacatttccaattctgtcttgcctgtaatctcagctactcaggagggaggctgaggcaggagaattgcttaagcccaggagttagaggttgcagtaagctatgattgtgccattgcactccagcctaggtgatagagtgaggtcctgtctcaaaaaaaaaaaaagaaagaaatttaaaaaagaaaggccaggcatagtggctctcacgcctggccaacatggtgaaaccctgtctctactaaaaatacaaaaattagctgggcatggtggcatgcacctgtagtcccaggtacttgggaggctgagggaggagaatcgcttgaactcgggaggcagaggttgcagtgagcccagatcatgccacagcactccagcctggtgacacagtgagactccgtctgtctcaaaaacaacaacaacaacaacaacaaatcctaaaaaagccctggtaaatactttccttggggaatgtgggggaaataatatgaaaaatacaatcttcccattctcatttccctaagaaatgtcttgggggtttgtttctagatggagaagcccttccctcagggtaagaggtcctcaggataagcctccaggactctgctgccatttcctgaggccgactctgagctcactgcagaattctctaggtggtagcagtggttcttgtgtgatgttccagtaattgctgcacttattttagacacaataaaaagtgacagagccagcattgaccctaagagccagtggggactatgtatcttcaaggcctaaatataagctatttcagaagacaaaagtccaactggagtgacgtatcatgcagctcttgtggaaaaaaaaaagcattttcaaaagctgcattatttaaatgagaaatgcatatatttaaagggaagttccataaaagtcatttgagattccttttctttcaatgactgtattcagcattgtctattatctccatatatcaatagtttaaaatattttttcatagacctgccttttcagaaacatcttctatgtcactgtatttttaattacttgctcagtgtaatttattatgctggaactaattgtgttttaattagaaatgctttgctaaagagaagaacttatcagtttgcggcggtgtttccggtgcaactacaaagcacgtctcctgtttttcttaggatttttttataaggggacagccacataatgtgtttttaatatttgttgtaaatatttattaagaatcctgtttacttgcctccataactctaagttgttcctctttaatttttccttattttagttgctaaggcaactgttttgactactgtgacagttttcctgcccaagaaagttactttgagtgaccacccactcctcttgaaaacacattttgctttctccttccttctgcactctgagaggtagttgttgaatattttaggaataatttcttcacctcttttctggcaagagtcagggaaccctcccagaatctgagcatccagattttgcctcacaatcctcacagcagagacacttcagggagggaaaattacaaacctagacagatccggagtgttcagccattcaaactggcctgcctcacaaatcaagtcccaaagatttaacatctatatcgtcaagtaaaagataaagtgggaatccctagctattagtgaccataaagtcaatcgttagaaacagtttggcctctcccaggtggctaatctgggcatttcatttctcccccagattcaatcatagttaagctgattaaattctcaaagaaccaaggatatttctgagaccttgtatctaagttctttcaggctgctataacaaaataccatacactcggcagctataaacaacacatttatccctcacacttctggaggctgcgatgcttaacatcaaggtgctggtagattcggtgtctgataagagcccatttcccgattccaagatgacacgttcttgctgtgtcttcacacggtgggtgaaaggggcagccgtctctctggattcttttataagggcactaatcccatttatctcccaaaggcccccacttcctaattccatcacatttgggattaggatttcagcataggaatttttggtggggtagagcacaaacattcagaccataggaccttggtaagcaccatcaggccaaattttattttattttttaaatatataatatgagagatcagaaaagatggtgtaccttcctttgtttcttttcaatagccttcatccactcttccaagccaggtcacttagaaagttgatgatgttctttattcctgaggtaagaataaaatgaaaggggtggattaaatctttctacttgacaccagaataagcgttctctgtatctcactgtcattgctggaatgagcactttaaatgctcatggttgattactgagggagagacgttttcatttttgttcctattggttttgaaatgaaagatagacagcaggtttaccaccttttgaagttgctgaataactcacttcattgccctcttgtcatctgagaacgtgctctgtcgtgtcagggaggtgcagggcagagtctccccaaccaggaatgacctcttctgttcactataccccaacatgcacttgaaaataaaaactgtgttgtgatggctcgtctgtggcagcagcttcttggcctgattgtagactgaggccagcttaggcagagtgggatggaggagttggagcaggaacaaacagaagatgaccttctgtgcagaaaccacattttcaacaagtctaagtcaacccagagttacgaactctgggtttcccttatgcttagctttgtattctagctcactggaaatagacatgcactaataccattgctctttttaaagatctgtgtaacagaaatggattccctgtcaaaatgtatttgtatttctgcctcatattatatattatctgcatcctcttgggtgacttgcctcacctcagttaggaaaagttttctcatctgtaaggtagggatggtggtgtttacctcatttgtctttgatggttaataataatcagtactagcaacattataatgattattattactatgttttatattaataatcaatactgggccaggtgcagtggctcatgcttatgatcccagtgctttgggaggctgaggcaggaggactgcttgaagccaggagttcgagttcagcctggacaacatagcgaaactctgtctctacaaaaaaaaatttttttttttaattagccagccatgatagtgaatgcctgtagtcctagctactcatgaggctgaggcaggaggattgcttgagcgcaggagtttgaggctgcggtgctatgattgtaccaggagtttgaagctggagtactatgattgtaccactgcactccagcccggatgacagcaaaattctgtctcttaaaaaaaaatcaatactggccgggtgtggtggctcacgcctgtagtctcagcactttgggtggccgaggtgggtggatcacgaggtcaggagattgagaccatcctggctaacacagacaaaccccatctctactaaaaatacaaaaaattagccagacgtggtggtgggcgcctgtagtcccagctactcgggaggctgaggcaggagtatggcgtgaacccagaaggcagaggttgcagtgagctgggatcatgcccctgcactccagcctgggtgacagagcgagactccatctcgaaaaaaaaataataataaaacaaaattaaaaaatcaatactaatttacttagttcagactatgtgtcaagtgctctaatgcccagaaataacctgtgagataggtattgtggttgatgttgttgtctctgtttttagagatgaagaaatgaatatctaaccacatttggatcaggttcatctaaaaccctaaagcctatgtaaaatacccaattgtttctgctgctggtgagttggtttttatgcttacatgtttctctcaccttccacaggaagctgtaatgtgaaatatgtaccaccagataaaataacggaagagggatttagattgaagggaaaaaagtaaacaagggagagtacatcaaatgaggggtaaatttagcaggcagcaactcaacaagcagcgaaaatgatctgtaaagttgaaagaggtgagcctcagatttgcttctggtgttcctggtggctaaagcaatgtagaaaacacaagttgttgtagggttcacagtgtccattagattgtaaggaaagcaacaggtcagtaggaacagagtttttcctggtcctaggatctgaaaaaaaattcttacagaattcttacaaaatacactcccccataaaaaactgtaataagtacagaatgtttcagtagtacagttgttcagttatctatgtggtaggattcacggggaatccataagaaatgcagtaattaaaaccaaaacacttcagaaacccatctgatcctttgtgatgattgctggcatcagtggcaaggagaatagcagaggcttcttcaggtatgactgctgagcagttacctgagccgactgctgagcagttacctgagcccactcctgaacactgtcagtctttcatgtgtcagcctcaaagcaggtgtagcatattgttcaaaacatttgatctgcatgcctcaatgtcctcacttgtaaaataggtataaatagtgaagcagcgttgtttgtctggggtaatacccgaggttcgttgtcccacagccatggaaagctaggacgtggacacatcagagtgaggttaagagtggaagtttaatagacaaaagaaagagaagagctctctgcacagaaagggctcctggagaaaatgggttgccacttccgcagtgaaatgcagaaagtttaataaatgaacttaaggagggggtatgtgatttacacaggggatgaaagatcggttggaggaggcatgccatttgcaagtgtgcaaagaagctggccactccaccctaatcttttattatgcagatggttattctagctggctggtgccatgttgcctcgtccttattgtacacgtggtgacaaagaaaagggaagatggagcctccgtgttgaacatacctggcttccaggtagccttctcttggcgcagctgccagcattcacctgtacaagcttccagcttgtttatctatgtctgtagctcggtttttcaggctgctctttgttagaaaagaaatgatttgggggctacttttattaaaagggaagccttgccgaagactccttgtactgacactatctgcctaataatttctttctagctcctatatcaataataaaaatggtacctccctcataggaatgttgggaggataataagttaatgtagagaaagtacttagagcgttgcctggctcttaggaagcactgtgtatgttacctagcaatagtaggcatattactaggtgccacaggccttttgaattgctcatcaggagactagaacggcatctccctgttggattccagctgagcatcagttactggtggaagggggaaaggtctatatttaacaacttaacccaataggaacatctgtccaaagaatcaaaggccatcaaaaggaatgcaggagctacacatgctgttattttgtctgacagattttttcacaaggtaatacttgtagcacatagcaagggtctgtgatggagcagctacagccgtgccctctggctcctcatgtggaatgtgagctgagaggcccagtgtcctttatctcctgggatcttaaagcagataggagaggcacaaatggaatgaacattctatatccttccaagcaagagaccaagctcatgagggtaaaagcaacttaataaggacccatgcccatctattacatcagtccataaatcattctgatggcaggatgttatcactgagggctttagtttaacttgaaaaaaataaaaatttgtggttctgagagaggcggtgtttgtgcagaatcacaaaggatctgctaggtatgaagcttaaagcatttccctggaataaggagaggaaataaataagccataaagcatctcttgggctctgagctttcaggatctgatagaaagctagacctcttggttaattccaaaccagactccacctgctttcccagtctgaaggccacacccatcattctccctggtttatgaggtctctttggtggtagtcacgcataatgtgatttaaattgaatgagatcctttatggcctcttcctcagactcctctttgtttctctccaaccttgacaaggtctttttaacttcctctccattcttatcaaaccaggaagcaaggagggtgagtctcatatgtacctagtggagtctacctaggcagtgttcgtttattgaccgtccaacaatcttctggcgataggcagaggggccctgcttggtcaagtttgcccaagtcagacaggcatgggctttggaatcagagaagctggcttgaatttcaggtttgttactatttgactgtggctttgaataatttagtctcctctgaacctttttccccccttctctctgaaaccgcattggccaatatggtaaccactaaccacattgtggctgtttaaatgaaaaattaattaaaataaaaaattcagcacttggttgcattacccacatttcaagtgctccctgtggctcatggtgaacgtattgggcagaacccatctggcacatttccatcatcacggtaaatccgttggacaatgttgatctagtctaaaaccttgcagagttatcatgagatttatgtgagatagtatttgtgaaatacctcacaacaagagccctaaaattgtagctattttctcataagtacgaccatttagtcagcatttactttgtcccaggtacttagacattctcaatattaattctttgaaagccctgtgagtcggtatcagttttcccagtttacagctaggaaaagtgaaatatggcaaggttaagcagaataactgcaagattctccagcagttgcctggtgaggaggctgacatgcaaacccaggaaccaaccactacaaggcctggatctcaaaaccactgtggactgccacctcttctgaaggttttctttcccagaaaacgcagttttgtgatggaatgtgaatgcctactccatttcacatttctctacgtcctaatgtatctgtccagtgacaaacacagaaaagcccctggccaactcatgtttaaataaggtagagttaaagcttttatgatctggtccaaaatagctgtccctagctggtaataagacttgactatgccctatttgaagatgccaactccacagtataagatacagacatttgcagttaacttaggaagtgatggcgagagagagggcaagagagaaagggtaagaaataactacaactcacaattaaaataaaatcagctaccacttagctgtatccccatccaaggaatttctccacttcaatcagagtatttggcctgctgaactctctgacattccttatgaggggattaaactttattgaacagaatcactttaaaaattgaaataaaggaaaaatgtttaatgttagttgatttgaaagtaacttgaatctttgaaaaataggttgtgatattgattaatgttgaaacagcatgtgtgagggaaaatatactaaaaataacacacaagtgaaaaacatactctatctttgataagagagggaagtgtctctgtaagcctgtagtggcacaaacccctcagagtggggatctctgagccagaaatagcttctagcaatggtgatctccagcaaaagtgattctagactctcaaacagaatgccctctggcctctgcttaagtagtttcacaaaaggtgttcctgtccctttctagccttgctctctagtggcctaagagttgggctggatgagctaacgtgtccttgagctctaaggcgtgactgatgaattttaactaatatgagaattaaaattctgcccaccccccaaggaagttctcttatggtttgtttctttaccagaaaattctgttaccatttaactgcaaaacaaatagattcccaaaggagaaacattccagctttcttttatgatctcccctgcagggcccagatctggaggaggatttttctgacaatgggacttcacaatagcctggcctcaatctggtcagggagccatagcccactttcaggtcaggagggattcatgtgaaatttaaaactgctgttagggaaaaaagaatagacatgatgtgtctttactcaccagagggtagggttattatgtttgttagtaggaggtggtgagaaaccaaattagattgtgttttagttcctttcagctgattacctctcatccctcagatttgctctgtgaattttcatgggtggtttgaagcatttggtccaagaacctttcagccacagttgatgagctgattgtgggttttgtcgtgagcctggtctttagtgtcagctgggtttcattctaagatccccctggagaatttctattctgataattgcttctcttaacaactgatacgtttttattttatgagctggatgggcacctggtaaatattttttttcccttttttgcttttgttgctggggagcccagagccaagttgctatcctgctataactgtgtaggaccttatgacaggcatttcagagagctgccttttactctggccttagtttactattccactttatttttcttctctttgcccagatttctcatcctattttgaaaatgatttcttcacagtgtcaaacagtgctcctggttcaataggaattcccaggacgtgcctcaaagtcacccccaacctcgaagatgagtttgtatgcattacaaaaagggactcctgcctttaggcagacggcctcaaccagtgcccttgtaattgcacttctatccttggcagtcttccaaggacttccttgttgggttctgggcctgatgcagccccctcaatttgagcaacttcttgtttatttgttttacatattggcctgctgcaaaatcttttatttaaaaaaattcattttttcatttatttttaagttaatttgttagttttatggtgcttttgatgtgctaggtgctagaacacaaaggtaaacaagactgcttcaaggactctgccctcttggaggttgttgcattctggtgtgggagtcagtcagtaaatcaaggatcagggagagcctctctgaggaggggataatgaagacaaggtctgtagaatgaagaggagcctgatgcaccaagggcagtagaaagagacttctgagcaagaggaactgcaagtgcaaaggccctgatgctagagagagcttgaggggttgcaggaaaagagtttttatggttgtgaacaagaaatagaaggaagaacagagagtggcatgagataaaatttgaaggatcccagatcgttcaggaccttttcggccaggtaaggagttgggattttatcctaaatatgataggaatccattgaatggttttaataaattcattcaaagtttaaagaatcaatctggctcctatgggcagcagaaaaagcagaagtgagaagatcaatccatgggagagataatattggtttgggccaaggtgggtggtgatggagagggagtaaagtgggtgtgtattcgaaatattatagaagaagacttgctactgaaagtgagaggaaaagatgagggaaaattaaggatgactcttagtttcaataagtgaccagatgctagtgacatttatggaactaaggaagtactgtgatggagaaacttggaggggagagaataaagagttcagttatggacatacttatttcaagacatcctagtggagatgtcaaatagcaaatatttgaactcacagaggagaggatggggctgctcttacaaatttgagggtcatcaggaaatagatgatattgtagacacaagattgaatgaaatctaggaacacagtggaaatgagaattcccagaaccaagtcctgaggactatgtaaaagttgagtacagaaggaaaaggcgggaaattagactaaggtaatggagcacaaccaggattggagagtgtttcaagaaggaaggaataatcaaactctcagagatcaactcaggtgaggaaaggaaggtgtgcactcctattttgcagcatgctggactggccagagaagttttagagggtgatagaaatggaagccagatagagttgctcagatggtatgaagagaggtaatggaaacagtgaatatttctaagatattatgtcctgaagaggatcagggacatggggtagtaagtggggtagtaagtaaccattgagaaggaaatataagattaaacgtcactgttgactatccatttgaggtttataatcttgaatttaaactaaagccagacagttccattttgtgattttcaccaccaagtttggtgataaagtatgcataaaatagacttcgttttttggccaagaaaacactaaatgagacatggaagttgcgaaccacctgtgagggagtgattgcaatattgggctgctttggaaataagctagataaggatggaagtaaaaggaggagggaactggtgcgtagtgagagattggcagggataatcaaaagggatatttgactttgcaaagaagtcaaatataggaggggagaactgtagagctaggggctagaaggaccagatggaattccaagagtgagatattaggaattgaaatgtccaggtggtaatggcaagctctaggggtactcaggggggaaggaagaaaagaattttgtatttaaggaggccaaggaagtgaaagttcactctcaaaataagttggaaacccattcttatttattatttgtatttcatgaatcatctcaaatccttacttggaattaggtgatagggtgcacataagaatgatagtggctgattctttgtggatctactctgtaaacaccattttacgatgtacttttgtacactgtgtaccaaaattcttcattgccgtcaggatattcattgggatatatttggaaatgggctaattcttatgtcttgattagttgataattctcatttttttagtcagtaacaacataagacccgccatggccttttgggtaatagctaatgcttttcaggtggcacggaagacccttgcaatgaaacaactcttctatacatgtcccatcacaccccctgtcattctcttgaagtgctctagccacacaaacaaatttctaatgtgaggtcaatagctgctcactctgcctggcatgaagattcatctaaagtatcaacttctgggttaagccttttctaaaaggttgaactgtccaaaaatgccattttgaagggtcaaaaaatgtcatatactggcactttcatattgttaataatttgctaccactattacaagtctgaaccatgcattgttggtagagctattacttgctgaattggaattctgtgttatgtgctttatgttcaccatctcatttaattccagcaataaacccaaaaggtaggtggaactacttccacttgttagacaaggattctgaaatttagaaagggtctttctgggagagagtacataacaaatggtggaactgggttttaactcctaaagcaaaaattataccatgccctttcctttggtcttattcatggcaatgacagcagtacagagcacacgcctgatacagagttggaatacataaatacatacagtaatacttcatctgccagaaaactacccaaattgaaggctgctttgttcagggacccctaggactactttatgatggcctagtatcttggcattggatttaccttgataaatgttgttgttcccctgtaatttagaaagataaattttaacaggtgaaactaagagtctgaacggcccttaaaaccttaatcctgtaattactatttatttgttttaaggcactgccttgatccatgtttgccagacaggttcctaattgctggcattgaaatgatctaggaagccagtttcttcagctcatgaaaagaacatgtagatttgttgaagtgtgaatgctaagtattggtgtaatgcagtcagagggcacaggacatctatgttcatttcccaaatgccctttttctttcattcacatggatttttcctctcattcctaagcacagtggtgctctaataagacaagaagtcagttggcaagtgtaacacagatgctctgatgccttgaatttggctaatattgcttcttcattcaaacgtcattctgtagctttccctgagtttctggtgtcaaaattcaaagcaatggttgtcaaactttcgtgtgtgttcgaatcttctagagggcttgttggaacacagattgctgggtcacatccccccagactctgactcagtccatctggactggggcctcatattctgcaattcagtaaagctcccagctgatgttgatgctgctggtctagtgactacactttagctctaggggctgttcaagatgcgctttacaggacaccaaatgaggttagataaaaaagcaaaaatctcagcaaatatctgaatgctagattttacagacaaaaaaaaaaaagaaaaaaaacacaaaacaaaaaccagtgacttaaaaaataatgtatctcctgatttttgacatcagtgggctagaacttgggaatccttcttccaagatattaaggaaactttcttctctatgactttcatgctttcagtcagtatgctttgttcttaaacctatcctagagcaagatgttttattaaattgatcagttttacaatacaaaattgaaagcaaagagttttcaaaatgaaaacattccataatacaataagaattgtggatattacatacaaaagagtgatttctaatttgtttagaagctcagcaatattttcatttttattagattcaaaatggtgtgagtcatgaagatcaacacatttctttttgacaggaatcctttgtgtttgaacccaactgcctcttcaaagtggatgagtttggcttctttctgacatggagaagtgaaggcaaggtatggcccaagaagagcaagttgttctttctgctttgtggtttaagccattttgtttctcaacaagtagactgagtgctgttgatgaaccctacccttattcattcattcaagatttttaaaaatgtgcctacatgtgccaggcattgaagtatacagtgatgattaaggacattatcctcatagattccagtctaggagcaatgtcaggcattaaaaaataagttacaagtcattgaatgttgtgaaagagaacactggattgtcaaagagcttaatttaatcttgggagttagaaagaaatctgccagaagaagagatgctcaagctgaaatctaaaaggtacattaaaagtgtgttcatctcattataccctgggacttaattcgatgtatggtacagtgtccacatttaatgaacaattgagctgaatttaagaaaagaattaaagttatataaaaattagcatttttctcacatttcatgtacacacatgtatttaatgattattaacaatgttttatatataaaagtaacagattttagaaacatttttatattcagcattgcacatatatatgtctatatgtatgtatatatatatatgtgaaatggaatacttggggtcttgattatttctgattatttacaataattattgttacatggttttaattccctcttcaagctgactgtaatcagcactgccttcatcatcagaaatttttgccaagcagtttgcctgtatcataggtatggcataatttaagctcattgctgtgttgtattctctctcttcaggaaggacaggtgctagaatgctccctcatcaacagtattcggtcgggagccataccaaaggtacctgtgattggtatttgcttttctaaacacggatttacttatattggaaatggccatggcttctagagataaaaaactcactctttgtatccaggctacttaaaacatttgatctcagttttgagaatagcatgtggttgctggttgtggtaatgtcacatttattcacatgaaacctctgtgactctcctctggtgagagagaggctttgtggacaagcagaccctaataaaaggctcttctatccaattgccatattccaggtcctccaataactacaatcaaaactctaaacaaagaccctcatatctagtttctaaatcaaaaatttaggccagacacagtggctcacacctcccagcactgtgggaggcagagggaggcagatcccttgagcccaggagtttgagaccagcctgggcaacatagtgcaaccctgtctctacaaaaattacaaaaattagggtgtgttagcatgtgcctgtagtctcaactactcaggaggctgcggtgggaggatccattgagcctgggaggcagatgttgcagtgagctgagaatgcaccactgttcaccagcctgggtgacagagcagagactctgtacctcccccaaccaaaaaatttgtaatacctttcttatcagttgatttcaaggaatatatagtgttacaaatttcacctctacaggttttagaataatgctaggtgtctgggcccttatgtttatttttacattaaatgtggtttctttttaccacgtttcttcctccatgctctgtgatgtaacttatttttttttctatctgtgtacctctatacaggatcccaaaatcttggctgctcttgaagctgttggaaaatcagaaaatgatctggaagggcggatagtttgtgtctgcagtggcacagatctagtgaacattagttttacctacatggtggctgaaaatccagaagtaactaaggtagcttcagttaaatggcctccttctcttccccaccatgtatatatgttgtgtgtttaattttatgcgtgctatatttttatatacttaaattgtatggtaatttaaaagttagcattgctttgctgacatgtttctgtagaaaatcagcaattaaaatacccttttagcatgtcactcctgtgggccaacaacccaaatacctactacgatatgttgtagggatactagtccagcacttctccaacttgagtgtataccagaatcccctgagctcttgttaaaatgcagattctgattcaataggtctgaggtggggacaagattctccttttctaacaagctcccaggtggcatggatactactcatctgacaactacagtttgagtgacaaaggtctagatcagtaccacccagtagaaatgcaatgtgagccacatatataatttaaattgttcttgtagctgggttttaaaagtaaaaagatacaggtaaaattaattttaataaaatattttatttaacccagtagacctaaaatattgtcattttaataggagatcaatataaaatttattagtgacatattttacattcttttgctcatactaagtcttagaaatctgatgtgtattttcaaatcagactaaccacattttaggtgttcagtagctgcatatggctaatggccaccatactgggtgggcagtacgggtctggatggttaagaaatccaaaccccccctcccaataagttattaaaatattgggttaagatcagtcttttaataccatatccagcataccattgccctggcaagtgagtctcaaagagacttctcgaagaagtagaaagcctcgtaaatattttgtctgctaatcatgtgtttacagggtgattttacctctgtacagagctcccattatctttctgtaatgtgtgtgaaaaggactaagccttcactttccatggcagaaacatgggtttgggggaatggggaggcattttgtcttctcattaaccctataattggaaactcagtgtaggttgaatgagagagggttccaacaagtggaaactcagtgtaggttgaatttctaatatcattagaaatattgaattttagagctaacaggaaatgtacagggaagatcatttgaggacactgagattacaaaacttaaccatgaatccaggataacttatggcagaattgagttctgttgacccctaaaccatccaagctccattaccctcactcacaaagtatggtcctcattccagaagtacagacccctcctgggagcttgttacacatttgagtctcaggcccacccagatgttctgatcctgaatcttcatttttgacaagatgctccaggtgactcggatgtgtggtgaagtttgagaactcctgttttgtagctctggaggcagaaatggatgctcgatgtcacataagagtgtttggttctgtccttattgtggtggttttatgctatcgttcaggtcacctcactttgggagaacagattttgcagtgccttcaagttcttttattactcttctgagatcaactccttctctaattaccaattcatattacaagaaacaggatgatgcagtatgagctcaagtattggggctttggggccacattgcctgggttcaaatccttgctcgtccccttcccagctatgtgaagcagatatacgctggacctctctgtgcctcattttcttcatctgtaaaatgggaacagtactagaatatctgctcttaggatgattgtgaggcttacatgagttatgacgtgggaagcactttgtgtactgcctttcttattgaaagcccttaatatgtgttagctattaggatgacagaggccaagaattttagagttcgaaatggaccttaggaagggcttctcacctcatttttcagatgagaaaaatgaagctagagaggtaaaggaactctgagaccacacagcaagctgggccagagtccaacctaaaaccaggtcttctcatgccctatatgctgcacccactttgctctgtgccctgagcaaatacagtcctggggagatggctcaaatcagtaaatcccataatgtttttgctttccataatttgattgctgttagtcttggcccattctaagaaccacgttctgaaacatacccttgagtagattatggatgtgtactgttggcccttgaacaatgtgggggttagagctaccatacccctgtgcagtcgaaaatccatgtataacttttgactcccccaaaacttaatagcctactgttaactgaaagacttatgataatattaacagtcaattcacatactttttgtatggtatatgtattacctattgtattcttacaataaagtaagctagagaaaaagcaaatgttaataagaaaatcataaggaagaaaaaatatattattcatgaattgaaagtggatcatcataaaagtctttatcctcatcatcctcacgttgagtaagcagaggaggaagaagaggaagaggttggtcttggtgtctcaggggtggcagaggtggaggaggtggaagtggagtcaggagaggcaggcacattggtgtaacttttactgaaaaaaaatccatgtataagtgggcccacatagttcaaacccatgttgttccatgaccagtgatatatgtttgagggttgggggtggggggatgtatacttcaagggaagatttgaaggttttctcctagtattattgccattgaaatttaagagcagctagccagttaagaactaaaaaataattctgtattggattttttattcaaactcaatactatttgagcctgctcttactgaagaaactaagtgtttcagcttctgggaactattacatcgaatttcattaatagcataatatataaataaatataaatctcattgtccaaactggacagtgcattgtcctttcggttgattgacactggagaaaatattgagtacatttttccaccaaatatacctgcatgtggatactcttgcccccttccttatctcaaaacttaaaataaccatatttaccaccttcagcattgacaacattttctccatcaccaccgttttatttctattcctctatatgtgtttctattcctaatagaacacacaagccatcaaagtgaaagtctttatatgaaatacacatagatataattacctcagttcgaaatgatggcaggatacataaatcaaattgggccaatgagaaatgtagagatttcccagggtacatgaaatagtgtttgtgactcactgagtggttctactcaaacgtgagtatagcctaggagcctagaatcagggggccatgaaatatactaacagccctcttacttagcccatgcaatgagaaggtgcatttttggtcagtttatcacaaaagtcaattcgagcaagtaatcattttttaaaattaattcatatataccttaaacactgtaacttaaggcatataaatgttgttctattgttgactaatcttttaatgttagggacaagccttttcattaattgtggatctgttgcgtggcttttatgttttgggtttttttttttttttccccctgtactttactctgaatgcctcagatagccagtttggtttctttaaggtggatctgagactaaggacactcattgggcagagtgcaatggaatgcaaaatcctacagttctgtgacttttttccctaatcttttagttatcttgtctacatggaatttgagaaaaatatttttggcaacttgcctttaaagaaatcttcccaaaatattcagctagagaaacaacaatgccctttctttccacaagatcgtgtcattggtttacgcaatttttatgacaactgacaataaataggtttgaaaacaaaagtaacccatggtagacatgtaaggtgagagtaaaagagtacaaaatattggaaagtggcttgctggctgggagagtccagcactccctgggcaatctgtgtattttgtttgtcttataaacacctgatgagtcttggtctgacaagtgaaatgtaagttaagtgagtttctagtacagaacttgcttatgagtatcctatgagattcatgagtctttttttttttaattcctaggctcttattacacttaagatctgaccatttggaataattcacttaacccaacatttaatctaggcaaaagggtaaactttgaacttagtgtcttttataccaaggaccatgttccatgtggaggaagctttcctgactttcagcaagccattttcccttctgtattcttctacttctcaaagagggtctctgatagtttttttttcatattcaagtgggtgctttaagagtcaataaaatattatctgaaacctgagtttctcagggttgaattttaaataaatacaaaatactttccagtgcatatgactctgaaaatatgattgtgcttttttcagtaaaagataacagcattgttaagagacaccttggtagctcaccttgtcttttcttcagcttctctctctgctttgagagtaaatacgtttgtgttgccactcttacctatttaggagatttgtgctcagttctatatacctttctcctctaccggtaagtcccaaatcaaagctttcaactcttctcacctgcttctcccacagtcattttcatctcaacaaatgtgctctcagttgcagagaccattctcagttgcagagaccatgaacaccttcctcttgtgtcctatgttagtctgttcacaaatactgtttgctctaccctcagcaggtatccagaatccagctgctcctcaccaacgtcatcacgacacagtggcccaggccaatggtccaggccaatatcatttcttccctattgtgccccaagaggtatctaactggtctcttttccttagccttgcccattttggtctagtctaaaaacagcagctggagggatgtttttaaaatgtaattcagatcacatcactccactgctcagaaccctccaaggccctgctagatatcatccccacctcccttcccctttctaccttaatctctctctttcctcctacgcattttcttccagcctctgggacttggcatttgctgttccttctgtctgtatcgtgctctttcccagttacacacagagctttctcccccacagccctcacgtgtctgctggaaaattgtcttagcaggagctccccatttcaccagccttcggcacttcctcactccttttcctgctctgtgtttcttcttagcacgacttacttaccataatatccatttattcatttattttcttcctctgtctgcaggacggcactgttctgttcactgctgtatctgcaacatctagaactgtcagtgcccgacacttagtgagtgctcaataaaaacctattctattgaggtatttatgttgactaaatgaattccaacccaagtgataaaggtgtataaaccttaatgttgtgcaactcaagtttgtacagttcagttgttagaacagacaggaagatgatcctttgacaacaagactgagaaaatgtgattcaatgatagtctaaaggaaagacagaactctgggatcccgtgtgttatttttagagccacatttcaggatgtaatagcgctgctgctaagaatccatgacgagactggaggttttgaccctggtgtcctggcctctttccagtttggatcattatgtcctgcttacctaaatccttcctgtcgttacagttagagaatttagctttcatttcctctcctaaacaactgcctgttaaaaagaattactaacaaattgctgtcatatttaccccaaacctagtacacctttcgctaataggcgagtcttatacatcataaagcttaaaacagttaagaataaatgcagcctactaaaaaaaaacaaaaacaaaaaatttacccagtgtgatggcagatgcctgtaatcccagctacaccagaggctgagtcaggagaactgcttgaacccaggaggtggaggttgcagtgagccgagattgcaccactgcactccagcctgggcgacaagagtgaaactccatctcaaaaaaagaataaatacagccaaatgaaggtattttcccatttttttctaaactgaaataaagctcttttttttttcctggaatcattctcatctttttgctcactgttttacaaggcactatagaaataattgaatatgagcattctaataagttaatttcattagaaaagcaactttagttcctctcatgttttcttttgttttttcctcgctcagaatacaactagcttggaaggattttggtgtctagcaaagttgaaggcagttcagatgtctttcattaataagttacagctggcactgcacagcaaactgaaatcacagtcactagacgtaagatggaaatgcaggcctcattcaacatctccataaataaatctgttattctataccaagttgaattttcctttgattacaaaaaataagctgttattatgacgttcaaaatgcaaatattgggattgagtttagaccagactgctcattatactttatgcaggtttgtaaatatttggcaaacttcataaattatgccttgtaatcaagtcatcaaataagcatgtaaataactactatagaaattaaattacaaaaatattatgtattcttttgtgtacaaaaagataaagtcaggttatttgttaccagtaataaaatattattttaacaaattgggctgaaagtcaaaattgctttgctaaacttgaattgtgttgagtgaaagacttactgcaatggttccagaagaaggaatttattctttgtttcactaaaaaaaaaattgattctctatttaaattgagtcctcctggctttgctaacatcctgcaaagcctccaagccctgcaaccagttcctctactgatatttaaccacagcattaccccaagggatcagaggcttcagcctcgtctggggacttcttagaaatgctattgcatttcttaaaattcagttttaattatactgtataggccagtggctctcaatacctgagaacttattagagatgcagattcccaggccctgccccaccctactgaatcagaaagctaggatttcagcggccttccaagtgattcttatgcacactcaagttagagaatcactgctaagcagaaaagctcaatcactaacatttatatcctgctttacttgcagaggccttaaagaacttacattaacttagtggtctgatgcccaggctcaactgagctgatgcctgctgaatactaaagcagctaaattgtaaatctgaactgcctattgatcacccaaaccccagtatactaattaataaaagcttcttcaccacattgcttcaacagtttttgaggctcaaatgtgggatgagtgtgtaggtctctgtgttaatttttgttttgttttgggtttctttaacgtttccaagactgaaagttgacattttcttgttaattgtttttcttgaagctcttctgagttcattggaaacaaatcaatgagggggggcattaagctgtccggagtgcagagctgtgaatcagaacaaataattgagtgcatattcttaagtttaaatgtcccatcccacctaagagttttctttttgccaaataaggataatgggttttattgttatttctattgctgggttgagtttacggaccaccagtctctgccttacatgggctgtggtcatcagagaatctgtggagctggtgaaatcagtctcctggggcctcccatgaccacctttttcctctgtggctccttcttccttgcctgccagttctcatttgctcttgcaagaccatctctcctagcagctgctacctcagtgtctcatccgtgatggcgctctctgaactctgaattatttatttgtgcatcaccaaaagtgatagttcctttagaccagattttgtgaactcagatgcctgtgggagccagggaaatgatgtgaatagctgaaaacatgtcaggcaaagacaaatacgggagggtgtggactttagcaagttggagtgcacatacgctgttgaggggggcactttcacttatttccagctagttttccaactaccaaaacatgggcctgaggtttctagattgttttcatgtccatttaatactaacgtggattttttacatgaaatctcttgatattaaaatgttggcaactcattttttaaacattgtgcaaaatgacaaacatgtctgtggatcatttagaaccatagctatagacatcaggcaccatgtagcattaacacacttgcactaaagtgaatgctaatattgacttattgtgttcaccttattggcattttaaatgaaagatacctgtttgttcctttatttcttcattcagctattcatccaggaatatttttttgatgaaacctgaacttggacaaatcatttcaattatattaatctttttaatcctcatttgttaaagaaaggaattgcaccatgtgtcctttgaagtcactttctcttataagacttaaggaaggactggctgggcatggtggctcacacctgtaatcccagcagtttgggaggctgaggcaggtggatcatgaggtcaagagatcgagaccatcctggctaacatggtgaaaccctgtctctactaaatacaaaaattagccaggcgtggtggcccatgcctgtagttccagctactcaggagactgaggcaggagaatcgcttgaacccaagaggtggaggttgtagtgagccaagatcacgccactgcactccagcgtggcaacagagtgagactccatctcaaaaacaaaacaaacaaacaaaaaaacttaaggaagcactctctttgcaaaataaagtgtaccaggagccaaggatggtccaggttagttgctttgacaggacacttgtgtacacatggaaatccctagataagcttaacctggactacatcatcatgacaccaggagtcagctactaggataggaggctttgtggttggagaggtgacagaagtcattctgggtacttcctgtggacattaaaggttgagagatcctgagatagaatgcaagaaaatcagttgttctcggcttcaatcagttacacaagaaggaaagatctgagaaacattcagtgtggaatccagaggttttgttcctgggtaaagttagagaagctaaaatagagaccagattctgattctgattaactgggagtacgatgatacagctaatcagaaattgagggtctggttactttggatcagggagaaaaaggaacaatgaatttgtttaaatttttttctctgaggaacctgttagttgcatgacctgctatgggtgatgcaataggacagagatcatatactacttaggatccttaggggcttgtccatggggcgagctctgttctgtctctgtggcacatctctaggcctctgaaatcctgaaaaggtctacgtttgtttgtttgtttgtttgtttttgaaactccctactttcataaggaattaagtgtggatttttagctggcatttttcttagtgctggacttacttaaaagctcctggtcaaaatgattcttcaggaacatgcagctgaagctagaggatatttgctgttgttttcggggaattttgtcacctgtatcagtgaagttatttctttggatgagagtatcaaagatgaaagaggcctcaagcctccgcttagctcccaggttctctgcagctgcactgaccatgttgacaaggtcatttaaacatttgcatggacagtgtgtttttatactgttgactggtatttcctgaatgctaaaggaatgttgctcatgatagaggatgtagttgcatgacattctatgcagaaagtacaggatagtaaaaaaaaaaaaagaaaagaaaagaaaaagaaactaaaaatcccctagagtgtatttccccttctgtgtcttttcttaattcaagtgaaatttatgtaacataaaattaaccattttaaagtgaacaattcagtgccatttagtacattcaccatgttgagcaagcaccacttctacctactttcaaaacattttcatcaccctcaaaggaaactgcatgcccaataagcgggttcctccccatcccctctccccacagcgctgataaccactctaatgagtctttttattccccacacactttcctttttatatgcagttggactcatgctgtttaatatactgcattttattatatgaattttcctgtttaaattaaaactttttcttaggtttcaatgtaaccgcaaatccccatgatctgtgaggtggattttcatgggcgctcagctcttgctgttttagaaatcatccagcctccttcacagttgtgtttgaaatgctgtgctcttcatggggcacatggttttcagtgctggagcctttctcaccactgcatttcatgaacttgacaggtttcataagaagagactgtagacccagcccagagaagctcattttgtcctagttgcaagtgttatcaaatgactccaccaagggaatgcaaaatgaattactctaattgcactagaagcataatgtgaagtttgtatttcaccttttggcccctgggagagaaaaatgtcactgactttaaattgcttttccattttccacatagccccagtttccagtgccagcaaaaaattgccattggaaacataatgtatgctgacatgggcctacatgtatttgtatgttttctcatctgtgtggcaaaattaaaaactggatggcatgaagaagtgggcagaatcccttgtattacatgagactttgttgcctccaagctctatgatctggagccagtaatttaatgatcataatctggggtcggcaggtgcaggccatgggctgaacacaacccttagcctaattttgtatgtcctgtgaactaagaatggcttttacatttttgaagcgatgtttaaaaaataaatttaaaaaaaaaacaggaaaactagacaacatggaactatgtgtgcccctgaagcctaaaatatttattatctggctcttaatggaaaagatttgctggtctctaataataatactaataatagtagcagcagcagcaggaaaatagtttatattgtatgtcagacactgttcaaagtgcttgatatgtattatctcatttaactctcacaagtctgtgggataggtattatgattatcctcattttacaaataaagatgcccagagaggttgagtaacttgacttttcaaggccatacgtccagtaagtggtgttttgagcccaggcagtggctctctctagtgctctagatcctgaattctaccaccaccctgtgctgcaattcacagttggcttctttttctttttctctttttttttctgaggcagagtctcactctgtcccccaaggctgtaatacagtggtgtgttctcagctcaccacaacctctgcctcccgggttcaagttattcttgtgccttggcctcccaagtacctgggattacaggtgcatgccaccacgcccagctaattattgtatttttagtagagaccgggtttcaccatgttgaccaggctggtctcaaactcctggcctcaagtgatccacccacctcggcctcccaaagtgttgggttacaggcgtgagccaccgtgcacagccagttggctgatttagcttatctgtataaaaactggggcagggagtggggggaacagcctctttcacctgtaacactgtgtgatgttaatgtactttttaggcaaatgttttaagatcattatctgtgggagctatagtcatacagtagtacttcccgaattagtggcctgaaaaaaggattccttaaaaaagtccacatataaagggggttctttggtcagctaagcatgagaaagcctttagacaggtttctttatggtagtgctttcagaagaagtatttcttttttttttttttggaggagctgggtctcagatatatttgagtcttagtgctttactctttttttttaagttttagggtacatatgcacaacgtgcaggttagttacatatgtatacatgtgccatgttggtgtgctgcacccatcaacagaagaagtattattcttatgtggatctcagcaaggaagaaagctattcagctgtttcctaaactttttttttaattttttgatgagacaccattaacatctttcagaaccagtgtggcactgaataaaagtcagtaaattatatcatagaggcattattcagctcaatatttttctagaagtatcaaaacaatgatgtaatctaaggattcatttattcatatttaccataaatattctatttattttccctgtttttccacttccacttgtcttcactcctcactgttttctgctgtgtgtggggagactttaccttaaaagacagagaaccaggtaatgaaactcaagcccaccgatttagattccttttagtagctcttatattgaaagtcctatttagtttatagaattacctatagatttgatttgcttgaactaaattggtggatgctgcctagttaagagttagacaaaggcttcttgattgattatattgatctcagactaagcaggtatgattgtcatcaagttgaaatactatttactttggcatgacttaatttgccaacattgtcaacaggtacctgtcaggaagaatgtgaccgataaatacaggccatcaactaaagaaacaactctatgaacaccttttaattcaccagctgtttactcatcccataccaacagaatttcacaaatttgactgagttgagtccaaaagtaatgctgtcaaaaaactgatggttgctgactggcttaagatgatgcttttggttttctcaacattttaaaatccctccattcttctagagctttccatttggatgccaaataatgttacataaaataaaccaaaaatcttattttatttttgaaagatttctggggatgtaggaatgtagttggtctgtggactttcaggcactaaagaacatcatgtgttgtatatctaaatcagaagcacaagtgaatataggcattaatgtaagtatactctatgtatacatttttccctcctgatcttttgtgtccataacagtatatttattgtagtagatatttggaaatagatgcagttatttgtgacaagattctatagatccaataggacattgctacagggtatctattaatatatagaatcaggcttaggcaatgcaaaaattgtgtctaaggaatgctaacaaagccatttggtatggaagtttgggactgcagcttctgaacagcacaggtgtcctcttttttcttgtgactatttagaggctctttttgacctaactggccagtgttgtcaagataaccagcaaggctgatagactgttttgactctctgggagtgactaaattaattttgtctaggaatgtataaatattatcctcacccattcaattatctctttcaaacatagccacccatactcatagatggcagcttatttcttgcacaaatactcattcaccatgctctgagggtaatttaagaatcatatgatttaattttgtctaggaatgtataaatattatcctcacccattcagttctatctttcaaatacagcctcccatgctaatagatggcagcttcttttttgctcacatactcattcagcatgctctgagggtgatttaaaaatcatatgacacttaatatatttcttctttcactttcatcaattttactctgtagcttcagactgtcaagaaaaagaggccccagttgctctctttttccccctttcaattcttctcttttagaatttgaaaactttatgaggattattattgacttcccaagggcttttgaaattaatgttgggttgtctttttaatttttgtgggggcaaaagtcctgttgctttttagccaccagtttcagaagtaggttgctgtcagtcattatcacaggctcactgatgtagctttctatcctgggtttatcaactggacttgtgtaggatggcagcttagctcctttattatgcaggaaagtcttcactgtcttttttcttgcactcatctttcttgcagcaacagttcatggtgaattgccctcttgtcccatgggcatgtgggcgtttccaacactgacattgatatcttgtgacactaacacttagtacctgcacttgtctgtccttggtggagccaggagaaatcagctgacatgaaagagagaacttgtttaatttttacttcttaacatgatttagaagttggtctgttatacaaacaaacattagtggttttgttcctttttaattttaggctggatttagtgtcctagatgaatacctttgaaagataaaatgttcatttgtcaagtcctgcctgtaccatcagcttctccactctccacctctgccactggggttttataattcccaggcctcagacctggaccaaatgctgtgggaatggggactcaggctttgggaacgctggcccttagcctctggctcctcctgctgctctgctggctctggccttggtccttaggtctggactggacagttggtggcccaagtcatgttctgatataccccaattttaagaagtagacctctgtctggtttctgtactggcccaagtcatgttctgatcatgtaccccaattctaaaaagtagacctgtgtctggtttctgtactgaatcatctggtaagagttatcccaagaagcccagatcttccagaccagaactatctcaagcaggaggagctgtaacttccaacagtcttcctctgggccagctccctgctgcctgatgagatcctggaaatcaccagctcctgaatttcctgtggctgtgaaatatcctcttacccaacctccctgcagctgcctgcattgcttttatgttgcctgtaactttctttcaaatacttcaacacatgcagtggggtgtgtgtgaattttcatccaaaaccagggaatgagaatttaaaattttaaatgctcaccctaaaggtagttagttagcgtttgaaaaatttgaatcaaagcttaaagatcaatcattatatataaattatagctcaataaaattaattcaaaataaaataaaacaagcctaccctccagtggccacctacacacccccttcagttaattttctctctcattagcaccaggtgctctgatactagcctcctggagtggtttctacatgatagacacctggaggcttgttaaaatgcagattactgggccctgcccccaagttgctgattctgtagatttgggatagggcctgagaatgggcacttccggtaaattcctatgagatgctcaacccgctgatcaagggaaccacacttgagaacctctggcataatgcagactggaactaccttttctttggtggagttcttcatggtattcaagatatgcaatttgtgtagaaataaggtacaagccctggtatccttgtgagcctagggcacaggaatctggcaagcccaaatgcctgcctggtatctgttggaagcttgttagaaatgcagaatctcagtgcagatgccaggcttactaaatccaactctgtggttcacaaatgcccccaggtgatccaaatgcacattaaagtttgagaaacacctgcccaaaccaaatttagttcacatcatctagttcaattgtcctcaactataggttcacgttagagttacctgcagtgtttaaaaaagcagattgaaagacagcccaagtacattctaattattagttagaatctctagggtgagacccaggcttctgaaatgtcttataattcccccaggtgattctaatgtaccacaggtgctgggaactaccagtctagtctctctaagtgctatccgcatagttcttttaacagtgtactagctggaaatgtcttccctttagcctgccctcaaagttaaatactgacaatttaatgccaactaaaccttctcctaattcaaatgaaatgatttcatttgccatgctttttaaaatttttttattttttatattttgtattattattattattatacttcacgttttagggtacatgtgcacaatgtgcaggttagttacatatgtatacatgtaccatgctggtgtgctgcacccattaactcgtcatttagcattaggtatatctcctaatgctgtccctcccccatcccctgaccccacaacagtccccagagtgtgatgtcccccttcctgtgtccatgtgttctcattgttcaattcccatctatgagtgagaacattcggtgtttggttttttttgtccttgtgatagtttactgagaatgatgatttccaatttcatccatgtccctacaaaggacatgaactcatcattttttatggctgcatagtattccatggtgtatatgtgccacattttcttaatccagtctatcattgttggacatttgggttggttccaagtctttgctattgtgaatagtgccgcaataaacatatgtgtgcatgtgtctttatagcagcatgatttatagtcctttgggtatatacccagtaatgggatggctgggtcaaatggtatttctagttctagatccctgaggaatcaccacactgacttccacaatggttgaactagtccacagtcccaccaacagtgcaaaagtgttcccacccctccacatcctctccagcacctgttgtttcctgactgtttaatgattgccattctaactggtgtgagatggtatctcattgtggttttgatttgcatttctctgatggccagtgatgatgaacattttttcatgtgtcttttggctgcataaatgtcttcttttgagaagtgtttgttcatatcctttgcccactttttgatggggttgtttttttcttgtaaatttgtttgagttcattgtagattctggatattagccctttgtcagatgagtaggttgcgaaaattttctcccattttgtaggttgcctgttcactctgatggtagtttcttttgctgtgcagaagctctttagtttaattagatcccatttgtcaattttgccatgtttttatagactcataagaggaaacatgttggtggtgatttatctacagtccctatttattttagaatctgaggcactggctatatttcatggcaagctaaaactcaaatgccttcatgaaactaaatttctagcttaagatgaaggtgtagttcctgcactgaatagccttcatctgtagatttgtgaaatgttgcagttttacatctaagcaccttataaggaattctatcttagacaagattagatcctgtggcaatctttatttgaaaagcttcatagtttgctccaagtgcatggaaatgtgtcttatttctcttgaatgccctttaggtcttaacagaattcacagtgccaaggagtcaaaaactatatttcaaattatatacattcctgacatattatttgagcagattaaaactgatggatagagcaatttaggcaccttgaaagtagctacttgaaaaatgccaactttttcttatctccattcacttaaacaaaaatgggccaggtgcagtggctcatgcctgtaatcccagcactttaggaggccgaagcagatacatagcttgagcccaggagtttgagaccaacctgggcaacatggccagaccccatctctgcaaaaaataccaaaattggctgggtgtggtggctcacacttgtggtctcagcttctgggaggctgaggtgggaaaatcatctggacccagggaggtcaaggcagcagtgagccttgattgtggccactgcactccagcctgggcaacagaacaaaaccctgtctcaaaacaaatagaaaagtaaaacaagaaaacaacaaaattaattgatctagatttgtgagttgtcgataccaagaagttcccatgttttaaatatttcagatggccccgtcattgattattctcacagctcagatatagggaagatgaaagctgctgcctatagcatcttgcatcctcttgcttccacatacaagaaatgtgaacttcaatcccctaaaaaggtcagagtttccattctagtgaacacatttgttcagcccaggtggggtgggacatgacaaaaaccaagagtgggtctagaaccatggggctcttcccagggctatcactatgagatagaatatcctgtgtgtagtcactctcagaaacagcagctcccttaggaaactgctgtgtcctgaatgcttgtgtcccaccaaaattaataaactgaaatcctaccctctaaggtgatggcattagaggatggggcctttgggaggtgattaggtcatgagtgtggagccctcaggaagaggattagtgtccttattttaaaaaggtaccagatagcccccttgccctttccactgcatgaggacatagctagaaggcactacctatgaactagaaagctgccactgaatctgttggcgccttgatcttggattctccagcccccagaactgtgagaaataaatttctgttgcttataagctacccatatattgtattttgttgtgtgtcaaacaaagacaaaaaccaaactcacatcttatatgggcagtggaaggagaactccaagttgaggggggctgctcttttagacctatgattctcaaattctaatgtgcacaccagtcatctggggatcatgctaaaatgcagattctgattccatggttctgggatgagacctgggactctgcattcctaacaagctcccagatgatgttgatgctgttggtcttggggccctttgagtagtaagggtttgcaacagtgcttcttaaatgtgtgtgtgcaaaagaatcacagggaaggctgattaaaacgtggattcctatttcccatcctgaagattgattcagccggaggcctgataatttgcattttaacaagttcccaggtgatcctgatgctgctggtccccagactacattttaataacaagcctctagttaacttttgaacaacttaattaagataccttcactagtagcctcttctgtgaaaacagagagccaaacatcaaaagatgaaggaggatgctactgagtccctttggagaaaattacatcacaaacttggagagtgccacagggtctctgttcatttttccattgacaatatgcttctttgactaaagacgaaaaataattcttcaggatcaaaacctagagataagattggaaccctaagattggaagtagtgctgcctgatgaataataggactagttattttaggatgacgggccagcctgtgcctagtgaaagcttagaaatgccaatagcagactgagcacggtggctcacgcctgtagttccagcactttgggaggccaaggcggacagatcatctgaggtcaggagttcaacacaccctggccgacatggtcaaaccccctctctactaagagtacaaaaaaaaaattagccgagagtggtggtgggcacccacaatcccatctactcatgaggctgaggaaggagaatcgcttgaacctgggaggtagaggttgcagtgaaccgagatcccaccactgcactccaacctgggcgacagagcaagactccatctcaaaaaaacaacaaaaaaaggaaataccgaaagcaaaatgttattggtggccaattcttaatatacgtcatgagatttggggtgatgtttacttcttactgtgtatttctttgctttacactttcctatgaagcatatttaaatattgttttcataaactgggggaaaaaccctaaccaatatttttaaaagaaaaaagtaaaatatatgctcagtgtaagttcatagtatttttggtttgtgtttgttgtatctgtgtctctctacgtttgtattttcatgggaaagggattatttttgtctatgtcagtcctaatgttcccggggcaaaggtgatagatgggtaagagcaaggtctaaacatatgcctggaagttggacagggcctggggtggtgaaaataaatttaaggagtcccagaggagaggtcaaaagctccaggagagaattagaggcagcttctctttctctccttgccctccaaacaattcagcacaagccctcaagtcccttgaagagtctttctttcccccttcttcttagaagggctgaaacacactttaagttaacttaggaatggttagaaaaggttaaaaaaatgggagaacagtagcaattaacaagctgctagggaaacagggaaaccgtgctgatccgaacatcagagccgacctcctgtggtctggttccctagcacccaggctcaggcttcggcttggggtggccggaccagaaggaaagtgccccgtgtggcagaagtcatctcaggagcgtgtcgccatccagccaatgacttgtgttccaaggactggaaaatgcgcttcctggacactatgtagatgattaccacacgagcttattttcagcaattcaagaaagaatccaattcgtggtttattgcttctgttagtctggaaatggtcaaacaagttgataggcatctagttcacgcctggcgtaactttccaacaaaactccagggctctactgacacctgctggcatttcatctactttatgttaaaaaaaccccaacaagacaaagaatcattaatatttttcctgcagtcctttgcccttgttatgttacttgtactttacctgaacgataatagaaggggcctttaccatgtcgtgaggagagaagtgtgggcaagccattgggtgaaaataaaaatccccaacacgaagaatgtaccacagagctcttgttgcctgtctgccctgcaccagctgctctgtgaccttaggcaaggccattgacctcactttcatcattgcaagaagaaagaggcagcaaccttccctcccagttccctttagggcttctgaggatgctggtggcatttcctactaactaaagcatgggccctgtcactggagtgatggccttaaaggtcactctcactgacctttccatcacaataaacaagattccttgccagcgttgtatgttcaaaagatgaatgaaagttatttaagcctcttcaaagtgcaccatctctgtaatttatttcgacaaacaactaaattagaatgatcagaaaaagcccagtgaacagtctcagaaattgtccactttttttttttttgtctaggaaactatggactttgttttgtgttttagaacatgtagtaagcctgcaggttgagaaaatgcatcccagttaatgccaacccaattatttgtgctttttctgtctattcttgggaaactctgtgtgggcctgtggtttgttaggtcaataacaggatatttgatagtctgcagggagttatagtccatatttagcctgacagaggaagtgagttctgctgatgaaaaataattgaggcatttctttaattctactatttcatttcttcatcttccttcagaatcctgaccccactatgatgcttgctgaggctttcgatgctatttacagctctgcttttgctagtcacaaaagaaaatttacctcttataacccctaagtcttccctcagaaaactgttaggtgtgaccaggatcagcaaaaactgttagattcacatccattagtttggctactacttaaaaaaagaaacaaacaaacaaaaaaacccagaaaatatcaagtgttgttgaggatgtagacaaattagaaccctgagcaaaagggttcccttgttgcatttgcagtcctttgttggtgggggaaaaatggtatggccacgatgaaaaacagtatggtatttcctttaaaaattaaaaaatagaattactatatgatccagaagttccacatctggttatttatccataaataagaattgaaagcagtaacttatttgtgtatcaatattcatagcagacatgcaattcacaatggacagggagtccatcagaggtgaatggatgagtgtattattcagcctttaaaagggaagaaattccgacacatggtagagcatggatgaactttgaggactttatgctaagtgaagaaagccagtcacaaaatgacaaattctgtatggttccatttatatgaggcacctagcatagtcagaatcacagagacagaaaggagaatggtattaatatttatcaatggctgggaggagggggagatggggagttatttaatggatatggagtttcagttttgcaagatgaaaagagttctggagatggctggttatgttggttgcataacaacatgaatgtacttactgccactgaatttttcatttaaaaatggtgaaggtgataaatgttatgttatgtccatttttaacacaattaaaattaaaagaaaggttaaacagcaaaaaacaaaacaaaaccatactctgttagaacgcagtcatcacctttgcccttacagagattaaattgcttgactttttaaaacctggttctactgggcagtgctgtccaacagtcccatctgtgatgatggaaattatctgcactgtctgagccatcaaccccatgttgatgtttaagcatgtaaaatgtgattagtgcaaatgagacactgaactttatatttattaaatttaaatagccatatgtgtctagtggataccatactagacagtgcatatagagtatacgtctatattactatctattccaagatatttttccttcctcagcactaagccgcaaatctaagcagtcaggctgtaaacctaagaaggtaaggaatcagcttatgtgtgggccaccgttctatttaacccaaatgtcaatttgctacgaagtgttttgccgagggtatgattcttctatggcattcattggcatcagtttttggacccaagggcagagttggccttaattcatgggctgagcttttctagtaaatgcccttttagagacccaaattcctctactgccatgcacaatttcccttcacttgtccttgtaaaacagtggagtgatggtatgaactacaagtgaggtccaagtccttatacagaaattatgtgagcacatcgctgtttgctctgatcaccctggcaatgaaagaatgtttttctttttaaggctttgctggaaaacataggtaagataagtaacaaactcttagattgaaaggatcacacaataaaattgatgaacccctattcatttatcctctaaagtgaaaatagttaaatatgtcatgtattttataatgctggttggaaataattaagattgccagcaactgaaaaagggcttatatttaaacaagctgcaaatagaaagcttcacaagtcagtcagtgggcaacattcctttgtggcagcccagagtttaatggcacaatagatggcacatttgtcttcatggaaagaatgaaagctgtttattaaagaataaaatatgagcctgcaaaatatagatggctgtgtgacaggaaagggacaaaagaagagtttgtgtttttattacacaaaatggatacaatctatctaataaaaactgctctatttgactccagcagatttgctcaccaagaatattttttctttctctttcagcaatgggtagaaggcctgagatcaatcatacacaacttcagggccaacaacgtcagtccaatgacatgcctcaagaaacagtgagtgttgtttgcattactcgtttttcttggcagttatcaaacaaatggtcagatgaagagatgaaggctaggtggttccttcctccaaattcctgcttgcctttccctccatgctcctgaccttggagttgaccaacacacacctgtactcttcataccacgtagaaaggcatgcatgataaacccatagcccaaaacctatatgaaaagaatagttgatggtcaaaggacactggaacctcagtcactctgtatgctgtcagttgtgggtactggcttttgtgtccccagattgagttttctgatagacagctctgcatgtctggagccatcgctgagtgctggggtaattctatcctctgctgcataaaactgagaaatgaggagtgtgaccaagagacgcacttgccaatgcacctgaaaaagaagcctcagccccaagtgcagtgctccttgtttagcacaccgtcagggatccaaagttacctctgaatttttttctgtaggattcagttatttaaagatttgatcaaggatccaatggtgatttccaaatttattttttccatgaaagaaggaattactccagcttacagtatctgaaatccagaggagtactacagtggtagatttaaaccctacccaagttaacctttcaaggtgacatgaaaatcacccacaaaggaatcctagccaaagtcaaatgtcagccagtttgaaaagcagtgatccgtgaaggtgggggccatctgccttcacagggccattggcaggcagttgtgaggtgccaaggggaaccatgttgagaaattgcagggataagcctgtatctctcaaaattatgccccagcaccaagagtgtgattcatcatactcacttggcaatgggccaagaggttagtcctaaaggtactgtcatgtcttatcttctggtcattgtggcaggtgcttacaggtgtggtctctaggctataaatcccggcttcaccatggcaaattcttacacttgtgcctcactgtcctcatctgtgaatcaaaattaccatgcagatgaaattggaaagtattctttattcaatactacttatcttgttatggtatccctccaattttctttcacccttttagtggaggaaagttatttagtcttatctatttctatgtgttgtgcagctgcttcttcttttcctctgcagttgccctggcatgtgtttttaaagagaaacccagtggatattctgatgttatgacttcaggcactgatagtcctaaagggtcaaaaacttttagaaggcttgcttatacctgagtgacacaaatatctctatctgacatgagatctaacaacatcctgcccagatccctttatgaagctggtgttcacccagccatcatctgccatgagaatgggctcaccaagggctcagacctgtccacttcttcagagcattgccctctgctgaaggggagcttccattcctggaagattatactcttccctcctccaggaggaagtccacagccaatgatgagctgcaacagggtacagaaggccatccctcttgccgccaagtctggcacaaatcacatgagttcaagctaaatcaagctccatctgaaaccacaactttgtttaactcttttttctgctcagtcttctctcactctcttcatccctaaaacatcccgttattaaagtagttagtggtgcttctacgaaacttaagacagaaactttactaaatcatcatgttctgcaaattgttagcacattattgattggaaacaggaagaatgggagtcattagctaagaaaagtcctagctccaaagtacagataaatgttctgagtctcctaaaagcctggggaaagcaaggaatttttcaccatcaatttgagttgatgaactagtcttaccactggaaattaaggaggcgcccatgtgatcagtacttggcagcactaggagctgggagtgatgagtcctcatgaattctcaagacaaggctggctgctgtcaccgtgcagttgcatttcccaccaccttaatatattattacagagcaataatcgagcagaccaatcacaaataagtaccaacaatgtgttttgctcaatggaggcacccagtcatctcatttagctagggttgccagataaaatagaggacacttagttaaatatgaattttagataagaaacaaaaatattttagtataagtatatcctatggaatgtttggagcatacttacagtaaaagaaaattacctgttgtttttctgaaattcaagtttaactgagagctctatatatttatgtgctaaatctgacaaccctaaattcatcttatagcacataattgtctgattttcagaaccaatgttcttgatttaaatgaactttcttttaaagttcttaacagaattgaagctgctccctctaagaaacattaaggcaatgttattgctattgttttgcagctggatgaaattggcatttatgaccaacacaaatggtaaaattccagttaggaggtaagtaatcattcctatctgctgtccgtgtcccgggtcaacgcttgtcatcccaaaccaaagagagaacccttcacaagtatttgtgtgttaaatgctttaaagatatttctggaatcttagtttcaattgctttgacaaatgctatattcagtttgtaaaaatcatttatggaagtaaaactgcatttttttggtcaaaataggtggcaaaagaggtactttgacaatttaaagaacatcagaaaatgtagaactattttttaaaatcggcaaataagtggtttttaggatttatgtttcttttgcttatttgccatgagaaactgttagctaaacttaaagaagattttattgtgcacctactgtggaagggtgtggaccgtgtcttgagaagtgtgatgcctctgaacagagcattttcattctgggctttgctgctcctctggtgctcagggcagatggggatacttctctggcttcgtgctgcctactctctacatgtactgtaactgacaccacacactctgtggagctatcctttccacctttgccctgatgcaggtaacaatgacaaagaataaaaaggcttgaggcagggcatggtggctcatacctgtaatcccagcactttgggaggccgcagcgggtggatcacaggtcaggagatcaacaccatccctgctaacacagtgaaactccgtctctactaaaaatacaaaaagaaaaaaaaaattagccgggtgtggtggcaggcacctgtagtcccagctactgggaggctgaggcaggagaatggcatggaacctggaggcagagcttgcagtgagtcgagatggcaccactgcactccagcctgggtgacagagtgagactccatctcaaaaaaaaaaaaaaaaaaaaaagacttgagtggaatcaagaataaagaaaacatggacaggatacatcctccacatgtgttctttaatacttaagtggacagatttcaccctctgaggattccccatgcatccctcttttctgcttctcacttccttccaggggttagggtttacacatggtctctgggtacagttggaaactctttccacagtagtgatgggaattctttaccaaactcttcagtacctttttggttggtgtttgttttaagcattcatggaaattccagaagctgggctgggccccagggcatctgcttttcacatgaagacaggcatgtatctggattcgtgaacctaagcccacaaccagaatcaaacatgggttccccagatgccaactctctcttccagggttctccagactcaggttcatgttcacttctctggacaccactttagcaaatacgcaaatcaacaaataataacaaacaaaacccagaactactgggtggaatcctgtcttagaattgatctgtctttcagaaataaccaggtcaccgagtgcgtagcatctgtgtggatgcattgagcagtggcatgtgctgtggctcctggcatttctgactctcctttgcctccttccctgcccagctgcttcattctgctctgcagcttccattctgcatccctgtgagactatctccatactcccttgacattactcttttcatatttaacagaattgtcccagaagacctcatttttctcaatcttgtatattaaacaatcacgacctaaagtatccatgtgaccacttaaatatcgagaaaatgtaaagcacagaagtcatgaagaccttagacaattttttttaaatttaactctttattgagggcttgttgagtcatggacctcatgcatttgttgtggtctttccaaatctatctgtaggattctctgcttttatttaataacttgctagcaagtcaacttttagtctgctttagaagattgaaaaaagccctgttagcagccttgactgatggttgttggcagatactttatgcttatccttatttaaaatcctttgctcagttgagtaatagcagaacaattattttaatgtatcccagtaccctacagctattgcatttttatttaaaatcagagagcacaaagcagtgtgaagaatagaaatgtaggttggatgtgtttttacatgccttactatcctgctttttcttccaagatgaggttcaggaaatgggcaaagtagagacacatagattgtgatcaaagcacttctaaccagcagtcttggtttcatttgtatgtatcctatgaatcaagtcattgtcatacaagctttgaagtcgtttctgattccagtgatttttatctaacatgttcacatacaaaattattaccacctttttgtagaaatagcttagatattttggcatcttctttagctctctttgacatggactccatggtgcttgccagtattaacaggtgtttgacacaagacggctgtgatttgggggcagtttgttagagttgatggagaattgataccatgccagaaaaaaaatcagataactctattggtgaatgagctgccaagagttagttggaaattgttgtgtatgttttaatggatatgaagagtaaacacttttaaaatgttattcactatcattctgaagtttctaaaatggaaactattagtgtactgtccataatattaaaagagatctggcttcatagtgattacatagcttgggaatggttcctgctctttagcattaaaccaaaatttaatatccaggaagttgcaggaataacacatgaagaaagtcttaccttttgtctccctcttctcttgtcttgctgtttacataacccatgcagtctgcctttctctcaaattcacaaatttacactcagtttatcctcccactcagaccaaagttttggaaataacaattctcttttgccaccttccctcctctctcgtaacctggagtgaacaccaatgactagaaaattgggaagtgagtagccagacagtagttgtgggcaggggctggaagagatcccaaacaaaacggctgtgttaaagaaggctgagagccgcaggtgccgtcttggaagcatccctatataatcagcccaaccatgtcctgaaggcccagcagcccacgaagaaggtatgattctgctggggcagttgccccatccttcactcaagagttctctgtaactttcagaacacggtgttaaaaccatcgtgtagattgcagaccctgtttcagctagcaaagagtgggactcccttagtttctaggatcgttgctgttttagccacttgcgaagtcccccggaatagaatttaaccaggactctaataggactggacacaactcaggggtgtttgcttttgtagcatttcttttggggaatgggggtggtttagtttgattcaacaaaaactcattgagtaccagttagctatgaggcactaagcttatgtgaacatggggctatatagagatttgagtaaatcacattccctttgtaaatgctctatgttcccatgaaacacagccacgatattatctcccttcttggccccctccatctcccttccccttgagacattcttctactttctatttgttggcacctggccaaaccctagccaaaagattcaatttctgtgtaggaaacagaagctattggtacccaggttctgtttcaccagaaaggctcagtctccacacccgctgatttcatgcccacgttgatcagttttcatctcgttatgccaggcatgtccaaacctaacagaggcttcagttagctgggatacccctgagattgctatgcaaagattgttctcctgagagcaaatgccagatcctgccagagtcttactagctaggttaacacaaactttttatgaaataatagtcaccctgaacagctactttcccctaaattaaaaaggctacaaaatttttgtcttaccccaaatttaatgtataaaaattacctgaactctagagatgaaaaatgtaaacatagcaccctctatactaggaatcttaaccatttattgatgtcacacacatattctctcccatatttgtagatttgttaaagagaattcacaggcctccttatatttgaatacaactgtctcaagaactcttaaaaatgtacttcttgaagtattcttggacctggcatgaaacaataaagctgtgaatgaacacataattcatttacctacagctacttcttagtctattttgggaagtcctactctgccactgaagtggtgctttctcccactcaggaagaggaactgtcagcactctcattcagaacttgccttctacttagcacggatggcggaaagtacaaaaacgctgggcatgagatgctgttaaaaatccttctgtgctcacaggggaggcattccaaagccagccctcatggatagaagtaaaactccatcctcaagtcaagctggacttctgaatgtcgagttaaaatgaaattatcatggtaacacattacctgggcttccaatcagggagcgattgaaggctccttggtggctaaggtatggctcagagccaagtgtggtgttccagggtaccaagtcctctgctcaatagctttcattctgagtggcaccaacacatttataatggagagtctctcctaacttttatcatcaccaggaagtgtgttcatcaaggtgttatctattctactagccttgatgctcactgttctagttaaaaggctatccaaaaatactatgtcttggggtactactgagatttgttgaaacattggataattgttccccttccccctcacccaacccatcatgttgacagtaaagtcccttatccttgaggcagctgacatttcagaggggctcaagggtgcttagcttgaaaacaagaacaaaatatgtctgatcacgcccgtgtcaactgtggttaagtgtgggaaccaggataaggacaactgaaggcatggattgagttgtaaggggccgcctccttttccctaggcccagatattgtcaacatgagggtttgttctagagctactgtcttatctgccacattcctttttcataagaaggcaatttggtagcatcagaatttatcattgtttttgtccaaaaatgtgtgtcccaggccaggcgctgtggctcatgcctgtaatcctagcactttgggaggccgaggtgggtggatcacctgaggtcaggagtttgagaccagcctcaccaatatgatgaaaccccgtctctactaaaaatacaaaaaattagccaggtgtggtggcgtgcacctgtagtcccagctacttgggaggctgaggcgggagaattgcttgaacctgggatgcagaggttgcagtgagctgagatagcgccactgcactccagcctaggtgacagagtgagactctgtctcaaaaaataaaaaataaaaaataaatgtgtgtccctccagtgccgcttgccccttgttctcccaagcaccagggggacccctggtcttagattcaagttgcatcactagactaaccagctctgggaaccagagggacactggaggaactagtttgggaaatgaaaaacatctgcaatgagaggtaattttattctcctcttccttttaccctagtctcactctccatagtaggacctggatctttgcatcagagaaaacataatgaacaataactggaatgtgtgtttctttcttttctgccctagtattactagaacatttgcatcgggaaaaacagaaaaggtgatctttcaagcactcaaggagttaggtcttcccagtggaaaggtatgcattaacttaataatgtatttctaaaaccattttgtttatttatcttctcatatgtaatgagctagattatttatattaaactgatctaaattagatttggaattatatgtcagtgacatatagtacagttaattttcttttctttcttcttcctccctctcccttcctctctccctccctcctttccttcctcccttccttccttttgttgcctgggcattttaacctaaatctctaaaaatgtaaatagtttgcttcaaatgatttttgtcacctttcttaagaaaaggaaatgaaggccagcttgctgtgttacacagtttttattttagagaagctcaccaacactgcctcaaccaggcacaacattagcatgaataattaactaataaattcaattctacaagatggctatgcaatattttgtgaagcatctctccccgcaccatttgtattcatggcccttcaaatttaaaataattgaaattaatttattgacttgaagaaagattgaagcctggtactattttaataagtcctatttgaaatataaatttcagtttgaaaagtaaaatcttacatggttaccctaagcccgttcacatggtcttgcaaaaattcacaaaataagcataattaaaccttgggcttgatttattcagcatccctcaggcaggcacttttctccctcaaggtgagttggaggaaatatttatattcgttctttggggtatttcccagagcaaggccagctgtagccaggtgttcgcacacacagaatctggcagcatgataactagaaacactgatgtacacgcactgttttttagtgagatggcctggcagtgcctggaagttggcctcctggcttctgtcagcaggaatcagagatgaagaccctgagtccaagtggtcttcactgtgcttcatgaccctgtagcttctcaccctccaagggaaaaacggttctgtgattcataacatgattttattccttacagaatgatgaaattgagcccacagcattttcttatgaaaagttctatgaactgacacaaaagatttgtcctcggacagatatagaagatcttttcaaaaaaatgtaagttccacttatgaggaagtgccatataaatattatcactgtccttttcgattttttaaaacgtttttgtcctattttaatagagtatgttggtagcatctaggaatatctagtcagggttacatttttaaccccatactttatcagtgtaaaagttcactctgagtttttgagaaacttttacgtatattaattgcagcacctggaacttttttttgcattggctttactaactacctacaattttaacctgctcctttaggtattaacccattatgtgaactaactagattcaatttggaatgttaatatgtttttgaaaagttgattcattccaattatttcaaatggatgacttacatgttgtttttgaaataatatcttttgaaaacggtaaaaaaaaaaaaaaattgcagactttttctgtgacctagtgggagtgttttccttctgttgttgttgttgttgttgttttatttttctccctttatgaacagtctctggccattttaagaattcaccactacttcagggttagaaaataagtttagaattatcatcaacaaatgtcaacatgtaaatcgtacatactgtagcatcatatacaaaaacttactttttctaataaatttcttttcagcaatggagacaaaactgattatttaacggtagaccaattagtgagctttctaaatgaagtaagctttttcatacattaactccataaagtctgtgtgcagtggcttgccttctctggtgtcctcattgcatgcctgcatcatatgcccttattcgctttgcttctgacctgctgatctttccattatggctttaccaggtgcaaaaatcagctgccgccctgtgtgttcatgtgctttcttcacattggctttgcacaccactttttgttggtttctggctgttacatgtagctctggttctgtgtgtatgtgtgaattgtataatatattcatttaagtaaatgtgtctgtgtttttgcaagatgatatttaaggtactttttttctattgatctcattaaatagaaagagaatggattgagtttactacactgtagttggattctccattgctaactttatctcatacctttgcatggactggaaagctttatttttgtcttttaatggattgcatgtaagaaaaatatgttggctcaaatagaatattttgacaacaagcaaaacacttgagttcctgggtgaaaatacattgagttttaggctaataggattgcaggttaaatttgtactttttctttttataacaagctcagagctaattttagaatgtgattaacttaacaaccaaaactgatagatagaattgcttaagcacaagagaaaaatattttcgaacaaaaaaagtttgcaacttttattacaactaaaatgaactacttttttcttcacacatacaaaaaaagttttcccttcagtgaaacccatcaagactcttgttaatccaaaatggaaaattcacttttttttctaacacattaataagagtttgagtgaaggatggacagtatgcttttgtttcaaaataatttaagttaatcattataccatataaagagaaaatgcaagaaaagatggtatcatgccagataaaacgtattatcttaagaaaagataaaaaggcagaccttaatttgccacttcatagagacaaattacatcttcttttcttccgttgtgaaggttcagtggcttcaaatttataaaggtcgcactttagaaactatgttaactaaagtgtaaatgcactgatgcaagaaagagaaaatcctaccccacatatcagacagatgcctctaaaataatccttcgtgtacaatacaatgtttattttactcgaaaacatttcaaatttttccactccactggtttttagtcatataaatacaatgttcataatctttacccagatactatccacgttcttatgccacagctgctcagaagttaaattgctttgttttgtttctttaaccccttccccttcttctgccttttgttttttggtttcttgttttgttttgttttatatcccttggcttcttcatgcactttggttcagtgatcatcttaggtttggtgaggtgaagagggaagacggtttagtgtaaaggagaaaatctaccacatcttcagtttgccacttccaagacaaggcctcttgtgttctttgggatgaagccctctcttaaacattacagagaccttaatactgcatttcactgttaaagaatgaagcaactcttaggtcttgaggataagtgcagtatttataggctcttatctaatgcatttccttttatgggttgtttttgttggtgctcccaacagtcactcctgtaattcttagacataacatttaattttttaaaaatatcatcatccatactttcttgttctgccattcagattctttctttaagtatttattatttgtcaaccttttatccctcacaattacagtagacaatagtattcttttttttaatagtgtttccttctatttgatgtcttcttaacattaaggaagtaccttaaattttggggtgtgactgatggaatcggtgtgattctagatttctttaggtcataggaactgtaagactactcaggaaagtctatagcctttatttttaatccaagtgtctgccctgaatttattccttttctatcctagtgaactcaactggaagaactagacaaaaacatgaatgtcggcttgaagaagccttgtcaaacatagagaacattctgcctgttccttgcactccctcttttgagtcctaccctggcccctcttatctctccaaaatcaaaaacaccccttgggcagaacaacttcaatactcataacaaaaggagacagacagagctcactcaagaaagaatgggcattggaatgtaagggtcaattactccaagagtttaaacctaaacattttcaaaatgccttagccacatagtctcaacaagccagtattcaacactgcattggaagcccctgtgaaggttccttgtgaaggttcaatggcttcaaatttataaagcttgcactttagaaactctgttaactgaagtgtaaatgcactgatgcaagaaagagcaagtactaccccacatatcagacagatgcctctacttttaaataatcctttgagtatgatacgatgtttattttacttgaaaatatttcaagtttttccactccactggttcatataatgagacaaaaaaataaacaagtcccatgaacactggaaaggacaaggtcctagtctcatttgcagatgttgattgtctactctgatataaacaattccacggaaaaactgtttgaagtaattagagagttcagcaaggtaaccagagaaacaatgagcaaagcaaaaacctggagacacacatacactgccattaaccaggtagaatagatagtaggaaaacataaatcccatttatattagcaaaagacatgctggttcctaccaccttccagctggttaatcctttcactctttctatgaaagtttttattcatatactaatgtgtatcttcagggggctgcaaggagaggagagactatatatatagtccatttactgctttggtcaccctgtagggtgacctcctccctatccatgcaatcaacactgactagattttcagtagtagctttagacctgactcctcattggcttctcagtatttccttgttcgttgctccccaaagtgtgatccatggaccagcagcatcggcaccccttgggagcttattagaaatgctcagtcttgggtcccacccagacctgctgagtcagagtctgaatttaacaagatctccaggtgatttatctgcacattcaagtttgtaaagcaccatcctagtggattactggattcctccttggaatgtttagtgtgagtgggaagaatatgagagcgacatataccttctgttattctccattaagaatttagccataggaatccaccactcagagctaaaattttgccacatctatgtctcttagtctcatccaatggactgagggaaatcttctttgcctataatatgaaaatagcaaactagagtccaggagggatagcagaggcacttaatgtgagctgccacgtggtgagacactactactggctcaattgcttgtatgtggcaagactagataaaacctcttggctttggttagttttacctccctttccctattcctaatgagaagcaaaattgatttttagttttaccttcattctttgtttgacttcttacaaagatgataactagggtcctgcagaattgggagatgggtggagggcaggagagagggataaaaacaaggaagagagggaaaaggccttaggtggccacaggaatcaaggagtagctttactttcttgttgctggtaatcttcccccttcctcacacatatcataggatcacatcagggctcaacctgacttttttctttttgcagatgaaagaatattttaaaaggacccatgatctctttccttttacaagatctttatgctttaaatgcacaggcaaagagagagaaggagggtatttagtcttatgagtaagcttatccttgccaattattccttctatatttttaaaatattatttatgtcaacattcatctctcccagtgctacttggattgaagccagacgatgcctcttctcagcaccagtaaggacgtaatactggagttctcttcatctcctccttacttacttggacacagttctgtgacctatttttggaagtcatttagaatctcattttacaaagcactggataccatggggtgaataacctgagtaacttgtttccccaaatcctggctgaaaactgatggttcctcagagatgtgaaacattcacctcactgtgcttgtgtctctgtggaactctactgcagccttattactgtgagatcagctggaagtgatccttctcctcttgtttttccatatgaaaatgatagttttctgactctaatgcaaatcttatatttgtttccttgcctttggattacccagattgatttgtgttacctttttgaagcatgaagattttagggagagctgaagattgttatctagtgggagcagaagcaaaaacaaatgcaatttcgcattgtctgcacttcatgcttatttgctgcgaatgtaattttcagaataggggattatgatacatccattttagggcttggttttcctggctttgttttgccataggcaggatggtctaatgaatgtcataccctctgactaaattttaatagtgtttaattgggaggacatctgaaacactgaacatgcttctatccttgtgagacttgggtacttttctttttactgatgtgcaaatatgttaaaatgcatacctttatatgttaggtaaagtgattcttatacttgagcacatcagaattactcagaagtcttatgaaaaacacagattaataggttccaccccagagatcagcagattcagtagatctagggagggacctgagaagctgcatttctagcaagttgacaggtgttggtgaggctgatgctgccatccacagatcacacttcaggtagtaccttgtcagaataaacacatgtatgtatattttaaaatgcacaaaaatgtctgagttctgtctcctttcctaattttatctcttctctctcctgtagctgaatcccttttttctctcattttttaattcatatggatttgccccatcatctccatgagttcaaaatatttaccaacaaacatatttttaaatttaaaaaacttaattttaataaggaagataaataaagtggccacctatgaacataacagtgctggggtctaaaaaggacctttttcatcctttatccatcttctaccatgatattatttatggagatgtgagaagggatgtgcctagaaagatgggtttgttgttgttgtcagtttgtttgtttttaaaacaatgcattctcaccagaaagacggagctccttgtttccttgagtagtgggctccattgcacgatggcatcaatttcctaaacaaggtgtagcatgccttcacttgcctggcattccatggtccacctcacaatcctcttccctgcatatcccataacttttgttcttggtggcctcgaggcctgctgttaacataacagtttctgttgtagcatatgcatgaatgttagctgttgtgagccataatttcttagattacaacagaagcatgcttcattgggataaattgatgaaatttgatattgattccttatgagttaatgctcttaactcggtgggggaggaggggacccagaaaaggctgggccccatatgcatgaggaaatgacatccaagtgctctgttggccaaaagcattcattctgtgtatagctcacttttccaatgcccattccaaagcaaatagggaagggaaatccatatgaacttttaacagttgctttttaaatacctttccaacaatgtttttcagtccgtgcatatatttgggtaaagagttgtcaccaaggtcctatttattgaccaggttttgctcacacctgcttatctgtcattattccaaacttccattgaggtttgctttatttattcacttattcattatttttgtaagggctgaccagggacacagtgctgtcctctaatcctcagtgaacagaaaggaagtttagtggacccactgccaacacacatacacacacaaacacacactattggagctgagtaagttagtaaactgggtttttcatcattgccatgaagttaggatgataccattgcagggacagcattgctcctggtgcctcatgtcatagcaggagctccttaggtgtcaatttgaaaacaataatgtcaccaacctcttaagtcccgtaatcattcatggactctctgcccagagaattctatattgtttatagcttgtaaatatgcttgtactgattaattttcatcattacaattggttcgttttgaaaaaaatagttactcaagaaaatgaaatttgttgagtgcccaagaaatcatggattgatgtagaaaggtgttatgaaaaagagatgatgtttgcctgtgtaacattaggctttttgttgttattgcttttggggtttttgaggggtgcacttaaattagtatattacctatttgaactattttggggggttggtgtttgctttttaaaaatattttgacctcacgttttatagatattcatgccaaatgtcttccctgttgtgtgggaactggaagacagtacaattgacatgcacactttattatgtatccttcaacttttgaaggggaaaaaatgtattctctctctctctctagttcagggagagtaacccaaaagtattcccaaatgtggactttttgaagtatactttaaggagaaaggcaggaaggcagtgaggtcctatctttgtaattataaacatgacagtctagatatattttgttttataaattataaacttagtaatgtctaatgcctcaaggccaagaaatatcaacctaaatggagttattttcttatcatagcatcaacgagatcctcgattgaatgaaattttatttccattttatgatgccaaaagggcaatgcagatcattgagatgtatgaacctgatgaagatttgaagaaaaaaggtaataaacatgaaaaaaggacttaaaaaaaaaaacaagaaaagatgcaacttttaaagccttggtttatttaaaggtatctgtaaatgctttgcaactccctgagccatggattgatgactatttttttttcctgctcttaagttcgtataaattttacctttcatcagaattagtcaatcctgactgaagtatactgttacatttattgtattattaaatacattatagtgatgtttccccatgtactttcttgtattagattttagtattgcatattgcttgaaatattaaaacaaccaatacagtctctacttgcaatccttgaaaataatttttgtcatataaaaacttataccttttctttttctcccttttgttttgccaagccaaataaatttaatacgtgatttgatgtgcagtaaccctcatttgacctctggtatgaaagataaatacaattgatatgaaattaaatagtcaggaatcgccttagctaattgctggacctttgtccctttcaaagaagctttggaaacaaagggttgttcgcacaaatatttgtcaaaggaaaggcatggggagaaattttaaaatcagtcccacagcagtgagaaatgcctgcggaacatgggagggagagctgggggtacctgagctagagcctttggcgttatgtctcagtggagaatgtaaagagatgaaagttcaagttccataggtcccgtatgtccgtgaatctcaaggtctcagtttcctcctttttaaaatctatttttttctttgtatctaatgccagtgagtgtggttgaatggtctgtatgttatctggaccctctttttaggtatacctggccctctacactccatgatttcacccctgatatttttccaagcccaatagttttccctttagttgtagttgtacagtttacactttctgctatggctgaagatacctattttaagcaagaatgcttcattccttccctctctgtcaatattctgaatatcataatttatttcacattgcttatgattacagcaaagggaggtacagcttggtagaaaatctaacacttcgcattggcaggaggtgatatgattcttgtcacttccctgtgaccttgagctaggaactggcctcctgggcctcagtttccctgcttgtaaggtggtggggctcatgcagtaatttggctagtatttcccttccctaccttcattctttgaagtttgtagagggctgaccgggtgccaagcactgtgccagatgctaggaattcaaaacaataagaaatgtccccagccttgaaggcagttgcgatctgttcaaggagaaagacaagtgattcaacaattccttggcagtgtgataaatgtcatgattgaggtgtgtccttgtttatttccaaattccttctaagttttaaaggtctatgaagtgaccattgacacatctaaaaagggtagcttgaccatttcacaagtgatggaaattttaacgtctgtcattttcaagcgtgggtgagaatggagtacaaagccattcttataaacttctggtaagaccctacattggtacaaccatcttggggaatattttggcaatagtttataaagtgaaaaatatgcctcttatacagcccagcattttcacttctaggtatgtaccctagagaatctctcatctatttcccaaactctggataccagagcggcacagttctcagatctctgctccacctatattcactctgtacctgagctcatccaagccaatggctttacatttcttctattaaactctccagtcctaacctccagcttacactacagacttgtagtagaactctccatctggatgttgaatgggcatttccaatgtatatatacaacatatttcgatccttcctacccctagatatgttcctttcaaagcctataaaatagtaccgttatttacccagtcaaaaccactgggctcatgttggacttgtttcattctttcacatcatgtctggttcatttgcaaaacctgtaagatccagcctcaaaagaaatcctaaataaatcacttctcaccatctccaacattactgactatccaaaccttcatcatccctctccaggcaatgccttctccttcctactcagtgccctacaatttatggtccacacagcagccagagtaaaccttttaaaaccaaatctaatcatgttattccaccctttgaaaccctccaaaggcttcccaacacatttagaataaaatctaaaatacttagtgaggactaaagcccaagtgatgtagcctttggctccatctccaatctcacttcaagctacctttttccttggtcacttgctctgtcttgctgtcattgaatgatgttggcacgcatacatctgcatcaaggtctttgcacttgatgatccttctgcctggactggtgtttcctgggtgtgcacgtggcttgctcctcacacatgtacgtgacctcagaagggctttcactggcccatatttaacacagcatcctgccatgcttcatcaccttcctccctgctttctctgtccttctagtacctctttgacattatatttatttgtttacttatttgtttctgtcactcataatatgagagtttcatgaaggcagggcttacctgtttcttctatcactgcatctatcctggtgcctctaaaagtacttgctctttagaatgaatgaaggtgcccaaggaaagaggtatacaaatttctactttcatttataattagaaatgacctaactatccatcaaccaaataatggataataaattatgatatattcatatatggacttctgtaccttcagtgaaaaataaatgaacaagatctacctacatagctggtatataaagataaaaatagcaagttgcaaatgcacacagtgggatagtttttacataaaattaaaaacagcccaaactacccgttgtttggataaatgcatatgtagtaaggttgcagaaccattttggaggtaaacaccaaaactaggatactagttatctatctggtatggaatggaattgaggtggggtatacaggatgctgcagtggcatcagaaattatgtattcttttacatgtaagtcaaataatcaaaaatgtaaatcaaataaggcaaaatgttgagatctgaccacactggtgtaggcccgtggctattcattatgctatcatctgaacacttctgtattagcttgaaatcagttcataacttgcaagttcttaaataaaacaaaaacttgaagctgtcgatgcatcaaccatttataagttgcataaatactgattgttgctcctgtagttaccacgtgggctctaccccatgtcagaaaggtgtgatcgaaatgaagggtggcttttggggccacgtttcaatgaccactgtatactcttctcaccagtcccataacctgacttttagataaaattgaaaactgaattgtttaaactcagaagcaccatcatctccaagaaaaatcccttttccaattcagtgagaacaatgtcttataattaatacattttccatttttaaagagcacctctcgtatctattctcatttcccattatgaagatcttggaagtcagataggtccagtctttttccccaattgacagaagaagaagctgagatctaggagccaaaggagtgagtagcaagagcagaacttgatacaggccccctggacccctggtcaccataactcccagtgctgtgtttctgaacttgggggaccatgtacatctgccatcatggatgtaaaagcagaataccacctgtttgtggaattcattatgttacttataatgtgcaactctcttatttcattcaagttctgacagatgaaagttcttgggaaagagactgtgaagacgtttttactcttataatttaagctgcctcagcttccatgaataaaacatgagatatgcatcttcagagctacaagtgctactaagatgttctttttcccctaggccttatatcaagtgatgggttttgcagatatctgatgtcagatgaaaacgccccagtcttcctagatcgtttagaactttaccaagaaatggaccatcctctggctcactacttcatcagttcttcccataacacttatctcactggcagacagttcggcgggaagtcttcggtagaaatgtacagacaggttctcctggctggttgcaggtgaggaactcaagatggcaatttgttttttgtgtgtgatgcccttcagtttaatttacttttctctgaaaaacaggaaatagtaatcaggatgaaaaggaaatttgtttattccctttaatggattatcatggtcatttaacgttgagaaaagaaggacagtatctctttcggaaaaatcttcagtcatccaaaagactttactgtgaaaagacttttctttactgtaaatttaaaatatgcctccaaaaccacaaaaaagaaaacatgcatattgtaagaaggcgtgttgagttttttgttgattataggtacttgttactagcaccatgctctaaccaattgagctaactggccattgattataggcacttgtaaattagctttttttttttttttttagtatttattgatcattcttgggtgtttctcagtttctcagagagggggatgtggcagggtcataggataatagtggagagaaggtcagcagataaacacgtgaacaaaggtctctggttttcctaggcagaggtccctgccgccttcggcagtgtttgtgtccctgggtacttgagattagggagtggtgatgactcttaactagcatgctgccttctagcatctgtttaacaaagcacatcttgtaccgcccttaatccatttaaccctgagttgacacagcacatgtttcagagagcacggggttgggggtaagattatagattaacagcatcccaaggcagaagaatttttcttagtacagaacaaaatggtgtctcctatgtcaacttcttactacacagacacagtaacaatctgatctctctttcttttccccacatttcccccttttcttttcgacaaaaccgccatcgtcatcatggcccgttctcgatggtcactgtctctttggagctgttgggtacacttcccagatggggcggcctggcagaggtgctcctcacctcccagatgatgggcggccaggcagaggtgctccccacctcccagacggggcggccgggcagaggcgctcctcacctcccagatggggtggcggctgggcagaggcgctcctcacttcccagtcgtggcggctgggcaaaggcgcttctcacatcccagacggggtggcggccgggcaaaggctctcctcacttctcagacggggcggctggcagaggcgctcctcacatcccagatggggtggcggccgggcagaggcgctcctcacctcccagatggggtggtggccgggcagaggcgctcctcacctcccagacggggcagccgggcagaggcgctcctcgcttcccagacggggcggccgggcagaggtgctcctcgcttcccagacggggcagccgggcagaggggctccccacatcccagacgatgggcagccaggcagagatgctccccacttcctagacggggtggcggccgggcagaggctgtaatcttagcactttgggaggccaaggcaggcggctggaaggtggaggttgtggcgagccgagatcacgccactacactccagcctgggcaacactgagcattgagtgagcgagactccgtctgcaatcccagcaccccgggaggccgaggctggcagaccactcgaggtcaggagccggagaccagccccgtcaacagggcgataccccatctcctccaaaaatagaaaaaccagtcaggcgtggtggcgcacacccgcaatcccaggcacttggcaggccgaggcaggagaaccacggaagtccggggcagagaggctgcagcgagccgagaccacggcagtatagtccagcctcggcaacggagggagaccgaagaaaggagggagggggagggggagagggagagggagagggtaaattagctttatttgatgtaaaagttcaaaaatttagttctctgagagtagaaattattaaaatcgtttttgttttatagaaactggcaaatatttgagatttaaaatatggcaaaaatgatgaaagtgaaaaataagaaatgtagttacattatgtttttttcttggttataaattaaacaatactttatttttttaattcatttttttttggatatggaaatatgttaaaagaaattaactgtcttactacttccatttgcaaacttcctctgaatacctgagtatgaatcactaaacattttctgaaatggccaaagtaacattatccagcctatcaaaattaaaagtaatttttttaatttattttattttattattattatactttaagttttagggtacatatgcacaacgtgcaggtttgttatatatgtatacatgcgccatgttggtgtcctgcacccattaactcgtcatttagcattagatatatctcctaatgctatccctcccccctccccccaccccacaacagtcccatgtcatctaaaacccagcccacattcatatttccccagttgtccccaaccaaattgtccttttttttttttttaattgggacagagtcttactttgttgcccaggctggagtgcagtggcatgatgtcagctcactggaacctcccctcctgggttcaagcaattctcatgccttagcctcccaggtagctgggattacagcctcccaagtagccatcacacctggctaatttttgtatttttagtagagatggggtttcaccatgttggccaggctggtctccaactcctgacctcaagtgatccgccttcctaggacacaccacgcccggcccccaaattgtcctttattgcgttttgtcacaagtaggatttcatccagaaccatgatgcttgttatatttcttaagtctcttaatctcactcagacaatccccttttgataataccaaccagatgaggaatataatgtggttttaacctgtatatgccatgaaataatcaggttacttaatttattcaattttctgttctggaagaaaacaacttattttgatgtctttcttttaatttgtatgaacactatttcattgtaaagtttcaatattgtaacttcactatatccctagatgtgttgaacttgactgctgggatggaaaaggtgaagaccaagaaccaataataactcatggaaaagcaatgtgtacagatatcctttttaaggtaactttaaaaataattacacagacttttccaaactctgtgaaaatgcaggaaatagggagatggagaagagaaaacaaatgattcattttctcaagcattatgccttcatattcccttcttccagtcttgaggaaaaagtcaagacaaagatcttttccactgaacgtccccttcatgatactgttcttgctttcaaatggtgactgtgttacataacaaggtttctctggcagagtttacctagttttacttaccttagaaacagtgtctccttttgttatctacttatttgcttatttactttacattattcctaaaggacttcaaggtggcataaaaagataaatagaatacaggaataaaatagattgtaaatagggcctacaagaataagaaaggccgggcgtggtggctcacgcctgtaatcccagcactttgggaagccgaggcagggagatcacctgagatcaggagttggagaccagcctgaccaacatggggaaaccctgtctctaccaaaaatgcaaaattagctgggcatggtggcacatgcctgtaatctcagctactcaggaggctgaggcaggagaatggcttgaacccgagaggtggaggttgcagtgagccgagattacactgttgcattctagcctggacaacaagagtgaaactccatctcaataaataaataagtaaataataagataatgaggttagacaaatcaaaagaatgaaattctgtggtttgcaaatgtcagctgcagctgtctgtcggtttggtataactcaggatagatattacaacaccaggagcagcggttctcaactccacctacatgtgaaacatcaccatgggtattttcaaaaacataggtgctgctgggcgtggtggctcatgcctataatcccaacactttgggaggtggaggcaggtggatcacttgacgtcaggagttcaagatcagcctggccaacatggtgaaaccctgtctgtactaaaaatacaaaaattagctggtgtggtggcatgcacctgtaatcccagctgaggcagagtcaggagaattgcttgaacacaggaggcagaggttgcagtgaaaccagatcatgccattgctctccagcctcagcaacagagcgagactctgtctcaaaaaaaacacacatacacacacacgcagatgtctagatgctatgcatagtatttctcttagccaagatattggagagttttgaccagcaatgaattcaagataatacttcttgatatgtaccaagagtatattcaagtgggaagccatgaatttgcatagccaggaagaataactaaatgactacctcagccacaaggaatgcctcaataaaatatttcaagattatctaaccttgggctttatcatgtcaaatggatttgcctagataactattgtgaaatatttttctgattaactgaatgatgagatttgccctgtgattagctacaaaccagtaagaatttggggatttttaccaaatatgatgctccggttgtagaagtgctggtttgaagcctttctttctaaagctaagcagagacggggccaaccatctcttaaagcctctcctatttcatggagaatagtgaaagggaagattatgtttagctccttcaaatgttgttttctgtaattaagttctgtgttacagatggggggtcaagaacacttctatgtttcacttacatgttgcttgaccaacgagaaccccttcccccggccttgtaaccaggctaataggaaacaagggatactgcaaatgtcactttagtacacagaggtctacatcaagttaatgaagtatagcccaagactgatttccaaacacagaggaaagtcagtgaaagcctccagcagtcctgaggttactacccacacttttctgcatgaggtggggaggagtcatacagtggtcgggagtgaaaacctctgtgccagagatcacctgctcctcaagaagaaaggtggactctgaactcctggcctggcagattaacaagccacagactggcatgccatttaggtgaaatctcttgtaagttaatagcaccataattctggagaagtaaaagatagcttaaaaaattgtcattaaccattaactgcaccctggctataaccacagggaactcaacctttagaggtgtcaaggtagatgggggctccaggtctgaattgctggaattgactttctgaaagactcaattaatagtctctgaatagttttgggtgccttaatttttttgctcttttctctcattaacgtttttttttgtttttaaaggatgtaattcaagccatcaaggaaactgcatttgtcacatcagaatatcctgtaattctctcctttgaaaatcactgcaggtataatgatccattctgccacaagtctctatgtggtattgtttcctaacccctaatgcccactcctgctctacaactttttaaatagctgaatagtttgttttgtgaagtactaagttcaaataattctccagcaagggcacctactcttatgcaaagcaaaaaacaacaaaaaaaggaaaaaacgacaaaaaaccacccttgtccccccaaaccaaatcattttaatgtgtttcagaaatacttgttccaaataaaagttcagagattgggacaccttacttaaagttccattgagctggaagatttgacagtatatttgaaatcagatttgatgaacttgaaagacattttttattcttctttccagctcttagttttggaacagaatctccttctccttcttttaaaattataccagttaaagtttttgatacatctcacattagcattaagaggacaataatgcattttgccaagtgagaatctttaattgcctagtaatgggtgtttcttattcttggacggttaatgggtgtttgaatttacaaatgccacttttttctctccagcaaatatcaacagtacaagatgtccaaatattgcgaagatctatttggggatctcctgttgaaacaagcacttgaatcacatccagtatgtatttttaacaaaccatatttctagcatgaatggatttgttttgaaaatttctgaagggtcaagtagtactagaggactaatgctaaagatcttcatatttatttaaattctttggtacggaaagcttacatcatgcttcagagggatgtaaagagacacaaaataaacatctggttcaatttcatttggaggatctttgggtcttatggttttcagatctcagtcttaaagtttcataaagcacccaggccaagagtccagattcaggtcagttgttctcaaattcagttacatgttagaatcacctacaaaactgttaaaaacacctgtgccagggccccacttggagactgatttaattgatgcagggtcagccctgagcatggtgttttaaaagccctccaggtgaactgtatatgcacccggtattcagaacccatgggaggctcatgctgtggaaagtgccctggattgatgtcacgacatcctgaagttcatgttcctaactccaaaataaatcactgagtaatgttgcacatacatttttgaacttcattttaaacctgctaatttcttcataaagcaaagaacattaacctgtgctccatagataggctttatgagatctgtgaattcattctaattgcatgcaatttttttgtatatactcattctagagagttaatcacatttttataaggatccatgacctccaagagattaagatccacaatcacaagatgttatgagctccaaggcagctaatgaaatcaaagtggaaagacctgctattgacagcagcacctgatgggctcaaacctggtagcatgaggtagtggcagaagaacatcacagcaaatgacagcaggaaggtgctttgtgctacatgtaaacactttatgaggttcttttcagaagtgtgtctatgggaactgaaaaaaaatatgagagacaaggatatctgtatcctttgtcccccttccttcttccctcgaacttgcagaagcagttgctgcaggtgacctgcccatatccttgcagtgcctcctgtttccctgaacactggcctgactttccactgccaacatccacagctttttgcctgagagtgagctctggtcactggagcctgctctgccacacatgaaagaccagcagtgccagggaattatcacccctatcccatgcttcatccctcccgaggtgggataaccctgagcacctgctcttctctgccttccagggtttcccagcaggatcgtgctccagctggctgcagtgataacacacccttgatgagctgcctgtcttctttttctcactttcccacacctctgttggagtttccttccaagtagacgacctggtgcaatactacttttctctgaggctgattttaagggaacccaaactaagaaacagctctgatttattttatttgtttttacctaggccctccatttatctttctgattaggttaaggtgattgcttttgtggaaagttcactgtattcttagtgaagtgatgtgcacatacttttaccagctgaagggtgtccaggttcttggcatcttgaacaaagaatcggacaaaatgcacaaacaaagcaagggaagaatgaagcaacaaaagcagagatttattgaaaatgaaagtacactccacagggtgggagcagcctgagcagaggggctcaagagccctgttacagaattttctggggtttaaataccctctagaggtttccattggttacttggtgtccggtctatgtaaatgaataggatgaagtaaagttataaagtcatttacttggtgtacatcctttgtaaatggagaggatatttcctgtcatagctgaagtgtttccatttgatttagttctaggaagtcagcatgaataggccttatattccctgcctcaagaccctattctcctttgaatacaggacaggtgtctggggaagcatgggtaatataaatgggaataagacctgctccaaaagctaaagagctttcaaccttgggagtgggagcaggacacaaatgtgaacacataactagaaaagaagatggcgtatggtgctttatttgttggaggtgtcctggtacaagagagatcactggggaatgggccagttataccacgctgctggaaggaaacagcatttcaacaaagggttttatttgaggcaagacagacatatgagtgcacagtgccttacatataataagtagtataaaagcaagttttgaaaatgaatggatgggtggaggggtgggtgggtgggcatatagagagatgggtggaggaatggggaatggaagactagatacaggacggttctgtagaccagaggtgatagcatacaggggcacctcctttgcagatataaatctaagcaaatgatgctgtagtcaagttcagattccaggaattggaacaactcccttcttgattcccttatcaaacctacaaaaccacaaaaccacaatctcaagtgttgagggttgggtcagcctactcagcagacaggcttactatacagcctgacacttggggggatctggggggcctctcacttgggaaagctaattctgaacccagccatcacaattgtcccttgcactttaccagatacttaaaaggtgcaaggccctctggggagcaggaacccctccccggcacatcccaggccagacccctgctccactggggaggttggagcagctctgcacacctctggaaactatgtggatttcaagtttgcagcactagtctaaggaaaagctcaatgggtgtgctaatttgggttggggagtgaaaacagaaggctgtgccgcctgccatctagtgggtgttgggttgcatcactcccaggcctcccaggctcctcctggactgggaaggagaatggagaagcacagcccttccttaattcagctctttctgtttctctctagcttgaaccaggcagggctttgccatcccccaatgacctcaaaagaaaaatactcataaaaaacaagcggctgaaacctgaagttgaaaaaagtaagtgaaacacacacatttataatggaagcatacataacatgtgtggacatttcagctgttgagaattcaatttattttaaaaccactgatttttgggggaagggtgtaggggtgatgttacaggtacttttcagagcaagattgccacatttccatttaaatttaatttccatatcaattaattcatgcagcaggaaaagcatatctatatattcaaatgccagaatttggagagggcccaaggaaaattgagaggaaagtagaagcattttagaatttctcaatatataaggaaccagcattttataattttatacactctaaagtcctcataagtttcccttttcagtttgccccgtgctctatacctatctagggatactaggtacatatgagtgtgtgactgtgtatatgtgaatagagagatctagagacaaatgattttatataaacatgtttccttttattctcccaggatgatttccttgaaaatattttctttcagagtatatcctagttcagtgaattaatggtatcaaatattggcatgattacacttcattttccccccaagtattctaaatgaaaaattttaaattatgttaatgacagtttattttattacaaaagcaataatgccatagaaaaatcaagacaatgaaaagtgtaagaaagtaacagcactaacatatattatacacgtattcatatactatagacacatgtacgtaatgtacatgtgtagatatatacccacatttttaacatgactgagatcatattaatgatactgagtttaaatttttaaaatttaaccaagtaagtatacttacatcagcaggatatacatctacatactaactttaatcctaatgtatgaaacactatatagaatttaatatatatgacatagaattgtatgcatttattatagcatgatgtaacgagtcccaagttgatggattttcactactataaacatgcttgaatgttattttgtatgtttgtgcaaccctctccttgaaatcaattggtgcaattagagttattcagccaaaacgtatatatattttatattgtgatatagtttgttatgctttcttttaggaaagttctaccaccttagactcttcaccagtcatatatgagagtgcctgtttcccaccaatatccttaatgctggctgttggccatttttaaatgtgtgtccaactcatagaaaaaaattggtaccttaggggtttttttatttgtgtgtcttcaataactccttttttgcatattactatttgtggtttgtccctatgtgttttcccatttttattattttgtttacctttatctttctgacttatagaaaaattatttagtcttattttgtatagtaggatataatccccattaaatcagttgcaaatattttttcctgaagttttgttgccaacctgcctattttctatcagttccccataactgttcataaaccttggtctgtgccagattctccaaattatgggcttttgttatctagccttaaatccttcacgaggactgaacctcctctcaaacttggtgaccagaattttgggcatttcacccatgtccccgcaattcttcatcatgtgtatataaggtggttgttgcaggtttcttacaaggtcgagaccaccaggaaatggcgagagagagaacactgctgaaccttagaaacatggtgccttggtgcctgaacattctatttcttctctcttttcacgtcctcctcagtgtcgatctcaaggcctagggtttgtatgttacctagcatctgtcaccatctctttgcgtgtttttgctaacagaacagctggaagctttgagaagcatgatggaagctggagaatctgcctccccagcaaacatcttagaggacgataatgaagaggagatcgaaagtggtgagctgtttgcttttattttaagttacatgctttgaaaatactttttaaataagaaaaccaggctgggcacagtggctcaagcccataatcccagcacttggggaggccaaggtgggaggattgcttgagcccaggagttcaagaccagcctgggcaacattttcgtagagatgagaccccatgtctacaaaaaataaaatattagccagacgtggtggcctgtgtctgtagtcccagctactggggaggctgaggcagtaggatcccttgagcccagaggttcaaggctgcagtgagctatatgtaatcctaccactgcactccaggctggacaacagactgaggccttgtttcaaaaataaatgagtaagaaaaccaggaatttctttcagaagacccttttatataataatgccgttttaattcctcatagtaatattttggtattcttggtattttgccaaacacttcccattttttctggctactaaattttaatggccttgtcatctcccttcctattggccattcagctattcagcagaaattcttagccagagaatccctgaagcacttgctgtagtaggcagaggaagcaatataaggcacattttgtaatccctttgtatagacaaaaacatgaacttgagtctgttaatgatgagagtagagaggcaaataatttaagagaccctcaggcaaatgattggtttgtctccacaaagtgaactagaaactaaaagccagtattaaaatttcaagttcaaattccttcaaataaccagctcaccagaattatctctgtgtagctagataattttaagaaggcagtcttgcttaaaatatttgagtatgtgctattaccttctcttttactttgatcacatagcaacaatcataatgttcagttgtaaatgggtcatttgagagtttggggatgattttagagaattatttgtttgttatgtttcatgagaattgatgaacgaaatgacaaggacttgtgttggttatacaatgccttggatttatatacaggcataccttggaaatattgcagattcagttctagaccactacaatgaagtaaatattgcaaaaaaattattcacaagaatttttgtttaccaatgcatacagaaattatttacactgtactgtaggctagtaagtgttcaataacagcattatgtccaaaaatgtaacttaattaaaaaatacctattgcttaaaaatgctgacaattatctaaacctgcatcatattgaaatctttttgtggagggtcttgccttgagtgatcagggaggcagttgccaaagattgggttggctgtggtaattttttaaaataagacaacaatgaagtttgctgcatcaattgacccttcttttcacaaaagatttctctgtagcatgcagtgccatttgatgacactttacccagagcagagcttctttcaaaattgaagccaatcctctcaaaccctgctgtgatgccttctcaactaggtttatgtaatattttaaatcctgtgttgtcatttcaacaatgctcacagtatctttacctggagtagattccatctcaagaaaccaccttctttgctcattcacaagaaacaactcctcatcggtttaagttttatcatgaaattgcagcaattcagccccatgttcaggctccttttcaaattctagttctcttactctttctaccacctctgcagtgacttcctccactgaagtcttgaacctctcagcgtcatccatgggagtctcccaaactcctatgaacgttgatatttttacctcttcccataaatcatgaatgttctttcttaatagcatctagaatggtgaacatcagaagcttttcagtttactttgcccagatccatcagaggacattctcttttaggaaagctagacatagagctaaaaatccaaaagttggaagaattaactaaccttattcaagactccttaataaagactcctgactgtggaacagactttataagtgactcagttgcatgtccagtccttgggtttgacattactcccagagaaaagtcataatgactgtactttcatttgttttatgtggcagggagggtctaagaggctaaagatatctgatactactcagttgatactcgttattatggtcatctgttactatgcaataaaccatccccaaatttaggggcttataacaacaccttatcattttctgtcataattctgtgggtcatgtgggcttaggttggtggttctcccttgggtttctcctgcttttgtcagcagatgacatctggggctgactggttcccttgggtgggttatcccggacggcttactcacatgctggcagtggatgctggctgaacgctgggagctcagctgggcctcactgaccatagtatccctgtggcctctctctgtgacttgggcttctcatagcacgatggctaagtcccccagatggaacatctaagagccagtgtctcaagaggcaggaagcagaagctgctaaattagttaagagctaggcctggaactggtgcagtatcacttcctctatgttttattcatcgaagcagtctcagggcccatccaagttcaagagggtgagtgagtgacaaggtcacgttgcataagagcacagaggagggcagatgatacggcagctgtctttggaaaatatagtcagccgtgatgcctactatattttttcacatgtttttgcaaataataaatctaaacaagatttaagaaaaatatatttatagaactgtgtttcaaatggtcaagaaaatactcctaagatacaaaaaagatgactattcagtaaaaccagttcctttaagttaaatttcatagatggtaattaaaatatgtaaggcattactgatacgataatccagtaaaacaaactgcagaaataatggaataaattaacaagaaaacaatgttaataataattactaccatcgttgtaccaacagtggaccaggcagcttacattatggccttatctaacctgtatacagcctgatgaaatgggtattattattattattattattatttttgagatggagtcttgctctgtcacccaggctggagtgcagtggcgcgatctcggctcactgcaagctctgcctctgaaatgggtattattacaccaatttttcagatgagaggactgaagcttagagaggtaacatattttgcacatgatcccacagcgggcaaccgattgcactaagattcaatcccagagctacctgattcaagtcaagacttttgtacgttacagtactgccctttcaattcacaggaatatggtgaaaacatagatatgcaaaaatacttttttaaaaaggagaaagaatagaatgaatgaaagtcaaagatgtgatgtttcctaaacacacacagtcatctgaaattagcatctgtatggcttcatgtattattcttaaaggtgctttcccaccatctacatccatatggtaattattcctccaggcagaaaaatatttgcctctagtgactcccatgttattccaaaatatacttgagatttgggttaagtcttaacagaaataaccacatgatttagtatccacgtaggaaagtacctaaggacagaatcatccacctagatggcacaaggctcctgtttcacctgttatgtgtgtgattcttaggttgcctcagtaatacttggctttggttctggtcaactagtcggctataattaccttagtgccactgtatgaatctactatctatgtgtggctagagtctctaatttaaatacatcaacacagcaggcaaggggaaaccaagcatagttcaataggggaggcctgcctggaggctgtagaaaatagaaaaggctttcagtcagtgaaagcaggtgcccaggcattaggctggatttagattcagaaggacatgtggctcccaggataggagacaagtagtggagaatatcaaaattgtatgtggttataggtgtgtctgtgcatatctgcacactcagaaagtgatcatgtattcatacaattctcttaaggtggttagtaagtctccaccacttgtttggggtatgccccttgccttcaagtggtttacatctgtattggcagtttagacataaattaaattaaatgaaatgaaattaataaattaaatgaaaatttaatagtgacatgagaagttttgaaatcttggttactgactgtaggtcatggaaacctagtcctggaagaactgtgttaagaattcaagagacaggtagatccattatcttgctgtgtgatttcagacaagtcaaatcatatctctgcatctagttcctcgtttataagtaaagacagatgctggattagattattttaagatgtattccatttcctcaaatccttttcttcctgcctaagccttacaattacccacttgttgttgttgttgttgtttggattttgtttttttaatcgtctgcctctagaatatcccttcatcagaattgttagctccagaagaggaaggtggctgtttctttccctcaccctcttcctgtgcctggagagatacttcacaaaataaaacagtctatctagaaattctgaatccagatactaccagttgaaagataccactattttattatgactaagaaagaaaaagtagtttccattcactggaaaaaaccgtcagttgaagaacacactacaatatcagaaatattaaatcaaaaaaagtacatcttagaatcagtgaaatcatttttcatttactcctgttctttcattctcctttgtacttttaaacatgctttaaaaaaatctatctcattcttatgggtctactcatttcctttctgaatttctcagaaattattttagtgggtttttttgttttgtttttacagtaacgttccctcatgccctgtggtgtgaccatgtggatttatattgtcctcatcctgatgtctgtgggtttctcctgatcctggctagattttaggcaaattctttatctgggaattactgcaaatagtgattgtgtgaatccaaatctcacctcagcatgttgcacattttccagcaggtacttcttttttttccccacgaacatcctgggtggattctggcattcttgtcactttcctggaccaatgaacacagtgtgtgtacttcctttcacagactagaccacgctccagggacaccagctttatttggcacccacttccacttctcctcctacctgagcctgacaaatgagccctgagcctttgaaacctatgctaggtttgacaaatagtttgcaggagtagcacaatccttctgaggcctttcttttttctaccactccaagctataagtcattatgcccataaaattcaagtggacagtttagtctctttcaaaattatccgatgtatttgttttcttgcatcttcttatttgctcttgatgtcatgaaagatcaaaacacctttttatgagttatagatattcctgcagtgtttgaggctttcatttttagaattagtatactagaatagaagtagccatccacttaaaaaaaatttattaagcatcaagcatttcaaaccacattttaggagcaggagaaataatacataacaagatgtgctccttgacgttgaataggtaagagtttagtgagagttttacttgaaaaaatactgcatatatcaatgtccccattttcttttagcatcctttttctctaaaagtgcttatgttctacccaagattgtgaacaaggtctgactacttggcagtggtttggtgtcatggattttccatttgtctttcacacagctgaccaagaggaggaagctcaccccgaattcaaatttggaaatgaactttctgctgatgacttgggtcacaaggaagctgttgcaaatagcgtcaagaaggtcagagtcccctttctttcatcactctcaagaggtagcagctgttatttatgaaattttggaaatgtgagaaccacaagagaataaagtaacctataattccccttctaaattgcttaggatacgagtctgtgctgggtgaccagaacttgacacatacacaatattaaatttaaaaggacatttaaattactcattagtcagggccagtgttaaccactacccatttggccagtgtcctctaaatattatcatttattgtgttattgcagctggggagggagaaaatgacagcatcccaggggtaagatttaatcttgaattcatcaggaaaatgacccctgaacatcccgagtctagccctcatttgagaactagtcctgctaattatataccttccccgtaaagtacagtaagcataaaaatgtttccagatattcagccaaggaaaatagttattcatatacttaccttttatcaggcatagtctaggccataatgacctaaaagtgtaaaacacacttgccttctgcccttaggcagctcatggccccctgtagtttagggaaagggatcggaaacagcaaacaagcaagtattcaaataactatataattacaacttacggtgagtgcaattatgaacataaacacgaatgctgaagaataatgaagtagaaagaataaggaaaccagaacgcaaagggtcaagaggaattggccatgcacagaggttgatgaatcactttccatgcggagggaccacagtaacaacagcaagggctgtgagtagagtggcttgagtgagggtggagtgagacgagatgaggcaggtaggtgggaactgggtgatgtaggattttggaggccattatgagaaattcaaatattcagtgaaatgtgacactactgaaaaagtttagagaagggggcagtgtagcctgattcaagttttaaaagattgctgtggttgccatatggagactagtttaggaggaaacaggagtggaagcaggaaaagcagtgaggacaggctgctgctctaggccagacgagagtccccgatggtcaaaccagacaatgcatcaaagaggactgagtggcttcaagacatattgagaaatgggacagcctactgatggatggaatgtgggaatgagagagaaagaagaagtgagatgaccctctagtgtccttgtttgaggaactgggtaggtgatggtaccatttactggcatggggaagaccgaaagagaaagaattcaggagtttcaaatgggatgactatttgagatgcctgtgaagtattcaaggggaggtgttcatatagcattgccatctgactctttctctgggttcatttcctaactgtctaactttgggtaagttacttaacctctgtgtaccttagtttcctcatctgcaaagtgaagacgataacacctatttcatggggtcactgtgaagagtggatggtttgtgacatgtcaagagcttagcgtggtgcctggtacatggtaactcctgtaaaggtattagttgctggtatattatcatccttttcatctttatcattgtcattatcctcatgatcactggcgtcattatcacgcgtatatagaagacaggttgagctagagatacaagttgggagttcaaaagatcgtatttgaaacaatggaaatactgagatgattcacaaggaaaggtggaaaagaaggcccaagtggagccctagttaaaagtggagccagaaaagaagagcaaggtatggctagagaagtaggagggaaattaggcagtgacaccaagaaaaccaggaaagagaacagtgttaacagaaggactgagtggttgactgtagaatatgttaaaaatcttagacaaattaaatttaacagagtttagttgagcaaaaaaaacaattcccaaattgggcaggacccaaaccagaagaggttcagagaaactccagtgcagccatgtggtggaagattttttggcagaaaaaggaaagtgacctacagaaaacagaagtgaggtacagaagcagctgtattggttacaggcttatttgccttatttgaacagaggttgaatagttggccacctttgattggctgaaactcagtgattggcacatgagtaggttccagtctgtttacacacccattcagtctacagtttactatgtgaaagtttatgaaaaaacctttagaataggtaaagagacacctttaggctaaacttaatttaacaaatgctactgactgattaagtaagaagactcaagagtgtcctttgggttgttagcatggaggtcgttggcaaccttaaagagacatttcagtggagtgccaggcagggtggtgacactggatcacacagatatgaatgactagagactatgcttttgagaagttttgatgtgaaggggagcaagaaatggactggtggccaagggcacctgaggagtcaagggagtgttttctttttcggatgaatgaatctggagtgtgtttgaaaacttggaagtggtgcagtagagaggaagagattagttttgcaggaaagagaggggataactgcctggaattccttgaggaggtggaagagggtgggattgctgtggtgcaaaggtgtggcccttcacaggagcaggaacacctgattagtgaagacagtggatgaagatgcaggtaggcagatacatttggtgataggaagaggggagagtatttgtctgatgagcaaagccaaaggaatattgcctttacacactatcttttctgatatagggaattgtgactactctgagaatattgaacgtctattaagactcaagagtattgttttaatacaaaaattagccaggcgccatggtacgcgcctgtaatcccagctactcaggaagctgaggcaggagaactgcttgaacccaaaaggcggaggttgcagtgagccaagattgtgccactgcactccagcctgggcaacagagcaagactgtgtctcaaaaaaaaaaaaaaaaaaaaagttgctaaagccttcatcaatattgtcttagtgtcttagtcagttggtgctgctatcacaaaaataccattggcttaaacaactgaaaactatttgtcaccattctagagtctaagaagtctaagatcaaggttccacgcaatcagttcctaatgtggggggccttcttcgtgtttatgtcctcatgtggtggacagagaataaggaggcaagctctctcttggcttggccctcatgaccaaattacctcccaaaggccccatcttcaaatgccatcacatgagaattaaggtttcagtatatgaattggggacagtatggggggctgcaccagcaaacagtccataacaaatacccagacatgaatgctgagttactcaagagtgaccattcatgctgcttttcctaagccccatgactaaagcactaattaaataattataataaaacatctaagtaggtaaagactgtccacgaaggagggaaagagcattaagattagcccttctggtgcataaaacagtgaggccatccatggctttttgtcatcagtaatgtcccaccttagcaaataaatagaataacaagtttacctacacttatttaaatatctatgtatgtatggctaataaatttggaattttgccctttagagaagtaaacaaattatttcctttctctaattaggcttcagatgaccttgaacatgaaaacaacaaaaaggtaacaaaataattcccttgcacattttaaatcagatgcatctaatttaaaaaatcttcaaaggaaggaatcagttgtggtgaaaaaatgattaaatcctgataaaaatcacaaaactagggcagatgagtaagatgattttctaaaagtaggtatttaatgcagtaaggcattttcttcactggaattagagatttcattcctgcagtggaactacatgatcatcagcatattgaatttgaaaataaaaatgagtgaataggtcatcaaatccatattatagcataatagaaaggatgatcttagttcccactacattgacattctggaagatcactgattaattttacactgcataacttctaagagtattatttgatgttattagctattggccttattgtaggaaaggtaaagttacattttcactttctttcatcctcttcaaagttcttcaagtgatcacagtggttttatttagtaagtatttatggtttatcctacaacagtgaggctgacagccacaggcagaagtttgcctaataacttcattctcatacttcagaggttcggaaaatactgccttgctgcctgtggggtcctatcctatttgaagttgagatcgtatcttctcaccctctaaatattaaacttgaaagaattatgaataaatatggtcgcaggcctgtcccaaaatatttgtgagtacattactctcttgttctagaatttcataattcataatttgggtcaacagtatacagattgacatttggtcattgtcatttattagctaagttattttaattctcaaggcatcaatcttctcatgtggtcagtgggtaggactctaatcctcactacacatcacagacagtaatgagactgtgtgtgcaagaactcatcctggtgctcagctcatagcactggtggtatttattattattaaacacacatggaaggaacggacatggccgttgtttggtgggggagcaggaggacacattaagaaaatgataaaaacaaaaacaaaaccaaattacattacttgattattgtttcaggcttttattggtgaaatcagtttgataatttagaatgctcagattgttaagtgatcagttaagacaaacaaattgaccatttttttttttttttgagatggagtctcactctgttgcccaggctggagtgcagtggcgtgatctccgctcactgaaagctctgccccccgggttcacttcattcgccattctcctgcctcagcctcccagtagctgggactacaggtgcctgccaccatgcccagttaatttttttgtatttttaatagagatggggtttcacagtgttcaccaggatggtctcgatctcctgacctcatgatccacccgcctcagcctcccaaagtgctgggattacaggcgtgagccactgcgcccagcatctgaccattttttaactcatggattacatcatccaactaaggaatttatccaactagattcactttatgcaggaaatttagctttgcaaagttctcagcaaaaatattgatcacttttgaaggtatttttgttgttggttttattgttgttttttctatcaataaataaactaatttgttttcttttttctgtatgcaaagtaatgcagtttcaatatgtcctatgcagcaagttattaggttacttttaagattaagtgctttttaaatactataaaccacgtatgtatgttgcttacattctagagtgctacagtgaaacatagtccccaaagaggcagcatcattagcacctgggaactagttacagcaatgactggcctcactgcagactcacttcaacagaaactctgagtgtggggcccaggaatctgttctagtttaaaaagtcttccaggtgattctgatgcacgctaatgttcgagagtcactatttttgatgttgtgcctcaatttgtaaaaatatgatgctatatctatttcatagcattgctgtgaggtccaatatagtaatttctttttttttttttttgagatggagtcttgctctgttgcctggtctggagtgcagtggcacaatctcagctcacctcaacctctgcctcctgggttcaagcgattctcctgcctcagcctcccaagtagctggaattacaggctcacgccaccacacccagctaatttttggcatttttagtagagatggggttttgccatgttcgccaagtttgtcttgaactcctggcctcccaaagtgctggattaaaggcatgagccaccgttcccggccagtaatttcttgaataaagtcccttaaaaatctaaaaatgtcctacaaatgtaagataagcttaatattttatgattacctccttttgcattattcagagctacaacagacactaacttcttaaagtatcctttagcataattgaggaagaaaaagcctttacctttcaatttgtgtgtgtgcaattatctttattaaggaaatctgcagcacgtatccgtgggtcctactgaagtcatcaacttatatgttttcttccttgtgcttgtagggcctggtcactgtagaagatgagcaggcgtggatggcatcttataaatatgtaggtgctaccactaatatccatccatatttgtccacaatgatcaactacgcccagcctgtaaagtttcaaggtttccatgtggcagaaggtaacaccaaaggttaaatgcagtcgccttttttgcttgattttcttttatggtgctgatgagcttttatctaatttgttgccatttttctttgtgggcatgggggctgttccacctcaccttatttttgtttcacagaccatagaagccaccttggtatgtggtgacattacattgtcattcacgacttcaaccacaaggtggcgatgagagactatggatttgttagtgctgggcatgtagcttcttctgttcccaagtgcattcacaagactccttttaatcaaaagctggttttcaaaaaaacataagaagtatttaaaaacttcatttctgggctagagaagccatcgtaatcatcattatcatcaaaaattcatatttcggtggtggctgaaaagacagatgtctccatccacaggatgtcaatgaaagtaggagctactgacatgataatgtagcattagcctccaaggcctcatgattcagggtgtaattgcatttatttattgctgtttttcggtgagggtttgatggcagagttcctgaatccatctttgcttttcttttacagaacgcaatattcattataacatgtcttcttttaatgaatcagtcggtcttggctacttgaagacacatgcaattgaatttgtcaagtatccttatgtatcaagtggaatgagtggttgactcacgttggtttggcaagagcctctgaaatagataaatggctaatatctcattctggtggtggagttcataaaatgatatgtgggaaagaccatggcagctgtgacaatctgcccaaatgaaaattgtttttataatccacacagtgaactgtgatcttaagcatcatttgtaaatgtgaaatctgctctgtgctgtctacttgtttgtcattgttggcctagacctttgttgttttagctctttgttgtttatttttctctgctgtaggactctttttttctgttttccttaataagttacagttataacaaacggcaaatgagtcgcatttaccccaagggaggccgagtcgattccagtaattacatgcctcagattttctggaacgctggctgccagatggtttcactgaactatcaaaccccaggtaggagctgatgtccagtgaccccaaattccatgagaacactttgacaggatggtgccagcacttcccatcagttggctgtgggcattttttaaaggaagcagacatatggcaaagcaatgtgttattggatttatataatggtgagaaataaaaaaaaaaaaaccaaaatagagcaaacaatggtagaagataatgtgttgtgattggaatttaattcctttcataaatgccatgactattcctgctaaccattatcccatattccaaaatatttctcatttttcttccttttggatcaaagttgttatctttgtttccagaggcagaattaagtgaaaagaatttgagtatctttgtacagtaacagcgactcatttctcctttggcaaacaccctgaccactgtgaacattcagcaaatatgactgatgcaggggcacttcactaaacaaatacagaatattttgaagtaaatgccactaaaatggtatataaggagttacatatttgaagaggtactaatctataacttggtcctccaaagtgtactcaaagtcaggtttccaatatataatgactttttttttctggaaggaaaagagtaaatttttataattgataaacacatttttaaaatttttgaggtttgcttaagagcctaggatcacagtatcaagactagaggtagcaaaatagaaatagaatagatagaaatatgccacaaaccctcttcactgtagatggtcaattctacagcatggttcttacaactggtaaaataaaacaaaaccagaaagctcttttttccttcaactctttgctattaagagaactgcccatgcttcccaatttgaggattttttaaaatctattttgtattttaagaatccctgtcacttcgttccctgctatgtggattgagtggaagatcctttgactttcattcctttggcatgagtgtgagctgactgtgcttctcatgccttgaaggagcctccccagtgaccagaagctcctcctactggagtcaccattctgcatggggtccccacagtgcttgctaggttagactgtgacgtgatagctaccaatacaatcctgagtgtttctagctggggcccagtaacaaggctctgatgacttcacttacttaaaaaagcccaacttgtgttctcagttgtcagtgagtccataatatggattaaatggctaacccagcttatgttttattctataatattaggtttaaacacaacattttgaagaggaaaaaatatccatcagtttacccatttcttttgcggatgggaagaaagaaaaaatgttattcacttgcaagacagaagtcaaaagccatgtgctgccagtgtagaccccactagagtaattccccctgcctcccatcctggaagcatgccaccaagttttatgcgatacttacctagttcattttccagtcttttaaatcaagtttcatattcaccctcccgggtatctccagggttcctctgcccagggatcctgagacccatcctctcccactgtagcaggttggatatctctactctcaatactcatcaaacaatggtgtgactcctatattgaatccagttttaaaagtgacctttagcatgatctttatgaaaacacattttatgtttaatttaaatgaaacatgaggtcaattcaacatggaagagagtatgccttaaatagaccaagcagaaccttgtagtattaaagagggacctgtgggcctaggagcaatctgatacctattgtttcaaatcaccccgtcagggtcttttttgtctaggaagacaagatgctaaattatttttgtctcttgacagatttagcgatgcaattgaatcagggaaaatttgagtataatggatcgtgcgggtgagtaatatgatttaaactgttttcacctagattgagaactccatactacagctctaatgaagccatgtcattttcaattaggggctacagaatttaagctgggtttgagggatggaatagaaagaaatgaaatacctagagaatatttgcacatatacattcttcatctaccccattttactaagcaggttttgggttttttaaatcacaagtgaagcagttcatacatatgctacagtttaatcctctcactttaaaatcaatagtggaggattttatgtctgggacaggtaataatccctgcacacttggacattaactggagatgtaggcattaaatatgtgcattttacctaggacaaatcaaataatgaagttaatttcatatgtaatgaagttgtgggtgtcgagctgaatttcattcagttgggaataaacctttgtcctctactgattcttttttgtgtcttgtaagtagcagttatcaaagaataatgctgtgaatattgtcctagtttccttaaatagcactcttgaaaactgtgaaccaagaagtgaaataggaaatgttaattctacagaaacactgaaaggttaaatgaaaatataaaattagaattctcttgagataaaaaaaaaaaaacacaactatgtggtcatcccctcaccccacctcagcctcatgcatctgtccccaaacaagtaaatattaataactccagaccactgcccaaaggcctctagaggaatccaatggaaaactatcccgtcataatgatgctattaggaatttcttcatggtggctcacctgattggatatctttttatcactgaacactgccagtcaagataacatttttcagtggttgtgagttaggaatgacttttcagcatgcactctgcctccctctgccagcctggtgaatggttctctgccaatgtggctgcaaacacagtgattatgctattccccaaatcacccaccacttacatacctggagcatgccctacattttcctctgctgtgtgctttggaagaaaataaattgtgtagctgggaagagaaagatctgaattcatatttcagaattttgtgaaagcaattttgttatttaatgccaagtgttccaacccaggagattttgcgcataaattgctttgtagacctcctcctctcccaagtagtgggccaaggcatcaagccccaggggttcagccctggactgtcagtaaaagccctaggctgggagtctaaagatcagggtttgagctcagctcccagctgctcctagttcttgctgtattgcctagagcaggtgtgttagacccagagcctctcttctctgcttgataaaatgaagacggtgacacctgtcgcacagggtttgttgtactcaaaggaaaaaaaatgtcttttttctagaacgaaacagggaactgaaaaagactttgtcctttgacaaaaaccgagtcctttctgatgagacccacctttgggcttccctctcagtcactgtagaatccagtctgagcaacaatcgtgctagttcagtttagtgaaaatccccagcccttggtatctgaccaccctggatatcctgtcactttggcctgccttcagcaataatcctatcaagtcagtttggccagaagtccttatccttgatgtttcctcatagtaattttccatctgctggcgctcaccttactccatggttctaaatctccatgtacgcttgttggggtaagggttgagcccttatacctatcaccatggctccctacccctttgaataaagtccactttaccatgtttaacaagtgtttgtgtacatttttttctttaacagtttacgacagctcagtcaggttgaatgagtgtacgaaagtacttcaggaactgcacatttctgtgcaaaagtgagatttaagaaaagcttaaggccttgtgatcaatcacacacacagacattgcaaaattcaatgagtgctctgttcagtcgtcctttaaggaccccaaggagtcagcctcagcactcctggctcttacaggacccgtcgggcatggctgtgctcacttctgaaaacttgcagtggcccggtgatgcttgaagcactttcctcgcccacctcagcgatcacacctaagatgccatcagctgtctaacatgccatgaggaatcctggcagcctggccggatgcagggagtattgtttctgtataaaaaaaatcctgacggctcggcccagtggctcacacctggaatcccagcactttgggaggccgaggcgggcagtggctcacacctggaatcccagcactttgggaggccgaggcgggcagatcacaaggttaggagatcgagaccatcctggctaacacggcgaaatcccgtctctactaaaaatacaaaaaattagccgggcgtggtggcgggcacctgtagtcccagctacttgggaggctgaggcaggagaatgtcgtgaacctgggaggcagagcttacagtgagccaagatcgtgccactgcactccagcctgggtgacagagcaagactccatctcaaaaaaaaaaaaaaaaaaagtcctgacaatcctatgttgtttgtttttcctagaatttctgcttagccattattagcacgtgcagtgtctcactctctccaccgttatttattttttcttaagacagggtttcgctctgtcacccaggctcaagtgcagtggtgcaaacgtggctcattgaggccttgacatcctgggctcaatccatcctccctcctccacccctcaaatagctaggggtgcccaccaccacacatggctagtttttttatttgtacagatggggtttcaccatgttgcccagactggtctcgaactcttgagctcaggcaatctgcctgccttggcctcccaaagtgctgggattacaggcatgagctactatgcctgacctcactggtcatttgtaaatgcgttcatttattttaaaataccttcacagaaaaggatactgttgctactttagcctgaattctgtgctgatgtgttggacgctatgtgactgaaagcatacacctcaccagaaaagctgaaaaatagcctgtgcagtggggcagcccagcttgataaagtatcagcgatgctgttgactctgtaatctcctaattccccttcccatacacccagctggtggcaaaggctgtcagtgacagggaaaagagaagaaattgccgtcacctgcatgcctctgtgttccatggcgatggtagatgtggggcccggtgctgcacaggagctcctgtcactggtgctcgggcactgcatggttctcaccgtgtcacccttgtggttctcccacccacctgcaaagacttttaaaaactgcccctttgggctgagtctgaggactgcatttcttaaagaggcattctgtgccctttaggcctgtggaggcaaagaatccctgttttatatagaacatcagtgtgcaaagtacacaaacacccccaggatctagcaactgtagcaaaacgtcagataccctcctgggaaaaccctctgtgctccctggctgatcttgtgggaggacgcaccactgggcccaataagtgtgaatgttaccaggaaagtgagcagtgcttttaacagtctcgtttttgaagatggaaaaatggaagacatttccctaattgcaaatgaaacaaaatagtgtaaattaatacctaaaatctttttagactttcataggaaagtgagtgattgatatcaaaatggtatgacattttatgattcagaggctgttttttatacagcatttctcccttgcccacaggccgtacgttctaagaaccccagtggatgcctgaaaccaccaaacccaacatgtattatatatattgtggttctacacattgcatacctgtgataaagtttaatttataaattaggcatagtaagagattaacatcaatgactaataatggaacagttataacaatatagtgtaataaaagttaggtgaatgtggtctcaaaatatcttaattttttctcttttatgtttattggctatttggatattctgttttgtgaagaacttctactcattttcctattgggttttctatcttttaaaatagattttttatttcaaatttttattttccaatttttatattaggttctattttaatatttttggaacagagttgaccaggggtagctgaagcctcagaaagcaaaattgcaaataaagggggatactgtatagcatagcaacttgcagttatcatcagcagccattttgctttcttgcagctaaataaaataatggcatgttggacaactgatggcatcttaggtatgatgaaataggatgcatttccttatgaccccattttctcattcttggtgctcctatccacccacctggttagcaacccttcttctctccctcgcttgccttccaaggccttacacagtccacagaaaatccttggatccctgtcttggcattggctttggccttgtgcctgtgcctaccgcacagacctagatgtctggaatgagttcattttctgtaccagaaagcaccaaacagaccatctatgtcatttgcagggcccaatgcagaatgaaaatgaagggctcctgagaatttaggatggtggatgcagagcattaaaccaagcatggggcccttctgagttcagggccctgtagaactgcacaattagcacatccacatagccagctctggtgccagattctggcttcagcttccctatcaatgccccagccccctgcaccctcacagccaccagggatatgagaggcaacctctgctgctctctcagaccgccttggacccagaacagatgctcctttgaccttcaaagaaagcttgctaagtgtcctatcccaggccagggcttatctcatggtcctgacaagcttctgcatactctgttttactctcttcaagtatacaaaatgaacccatttcaccggagcatgcctgctttggagaattggatatgggtttcttgcccctttcccctgccatttctcattttggatcaattcactccttcagagatgagtgttctatgcagatttgaaaggggggatgtggaagaatgcttttgaccctgagatgtcattgtgatcccgtttcttattttggtgggtaggaagggctcttgatctttaacaaaggactgtggaaagtgaggaatctctggacactcacttcccaaggagattcagaactggaaaggtgactccagtcctgtattcatccaagtcccgaccttcctcgggaggcagaatccctcatttgccacagctggggtccaaatgctgcctgtgtcatgaaagccagacccaccattgttacctcccctcacagtctgtgtcggttttccttccagagaaagctggtgggcttccctcggagatgcaggcgtagtattgtagctactcacctactttccatcctgattctttaccttttgctgtatcatcatattttctagttgccaactctagccacaaaaaaagctgcaaatctaaaattccatgaatacagaagataatctcttctatatagagagcttttatattaatattgtgggttgcattctcttggagacaagagtgttcaaaattaccttcaacatttcaacaattgtgtaaatgtctatattcttgataaaaaatcagtgttgtctcttaaagattcctttttggactatcaaatgtaagggaatatttttaacactttgttttttgttcagtcttagaagataacaatgaatggtgactttttcaaaactaagaaaagtgacattaaactttaaagaaaaaatatcatgactcaggatcccttttgggttgtattttaacagataataaagttgacatcatctagacttgaaattaataaaagttatgcttctaagaaaaattagagatttgagttcccataattttgattcttttacatttaaaagcaaacctttacttttggaaaaaagtacttttattttcattgatgtactgctcatagtatggattctttaaatctatggttatacttatttctaataattttttaattttttttaagttttttgacacaagtttcagggaaattatggaatctgtgattatatgaccactaccccgtggacatgaggggcagacattgtgtagtgagggtaattgcagaacattttcatcgcctcaaaatctgtatcgtttagctttcatctcccaataggaattttaatctaccctctgtctctatatttgcctattctgaacatttgatataaatgaatttatataacatatggcctttcgtgcctggcttctttcacttaacataatgttttcaaggttcatccaggttgtaatgtgtatcaatactttattatttttattgctgaataattttccattgtatggatataccatgttttgtgccatacattcattcatcgatggacatttgggtaatttccatctctggattattacaaataatgctgctatgaatgttcatatgcaagttcttctatgaatatgtctttccatttatcttggttacatgcataagaatggaattgctgggtcatatggtaactctatgtttaactctttgaggaactgccagactgtctttctaagtgaatgcatcattttacactcctactagcaacatatgagagttccaatttctccacatccttgtcaacacttattgttatctgactcattaattacagtcatcctagtgtatacatagtgatatctcattgtggttttgatattcatttctctgatgactaatgatgttagacatctttttatgtgcttcttggttttttgtatatcttatttggagaaatgtctgttcagatcatttgaccattatttagatgagttattctttatgtattctagatacaggcctctaatcagatatatgaattgcaaattttttcctttttgtgactagtctttttactttcttcatagtgtcttttgaagcataaaagttttcaacagaaaatccagtgtatcattgcatgtgcttttggtatcatgtttagaatccattgccaaattcaggtcataaagatttgtccttatggcttcttttaggaattttgtagtttggctcttgcatttagttattttatcctctttgagctaatttttgtatatggtataaggtaaagatccagttttatttatttatctatttatttgcatggaactatcctattatcctgtcactatttatttaaaagactattctttcacccattgattggtcttggcatccttgtcaaaaatcaattggccatagataacgtggatttatttatagactttgattctgtctcaatgagttatgtgtttttctttatgtcagtaccagactgtcttgattaaatcttgtagcttagtaataagttttgaaatcaagaagtgtgagacacccaattttgttctctcttttaacattgttttggctattcttgatcccttgagtttctatatgaattttaggattagcttgtcagtttctaccaaaaagtcagctgggattttgatagagattacactgaattcacacatcaatttgagaaatacttccagcttaacaatatggtcttccaacccatgaaggcaagatgtcttcccatttatttagctcttctttaatttttttaaacagtgttttgtagttttcaaattgtagacacttattttttttaaaaaagtttattcctaagtggtttatattttgctgttgttatagaattgttttcttaatttcatttttgcatgttcattgtcattgtatagaaatacaattgactttttatatgtttatctggtatcctgcaatagtggtgaatttatttattccaatagtttttttagtggattccttagagtttttttttatttatgggatcatgtcatctgtgactagaaataggcttacttccttctttccaatctggatgccttttaatttgttttcttgcctgattgtttctactagaaatggagaaataatttatttttattttcacctacctctagctgaaatgtcaattacctttgattgtgaatgtagacaacaatccacagtcacattagtggtacccgtgactctctcaccaatgtaaatcacagacattgtcatatttcactactattgttacagctgtctcaaaatatttttgtactttagattattgtcatcataattagatcttaccattagatcttataatttaatgcattattacaagtacaattaatacagaggtagaatatcacatatttttatattttgataactatagctaatataattggtttttcattgttattctttgcattttattttatacatataaagaaaagtatttaaaggtgaccaggggataaaaaagttccagagaagatgataggatcaggaagtcctggataccactgaggctgcagctctttaaggttgtgcataagggcgggcacattctcttccatccttaggaccctctgcctaaaatcctagctcctgtgttacagatggagaaaaggaagcatccattgtttcaactagcgagtgttttagtctttgtaaaacctactaataaacttctatgctattgtcctaccaggtaccttctcaaaccagatttcatgaggcggcctgatcgaacatttgaccccttctctgaaactcctgttgatggtgttattgcagccacttgctcagtgcaggtaaggcccctgctcatcacaaggtagtataaatgtatacacaagtggtccttgaaagaaattataaaatattgaatgttaaattgcaagatccatgtgctgctcacaactttgacttaagattccaccccctttttaaaaaatgagacccattttttcactagtaaaattattagctacttaaagtgaaagataccatcaaaaaagtacctgctacttgattccatttatacaaaattctagaaaatgcaaattatagtgacagacagtaaatcagtgatggcctttgaaaaaagggcagggaggaatgggttacaaaagggcacaaagaaacttcaggtgatgatacaaatgtttatcatcttaattatggaggtggtttcgcagatgtgctcatatgtcccaactgatctaattttacattttttttttgttttttattttttgacactgagtatcactctgtcgcccaggcaggagtgcagtggcacaatctcggctcactgcaacctcctcctcccggtttcaagtgattctcctgcacctgtagctgggattacaggtgcccaccgccacacctggctaatttttatatttttagtagagatgggtttttaccatgttggccaggctgttctcaaactcctaacctcaggtgatctacctgcctcagcctcccaaagtactggcattacagggatgagccaccgtgcctagcctaattgtacattttaaatgcatataatttattgtatgtcaaatatacctcaaaaaagctgtttcagattgttagctagaaaataatgtaaacaaaaaaccctaataagtggctatagtcatttaaacactaaatgaaaaatcatctctccatagctttatcgtagatagactaacattataaaactgtcctagctgaccagtgtcaatatcagtaatgacagacaaattctagcttcacttttctgtgtgtctcttttcaagacttctaaaagaattcattaataagtatggcatgatggaatttcagagctatgaagggtcttaggacatacctgaattcatcacttcatttcataggtgtagacacttaggtgagatgaagaggccgtggacactatttgtattatgattcatatatattttttctttgttttttttctagacagttctagaaggtagaacatctgcttgaaacagctggggtttttttgcctatagtagttgttcgataatgttttggtttgatagaaatgaatacattattgccatagataattgaaattcctgctcccacccaaaagacagaatttcttacttcctgattattttttgctactgatgcttacacagagcttacttctctttgctctcgttcgtgctgctacaggttatatcaggtcaattcttatcagataagaaaattggcacctacgtagaggtggatatgtatgggttgcccactgacaccatacgtaaggaattccgaactcgcatggttatgaataatggactcaatccagtttacaatgaagagtcatttgtatttcggaaggtaggacattttcagcacgtcaaacttactctaataacttgggagccatgttttagttcacagacgctacacgatacaggggcacttattcaaccgacaacatcttctttttctcttctcctaatggctaacttctgtagctgtcataggatcattggttctatttggccctgccctccttttggttctcctctcctccttggaagagcccatctcctgcacagcagtgcctcagctctgggtttaccatcttttagaatgagtccttgctggtggacaccatcgtacactagagagttcttccctaccctggaagttactggtaacttacactattcctttagccaagtagtcaggtaagatgctgcactccaaaattttggtcaatagatgtcactacatgggtcagttggcatggtcctgtctctcctgaaagagtgacacctgttgcctacttgcaggtcttatccttcttgtactgttgttagtgttttatttttttctcctaataccgtatgttggatcctaaaaacaatcacagccattctctctaacgttcggttgttaatctcttattcaccttttcccttggtttattttttgtctattgaagatgcagtggaaaatccgcacaccggcagtgctgtctccaagaatgttcactttcctttcttacttactctgttgtcctgaccacaatgatttcttgctgcttctttaggcacaagttttccagctggttctgctccatttgtacatcatgcaacacagataatcagcttctttccttaacaaaatagggattatccatttcagaatagagtaactggcttacagaaaccaaatgaagggagatcaatgtaggtttgatgaaacaggccattttgacatttaagtttacgctgggatccacacaatcttcgcatcccattgtcttcttctctgcccctgtcaggatatggtgtaaattacatgcatagctgtgatttggttttttccttccctggtatttccaatttgttatagctggatccgttaccagtatggctagtgttctttggcatagtgaataatccctactcacatttctagaagctgagaaagttgactcaggcattctttgttttggatgaatgagaaaatacccagcttagtgtttatatataatagttctggcactagaaacgagatgccaattctgagtccttctctgttcttcagaagttaaatcgtttttttcattgctagcaagtgctttaaaaactttgttttctttcttgtcatttttgtatttttcactaatctcacatggcaagaatggcaaatcccaagcctctattcactgcataaggagcaagagagagggaaattggctaagttaccatggtttctcctcttcatcttcattaagctggaattaaattatagccttcagatgtaaataggcaaccagtccattgtctagctttaaacatagcactcagatcaagcaagatgtcctggttgcttttagccaataaaaaggcattcctgattaaacacattggataccctttttgtaatgttgctattttgtaactgaatcaggtttctgctatctgaactcagattttatgttcatttattccgtttggggatagcaggagtaggtgtcttagaatcaaagtatgttaatgtttctagctaccgcatcttactctatttaacatcccaacatttgctggaaactgaggagtacaagaaacaaggaggacccaaatttatgtacaaaagttatctcttatgcatgaagcatttattcagagatacttaatttatttattcagagatactttatttattcagagatactttcgtattcttaaaaacaaacaaatatagatgtcagcaatatgccagatattagatcacaggattagatccccaattcccaggccccactctgtcactgatatgtctaagatcaaggaaagtggctttatttctcatccattatatgggtggggacaaggatcaatcacaagggttgaagtggtaatctttaacattcatttcatctaacatttttcacgagataatttccaggaaacatgttccaattgcttttctcagtgtcttgggcactgtagctcatgcagtacattttggggaatgcagatggatcatggacttactttcaacatcagggaacatttaagaacagcatggatttggtccacactccttagagtcatggttcttgggcgctgcattggaaaaatcagtgaaagtcctgttctgtttgcaggtgatcctgccggacctggctgtcttgagaatagctgtgtatgatgataacaacaagctgattggccagaggatcctcccgcttgatggcctccaagccggatatcgacacatttcccttcgaaatgagggaaataaaccattatcactaccaacaattttctgcaatattgttcttaaaacatatgtgcctgatggatttggaggtaagataaacatttgggtacggaatatgatatagatgaggtcctagattataagattataaaacatcttgtccatgctttaaaaaacaataaaaatactgtctattcctgctaatgctgccaaccctgattaccttgaatacatcaagaatacatcataacctcaggtttcatagtaagaaatgaaagtacaaaacgagatgatctctaaagtcctttcttattttaaaatactataattttatgttgtttatcaatttttacaaacacattttgtgaagggtatatttatattgacaatcagactagggaaaaaaacataaataaggtgaaaccatagatatcttatcaatagtatcgctaaaagatttaaattgaactcagctatcaacatgcctgaattttcttccaaatccacaagaaagttcaatttcataaaaaatcctagtcatcaatccatatgctttaaggtaatcaatgggaggaatccaaagctagattaagtcatagaattttgcttacatgcaaacatgttaactttttatggcctccatctaagccaatacattaaaagaaagcaaagatcctctatattgtcagcctgttgaaccataaggaaatagtacagcaggatgatggcatccgattagccaagggttcaaatccttactctccactgctggcagggtgatcttgggaagaggatgtaacctctcaaacccctcatttcctcccctgcaaagtgaagataataataactacctccctcatagcattattgtgaggtgcttatcattagagtacatgatatagcaaggctcagaaatgtatgagcgcatgggggtgggcggggtgtctgtagacacagatataatttctatacttcactggaacacatcactattttatctggggaatatgggataattttgctgtttgtttttagtagtgcatgcttctgtggagggcagattttctgcaactaaaccacaactttaccagtctaatatcagagtcaaaaattaaaataagccatgaggatttttccatcccaaaattcatagtccaggctccttcctccttctcctttgtctttcataaaaaaaaaaaaggaagcacattagaagctacaacatacagtaatagaggtaacaacccataaaaagcctggaaagggatgctgtgaggctgggtaagaggatcagaaaggggcactggagacaagtggtaggtttaggagcagcagtccgtggcaaacctcagaaacctccctgcaacacagcatggtggtggccatggggcatcagctgatgagttaaatcatactccacatacgtgagcttagaaagcaggaactgtggaatacctcatacattttagaaatagttgtataaacccatatgatggaagatttagaagttttgcctctgcatgggttaacttcccactgaaactctaattcattcttgggaactaagccactcgaatagaaaagggaaagaaatcatttgtttagcttctactttatgccaagagctttatgtaaagagatccaaaagcatgaagttgttcagaatggatgtaagcatagggagatctgtgctgcagaaacatctgtatttacaatgtagcttattacccatgttgtatttaagtatttagccaaattaatctctttaatattagtcctgccagtattctttcctaacatgtcattgtggctgcttactttttatcagaagcgtttgaaatttctatgtaccattgatgagattctgcagtcgatgccttaaccagagttgacattcaaatacaatttattcaaaattctctggtcatttattttatatgtgaagaaaccagggacagacattatgcggtgtcagggacttccctgtagataacagaagaagaatatgagaactgtctttttccaaatctctgatcttctttatagcttcttgacttattcaaaatatacttatattttccctgtttagccaacctcccacattcatatctcagtgtgtttatgtgctgaaccagtgagataggaaatctatagagtctgtgttccctggagtattgatattccctcttcattccacaggaacaagttcaagatgaagctcagcaccatcacactcagcattttctagaaaaaaaaatgttttttttcccctaggaaaaaaaagaaactcatcaatatacatcattagatttatatttagctaaagaaagatagtgtggattttcattacttttttccacaaatatgcatagcaggtttattctataaaaagttaagtagctaaaatatgtatcagagagcaattctgagaacacagaggatcaaatgagggtcactcacaaatctgctgcccagagacagctattgtttacttccagtctctttttttcctgtttgtttatttatttatttgagacggagttttgctcttgtcacccaggctggagtgcagtgacacaatctcggctcactgcaacctccatctcccatgttcaggcgattctcctgtctcagcctcccgatagctagaactacaggcgtgcaccactatgcccagctaattttgtgtttttagtagagacggggtttcaccatgttggccaggctgatcttgaacttctgacctcaggtgatccacttgccttggcctcccaaagtgctgggattacagacgtgagccactgtgcctggccttttctgttttatttttaataaaattaaatcttactatactgctaatttggaattctaatttttttttagaatatgtttccatgtcatgaaatatttttatatttttattagctgtataggattacattttatgtcggccataatttagttatggataaacactgaagttttcttccttggccgctgaggaaacagagttaggaatttgagtgcaactccttctgcttctccttctcatttctatagcataaaaactctcaaaactggccaggcgcggtggctcatgcctgtaatcccagcactttgggaggccgaggcgcgtggatcacatgaggccaagaattcaagaccagcctggccaacatggcaaaacactgtctctactaaaaatgcaaaaattagcctgccatggtagcacacgcctgtaatcccagctactctggaggctgaggcacaagaattgattgtacctgggaggcagaggttgaagtgagccgagttcatgccaccgcactccagcctggttgacagagcaagactctgtctccaaaaacaacaacaacaacaaaataactcccaaaagacacaaagaaataacagagcagtgatggctaccatgagttctgaacccttcctggctgtttctaagcagcccagatgcaaaatgtccaacaatacagtctcctatcagaaaaaaaaaaaaagtaacatttaggacagatgattaggaatgaatcatgaaaacttggcttaattttttcaatattattttgctacaaaacgtaaagaaaaacaaccctgtcttttactccctctgtcatacacaaatagaagtactagattgggtgctaggagcattcttcctttgtcaaatccaatgagactccgagtgctgggattatctttgctgctttatctgtgggtgccaacgccaccgtagatggcatttgcccattgcaaggctttatcagtgttagacactgctgtaggagacaggaagcagttccagggctaatggcaatgaaacgagggtcagtatttctttttcacccactgttgctttgggtgggttttatcacttgtgtttattttattattactgagtgatagggaggggagcaaataagagagttgatgctttgcttccgaaatctatggagcctcagcattgtattgaaatgtcactccccgctgtgtttcatgagcctcccagcgctttgttcctcgggcagtgctgatcattacttctgcaaccataaattttgcctcctcttctacaactattttatgtcagggaagatgaagtgaccctctatttctttgtacatttcccctttccaccttccctatgattaaaaatacatcttgggtctctgcccagggttttcatagggttgctttccaaccatttttacaaagatagttgactgtttcttatatcagatatttccagagaaagaatgttcttaattaagatgccattcctgggaaataatctcaggacttcctgatgcagtttaaacttgttccatctgtcctcttccttaagggtgctaaaatgtcatattttattaaatatttgttgaaaaacccagttgcatattcacagtgatatctttcttgtggccttttctgtactacagaaaatattagtcagacttcaagaagaaaagctctggaggggaagggggcaggatggattatggtaaaatactttggaaattgctagactaagcaaatttaaacaggcttatctattgcatggctcctgggatgtatggtgaatgcccaaggggagggggagaacatgagcatttcccaatcttatttgacacaggatcttgttgcccaagcacctactgtattttctaccattctaggaaatgcagtttgagaaatgcttaatcttttggtaggaacccaaaggactaagacaaaatcatagacttgggatttgcctttctttatcagcaccacattgcagctgataggggaaaaggatttttcttctgcctgtacctcttggtaagttaggaatagtagaggggaacgggagggaacctgggccaggagtgagcacataggggtggggagggggagtgtaggtgccatgggcagtgctcaccactgaggcactcaatgatttgaaaagcattggttaaacaaacgaaaatcaactgagttctcctgaaaagccaataagcatctggaagtctgtactaaggaattgctatcttcatttccattcttagagacacctacattgatgctttcaactctatatgaaagtcaggaagcatggcagggaggaagggaggggaaaagcagggcctacatggagagtctttactaggagagaccagcttcatggaaatgacattatgcccagaaatagatggtgtttttaaaaatacacataagtagagctttaagttaaatcttaatgaaagaaccaaatcagaaaaagcagactggtttcttttaaaaagagaggttccggagcccctgctgtggcctccaagaatctagggtgttttaggccacctacatgggttctgcagagtcaggagtttgcatgcatccatctctaccctgttagatgtacaatgtggctccccccagcaaggcctactcacctgccagtggatgccgatcagcactggaaatgaattcttgccacagtgatttatcctgtggaaccctaaactaaatgggaaataggcagccacagtattccccaataaaaggaaggaagcccagtgaaatgtcatattggcaccaaagaaagatactgggtttacttgaatatgcaaaactttggccaagaatataccagatttatttaaccacttcctcaagttatttttctgggctgaggcaaggaaaaaataaataccatttttcaagtacagttacacaagtaggtaagtatgagatatttgaggtagagcttttcattctctgattacagattattttaaatgtggctattaaaaatcaatttccttttttgatatgcagcactcttcgtatctacctatccatatgtctcacatatatatgcctctggccagtggagaaactgaattacaatgaaaaattatcttaaagatgccaaggcaggccttggctccctaatgctgagccctttgcactttggcagagaatttttgtcagaactgtcccaggtattcaaatgccattcttctgcattgttctataactccagctacagaatgaacacctgccaccacatgacccaattagacatcctagaaaggggtatccaatcttttggcttccttgggccacattggaagaataagaattgtcttgagccacaaataaaatatactaacactaacgatagctgatgagctataaaaataaataaataaataaataaaatttaaaaaataaaaataaaaaaagtttgtgcataattctcatgttttaggaaagtttacaaattcgtgttgggccacattcaaagccatcctgggccacatgtggcctgtgggccatgggttgggcatgcttatcctagaagtatctagtttgttatatgaaattgctaggaatgaagcatccatttcaaatagcctgctaactttagccttgctcaaggcatttagtccttttgtaatctcttttttgtcttatctgatttaatttgaacaaaccttactttacacttttcatatttttgttgcattttgttcaagaacattatattgcattattattgtatattgtaatttcttaaaggtaaaggcagcctctaactgcaaataaaacatctcaaataagacgtttcaaaaaataagaccaaataaggcagcatgttaggatctggcatcatatgtccctaatagtgtctagatttgttaatattggtaattcaagatagagttaagtaatgatatttatccagctaatggataaatcttcagcaggctccgattttgttgtatcatttaggtgacatctacataatccgatagcagatggctgatgagagcatctcagatagcttgcctgtgacaaacaagacaatatgtggattcagctaggtcaggattgtgtagaatcagccctagaagctgagaccaagacattgctgcataaacaggaggaaaaccactggtattctagcaggaggtctccaggggctgctggaccctccatagtcttaatgataaagcctgccttgtacacttaagcacatgactttttatggaagatgcatacccaagaatttaagtagtgaatttttttcccctcaattactgttggcaatcgaatgtacagttgtcttgttctccctctgccctagtttcctagaactactgtaacaaataaccacagactgggtggtttaaaacagcagagatttatggaggctagaagcctgagactaagtggtgggcagggccatgccctctctgaaggctctcgggaagaatccttccttgcctctttctggcttctggtggcttcagacagtccttggcattccttggcttgaagatgcaccactccagtctctgcctctgttgtcacatggccttcttccctgtgactccatgttctctcccttcttatagcgacactagtgattggatttagggcccaccctgatctagtaggatctcatttcagtcctcttctaaaacctaagcaaagaccctgtttataaataacatcacgttctgaagttctaggtagacaggagttttggtggacactattcaacctactccaccctcttaattctgcttttaatttttattttttattctttatgagacagagtcttgctctgtcgcccaggctgcagtgcagtggcatgatctcagcttactgcaacctccacttgccaggttcaagcaattctcctgcctcagcctcccgagtagctgggattacaggtgtgcaccaccacacggggccaatttgtgtgtgtgtgtgtttgtgtgtgtgtgtgtgtgtgtgtgtgtgtgtgtatttttagtaaagataggatttcaccatgttgaccaggctgatcttaaattcttgacctcaaatgatccacccacctcagcctcccaaagtactgggattacaggcatgagccaccgtgaccggcctccgctttattttcttagtactccttccattcatcattcttcaataactattttaaagcttattaagaataaattttgttaggaatgcctatcaggcatatgagttatataaagtgctatattatttaactaaaccattaactttctgataaaatgacaaagaaatcattttttgcactaagatattcctaaattcatctttttatagaaaagttgaaagcccatctaagtatctaccagtggggaatagtttgatatagaaaatcaatgtgacatttcccatttactaaaaataattttcagaactatgccgatataatatatgcatcaatgaaaatgcaggttatataacttctaataaaccatggaaaatatgtattcatgtgcaaaaatgacacaaaaatatacaaaaatgcttggttaggatagatggatcatttaatatcttgctttattgattctttaatgtcttgctttattgattctgtaacttgttttaagtaattaaagtattatctgttattcctatggaaaagactaccagttactcctcaaaaatgccatatactctcttcaggcccccagactgattatatgttattaaaaattagcgagtatttgtttcctaaccacccagtcctgtgtgttatcactgaaatgtgccattgggattggatgcttggcaaaacatatctgaagtgagaatgtacagagaagcatagaccaagtatatctcctccaaagaagggcagaaaagtttaatggatacaagttaaacctcactctgcctcataatggtgtggacaagtggcaagaagaggcatttgggagtcaggcacaaagagttgtgctaaaagtctaggttggtcaaattgtgtcttcatgtgctgaaggaccttaatcatgcccacttcatggcatcctgatgacgatgagaaagccatgtggttctcctaacacagcatcacctcatggttgaccagtgaccacagggcagaaggatgctgagtagaaagacatgaattggcatcagaggagtcttctgaacattgcatttcctctctaagcaatggaggtagaccctgtgtctcctccagacactactgactgaagagagatgtcagcaccatcagcaccactaaaagtaatgttgggagccaaagtattgccatgagaatcaccgaattgttgtgaagagagatagcagcagtatgaatgcagagatcgagttgccacctcctgcaagcacctctaaaagtaatgttgggagccaaagtattgccatgagaatcaccgaattgctgtgaagagagatagcagcagtatgaatgcagagatggagttgccacctcctgcaagctgccacctcctgagcctacttgaggaacttagcgtcacaaatgggacaaccagcctttatgtccctcaatgtgatgcatataaagtcacagcacctcctagaagtatccttaaagaaagatgtcaagagggattgctttagactaaaattgacttaagagacataattatcagagacatagtgtgaaatctggtaccttgattcaagcaatgtaactataaataggggaaatattaagatgggctgtgtattatatcatagtaaagaattacgccaattttgttggatatagcattgggatggttggctccaaattaaatttagagctgcagagacaagttattaggaattaaatgttctgatatatggaattcaccttaaaatatttcaatagagaggaaagagaaaaaatgaaaggaatataaaggaaatgtggcaaacaaatgtttataattgttgggttatcatcataaatatatgaggggttattgtactgttctctccacttttgtgtatacttgaaatgttttgtaacaaagagtttaaaatatataaataaattcctagaatattaacttgccaaaaataattgtctgtgatttttttttcctgagcaagatttaagaactaatttttccacagctgttgttgagaggcaaagagttcttagggatcatgggtgataaaaacagaccttctcacatgccactggtgggagaataaattgatgcaatttcggtggagtgcaatttggcaataactaccataggacaaatactcttacccatcattctaacttctaagaatctattctgtaaatatatgtagaggtatgctacgaaatgttcaaagacattcactacaatactttaatagcaaagaactggaaggacaagctgtctaccaataggaactggttaaagaaattatcaccattcagagaatggaaagtttaagcaacccttataattaatgtattagagctatattgccaatatgagaatgtttcccaagatatttgacattaaaaaatggtgcagaaaactatgaacccatttggagttttaaaaaatatcagaaaggatacaagaaatggataataatagttaccttctgggcgtaggattggcaggagagaaagttttcacttttcattttatatatttgaatgtttaccatgtgcagatgttattttattttatttgtttattattatttttttctgagacggagtctcactctgtcacccagcctggagtacattggcacgatctctgctcactgcaacctccgcctcctgggttcaagtgactctcctgcctcagcttctcaagtagctgagattacaggcatgcgccaccaagcccagctaatttttgtatttttagtaaagacggggtttcaccatgttgcctaggctggtcttgaactcgtgacctcaggtgatccacccttctcgtgttcccaaagtactgggattaccggcgtgagctactgcgtccggccaaccatgtgcaaatgttattttctgttataaaaaggaaaagaaaaaaaaattgaaacctagagaattatgtgccccgtgtactgagaatgttatcttaagaattatcctaagattgtaattaggaaggcgattctgttagggaaaactttataaacttacacagtatttaaaatgtataaattatggatggtttcaagttaacaagaataattttgccttctatagtatgagtaaattgtgcacgattatatgaaactctgaaagtacttggaaatcttcaaatggcattaatataaaatattaaattctactatcttttaagttcaagttatacctgagaaaacactagagaaagatttcattttgtctaccatggaaccaaaattggctttgaatatgtattatccttctgtatcgaaaaataagacctacctgcctcaggtactttttgtgttcatcatctcattgaattatcatgattattctgcagggcaggtggtatccaccctaatttccagataaagaaactgaggctggggacattaatcaacttgctgaaagtcacacacaagtgaagaaacagtctagaacccacacacttcactcagtttgtcctgacactttgcctccttcatatcaggaaaaactttgtatcaggaaaaactaaataaaaaaatcatctggtctttggcccttgcttttaactcctttcttgttttctgcaactagctgtgccttcctcagtgtgtcttatgtcctaggaaaagattattaacagaaagcacaacaggtatccaggattgtagtttattaagcagagttttaatgaatattttcagtaaaacagagaattaacggctcattgggtttttttttcccctagatatcgtggatgctttatcagatccaaagaaatttctctcaattacagaaaagagagcagaccaaatgagagctatgggcattgaaactgtaagtagaaatggttgattaaaggtggccaagttgtgggagtttgattatcaaacagtgtttacaaaaacaagacaaagtaatgaattagcaaatttaaggagggtttttaaaactgagctcatcaattcaacaatagttaactttctacaaaagtgtggcatgtttaataaaatgtgactgccatcagaaaaatccacttcatcatcagtggcttaactcacatctggggaccccttccccattagaaagaaaatgcaaaacatttgttatacttttgggaaagtttaaaatgtaggtggagcatttctaatcagaaaaatgcaacatccgaaaagttccaaaattcaaaaccttttgagtgctgacattggatagtcatacctttgctttttgaagtttcactgtacataaactttctttcatgaacaaaattactaaaaatattgtataaaattaccttcaggctgtgtataagttgtatataaaacataaatgaattttctgtttagacttgggtcccatccccaggatacctcattatgtatatgtaaatgttccaaaatctgatatccaaaacatttctggtctcaagcatttcagataagggatattcaaactgtactgtacaggatgtttctatgatacactgaaataccagttaacctagttcagtgaattaatgataattgctttttatttttaattatttattttttaacagataggatctcgctctgtttcccaggctggagtgcagtagtgtgatcatagctgactataaacttaaacttctgggctcaagccatccttccacctcagcctcctcagcagttgggactacagatgcatgccactgtgcctggctaatttttttactttttttgtcaagacagggtctcactctgttgcctaggttggtgtcaaactcttggcctcaagcaatcctcccaccttgacctgccaaagcattgaaattactggcgtgagccaccatgcccagccaaaatggcgtttattattgatttttcactgtttgccagccttacatcccaaccttctcccattccagtgcacacgtggattgtttctttgtttttaaatgttctctttaccagactcctcagtttggaatggatgtagcatctctccaatagctagaaaaagagaaagtattctctgcttgttaagaagttggatcttctttccttggctggatcctttgcctttaagagagtagaagtctaggaagagtatggtagaagtttactggattcagtaaaataaagaatgtacaagatatttgaccttgagtgacattcatttgggtcaatgtaaatgtttctgttccagagtgacatagccgacgtgcccagtgacacttccaaaaatgacaagaaaggaaaggccaacaccgccaaagcaaatgtgacccctcagagtagctctgagctcagaccaaccaccacggctgccctggcctctggtgtggaagccaagaaaggtgagagagagccgttgggttccttatcttctgcacccaccttaattacacagtgtacaatatctatagctttaggaaatatataaattcgaagttctttgtgggaaagaaccttttacatagtgatgttaactaattcatccccactctcttccagaccctcccataggtagttacctggacaggccgtgggctcatgaaccaacatagttattcctattggacatttctaaattctcatactgataattttccctcataagtagaaacatgattatttgtttgtaaaattatcaaatgagcacttgaaggccaattccatgtgcttacctgtagatgaaacaaaagatcattaagaggtggcatcacaaagaatcacgtgtctcatattcagccagtatgtagggaaacaactgtgctggttattttaattggtttccatatgaattggccagacatccattgattggatggtgcccattccatactggagggaaagtgggcagggagaatgctgatagggagtggcaaggagttcatttttcttgttctggaaagaattctggggtcatcctgagaaggtcatgggaaatgagtcaaaggagtatttgaagaaaattatagtcttggcagaagaattcattgaaagtgggcatgctaagggcaaggtaagaattatgatactcatgcttctgttataacacacctatcacattgtgttaataaagtattaacaaccagagaaagaggttattgcagatgagaccacacctcatcatcagtgtgtccctggaaccatgcctagttaaaatctagtagtctattttctcaggaagtaaagcgctgtttaatgaatgataggggcaaggaaatctagattaagttggaaattgtcaaaaggaaggaagaatagaaataagttggcagcttgaggccaggtgcagtggctcatgcctgtaatcccagcactttgagaggccgaagcgggcagatcatgaggtcaggagatcgagaccatcctggctaacatgttgaaaccccgtctctactaaaaatacaaaaaattagccaggcatggtggcgagcccctgtagtcccagctgctcaggaggctgaggcaggagaatggcgtgagcccgggaggcggagcttgcagtgagctgagatagcgccactgcagtccggcctgggtgaaagagggagactatatcttaaaaaaaaaaaaaaaaaagaaagaaagaaataagttggcagctttgatatgggccttaggcagaaaggggctttttggtaactcagacttcaaggacagatcccagagatagattgtaccattgagagaagtagaggagttaggaggaggagctgcttttggtaaggaagatgattttggttctgtatatcactgaggacaagctgttgctgatacatctgggcagaaatatgcaattaccaaatctatatcaggtggagaagaagaaggagggacagagaaacagaataagaatacttagaaggcagaatgaatggggaaaaaagagaaaagagagatctatgttctaagaagaattagttttgagaagatgctgtagacaagtccagagaagtgaagactacaaaattatagttgaaccaggggtgattggatgatgaaggtagaaacatggttaaaaaaatgtgagacataatttaagacataaaatggttgttctggaggacagtagcatgttggtaggaactaataaagaaaaacaaggaaaatgcaaaagagagtacatggtaaaacaaggctataaggaagatctgaatcaacagaaagggtgaaattcagctggataaggaaggaagagatatgttctgtctgagctaagaagaatgatgagtgaatagaagtttcaggatagacaggaagaattcttgacagacggtgtatcagtcagcttatgctgcataacaaatgacctcaaattttagtagcttaagacaaccaccatttattgagatcatgtttcattgggttggttggtctaagctggcttggctaatctctgtgtcttgcttatgcacctgtgatcagctgataggttgactggaaggtagatgtgggatgaccttatgcacacatctgtcatttggcaagttgtttcacattatcctgaagcctgagcaggcttgttcatatggtactccctgagtttaaagagcagcccttttccagcctctgctagtctcccattggctacagcaggtcacaaagtgaaccaatattcaaggggtagagaaatagactctacctcttgattagaggagaaagaaatagtggtcatttttgtagtataacacagatagattttatctgatctaagaagttggttaggtggctgctctctgctgagaaacgtagaggtagaactgaaaaacagcagtatagaaaagctttggagttgcccctggctggaatagaatgatccacaggaaataaggagaaggtctgccacatagcacacaggaccctggtgagggttggtggtgtgtactaagttgatgtagcttgatctcattacttcttcagcagtgcccagaaactcagcaacaactgtggacaaagtacagcttagggagttgcaagcctgaaattatcacaatttatatggtctgggaccaaaagtttgaagaccattaagttatgacactgtaacagttggctattgatgtgtaacaagcaatcacaaaagtcagtaatttaaataagtaagcatctattatagctcatgaggttgtctgggtggcttttctggttatgggaggattagtatcagtgactcagctgatcttagctatgcttattcaaatgtttggggttcagctaaagtgtcattggctgggacaagtgggctgtcttccttgtggactctcatctttcatcagcttagcctgggcttgttcacatggtagttgcagtgttctaaaatggaggtgaaagtacagatgctccttgacttatgacagagttacatcctcataagctgaacatatcattaagtcaaaaatgtgtttaatatctaagctaccgaacatcatagcttagcttagtctagcctattttaaatgtgctcagaacacctacattagtctacagttgggcaaaatcatctaacacaaagcctattttataataaagtgttaaatatttcgtgtaacttattaaatgcagtacagtgtagagtatacagctgattgggagctgaggcttgctgcagccccagcgcatatccctagcttaggaaaagatcaaaattcacaattcaacatatgctctctactgaatgcatatcacttttgcttcatcacaaagttgaaccactgtaagttgaaccatctgtatgtcaggttccttgatgagtcctagacttagaactggcatggcatcctttccactacattctgtcatcccaagcaagtcacatggcccagctcagattcaagagttggggaaacagattccacatattgatgggagaaattccaaagtcacatgtaagtaggtgtggaaacagggaggggtggaattttttggccatttttgcactcagtctgccaccctgatcataatatataggttaatgttccagtggggtagatactagaggagagagacttttctaggaaaggaaaaggttaaagggaaccaggaacaagatgaaagtaaaaagcttgcttggtaggtgtgagggagtgagtgaagttggcaggatggagattgcagtcagaaagaggttactctaagctacttgtcttggaggaagggcagtttcaagcagtgttaacatcccgtttacaactgtcagtgggaggtgaggtaaagtagagatgaagatttctagaatggaaggcatcatgaaaacagaaagaaaagtcactcagcacattcttctcatgcatattgaatcactgtgttggacgtctgggaatgcctgcataggaaaaccacaattcagatatgaagttcatggggccgggcagtgtgtgacctaaaaggacacatgtggaggtagttaggctcagcagagcctggtgtaagtgagaggtctgttcttttgtatgatagtttttaggagaatggcatggaagtacaagagagaagtctataggtgttcttcccacgcctctccatggattggggtggggtggggaataaactctactccaggagcctttgggggaagtgatgtcatttgagaaagcaagcctccatttctttccagaaaactgtcttaatttgagtcaccccaaagaccctgagagaaggcttccagtgcaagtagtttattctgggaggcagtggacatggatagagatgtgaagaagtgacaccagggagggaaggcagccagtaattagaatgttttaaagccagttgccagtaggcacctggaacttaatgccctggagaaactctgggggctggtattggacatacttctcagaggtctcctcttagagggatgagggagctggggaatgtataccctgactcctgtcagccttttcttgagggttcccgtggaagggataaattctcggcattcagacgctggcaattggaagtgaactagaagagctgatgtagagagggcatagtgtgtggctggagcagacggcatttgctgcagacctctatgaaggtggggaggtgtgaaattccaaactgtttttcttagacattcagccaaacagcaacaactgcaccaacacgactttttttttttttctgattttaagaacaaaggattaagaacacccagctcctaacttccagattagcaattaagagaaaacaagttattgttaaggaactatgctgatatgaacaaaaactttatgtagtgaaacttcaattagctaaaacccaaaatgtgctgcctaacctactttcataccagggaagcctgtagacctgcacagtcctatatagtagccactaaccacatggggctaccactaaccacatagggctatttgaatttatttaacaattaacttaaaagttaaaccttgagttcctcattcacactagccacatttcaggtgctcaagagccacagatggctagaggccgtcagttggacagacccacgcatggaacattcccattattgtgcaaagctctatgaggaaggctgttcttggcacgcagatggaactgtcctcttctgtagagtgtggtttttttttttctaactaaatcacttatgggaatcaacatttttacaaattgtgtctttcccccaaaacacaaaaccaggtagttgagggaagtttatgtttttgtaggttccttttaatcaagacttagttgaaccaagacaaaaagaaaataaaaattgagagagagagtgtaagtttcatcagactgggtcaaactcagaatttgctagatctctggaggaccttgcatactccccaaatcctgtatgttcattttacagatgagagagctgaggcctaaagacagggagctctttgtgtgccaggagtcactcccttgccttaccctgcctcagtcactagagagacagcttgtgaaagccaacttaggagatcagtagagagccccatggaccctttataccccgatcataaaatgttacagatcacaaggctgatttccctcagccaaaactttccttctgcggcctgaccaccctatcattgaatgtgcacatcttaaaatgaataaaagggaaaaacaagagcctgggacttgatgcctatctttcttgaatatatcatacctagcctttgggattctaatggaaatcaattacagcacagagtacacattcattttgtttgcctaagatgaaaatctgcagtcaaacagaaactgtttgaggatctggctacaactgttgttgccatgacaacacctggcctagcatcactcagatagcaggatgacttagtgtattaccctagctcctcctggtatgctcctgttatacactggtttgattttattatttcctgtatgtttaaggcattgctgtgctcaatagcacattgcttaaatgctaagattgaatttggtaaaagggagaagccagaaaaaaatgttttattctttcacaatgactgaattgagaatagagttgggaattagttgactggcatgatatgccttgaaatacaaaggtaagaataaggataatagatacttttgtgcctgatcagctcccctttatgggttcactatcccatctcacagctcctatgaattttggctgattgggcatttcagctgcccttctccatagaattgccctgggaccatgagagttcccttgcctgaaaggttttgtgaaacctctgtagcactcagctgattgatccagggttacaaatgcccagcctctttttgccaaggtggaatgactcttgggtgccatttgtactgaagagctccctgcaggatcagactgaggctggatttctactggaaacacaccctaccttgttcctctgccctgctccacttctttcattcccttaggggtttctcctgagagtctgccctcaatcaatcacttgcacatgaatccccttctcaggctctgcttgtaggaaacctgacctaagttaagacattcaacatttcaattgtccagttaattgctttgtaataggaacttaagatgtttatattcatcatatgtaaagctgcttcaaagtctttcgatgagatttcgatatgtcagttctatattaccagttattctctctgatttttagtatacatagtgacttaattttttttgtttgtttaggtattgaacttatccctcaagtaaggatagaagacttaaagcagatgaaggtaaaattgcttgactattttgcaagcactcttgtattacacatattggtgacaccaatatatttttgtttctcaccaagtgtaatcattgtgattacaaaaagaaaaaacaaaaaacctatttttgattctatttttctcccaaaggcttacttgaagcatttaaagaaacagcagaaggagctaaattctttaaagaagaaacatgcaaaggtacagtgctctacagctactattttgtgttatgtatggatgaatcatttgtagccaaaaacactactttgaagctgataccagaccacttaacagtaataactcattctaactggttaacaatgaaattaaaaaatagaatcggtttgggagtgcttgtcacttgtttgtagtctgcatttctaacaattctttcaaatgcataacaaagcttcatccatttaaaaattgtttcactaggccgggcacagtggctcacgcctgtaatcccagcactttgggaggccaaggtgggtagaataggatgtcaggagtttgagaccagcctgaccaacatggtaaaacctgtctctactaaaaatacaaaaattagctgggtgtggtgacatacccctgtaatcccagctactcaggaggctgaggcaggagaatcgctttaacccgggaggcagaggttgcagtgagctgagatcgtgccattgcattccagtgtaggtgatagagtaagactccatctcaaaaaaaaagaaaaattatttcactaataacatgactatataaaatattgaagaccagctcacaattctagccactagttacctaaattgccaggtcactgtcacatagtttgccatacacactggtgcatggagggagatgctagcaatctgtcaacctcccactcacagcacctagagagagaacacttgtcactttttctcccttatgtaaatcttgcccagtagcctacttctgaaatagatttatttttgctttttacccataagaagtggtattttgacagtgattgtgaaaaattacaagagctagttgcaaattgtaagagaacagcaggaggtggccccaggaattctcctgtgggttgaaaaacgtcatggccctcaaacatcgtcacttccagactccctcacaggtaaagaagaaaaaggtagtacctctttccttcctaagaacatataataaccagctgctgctggtaggataatgtctgtcctcttttattaagggcaatgagagcaagagaaacttaatttataatttattaatttgaaagaacttctgagttcttttaaactaatcttgcattcctgtttctttattctctgacccaagcctcaaaccaaggcatgtccttcagaacttggcttgagtgatgtaccttttaatcattccacgtattgagatgccgagaacattgtctggaaccctgtcccctgtcatttctttaagagtttgtgctaacactgattttttgagaagtcatttctttaagagtttatcctaacactgattttttttagaagttaggcctaatcttatcctagtaatgttccctgtattacagaactgttgggctcaatggatttgctgatacagtcacttcacttcaaagactgtttctaagtttcatgaataattccattcagtgaaattccttacattgctcaatggggttattggagacagaacaatttaaagtaggggcttcaatgttgttggttattgacaacaggctgaactatggaaagccaacagaaaaagagtaagaatgagaaataagagagaaagcaccttaaatgactttaattatttggaatagagtggatgcccgtatgctgcagcactatctaacagatttttcttgcatttaaattggatctcttttattgagcagacacctcagtggcctttgggctagttggaaacataaagattttggcttcatttaatattttcttgaggcatggccagaaaatatgctgtggcgggtggtaataatagcagcaataatagcagctagaattcctgcatgctcagtaattctcagatgctgtgctcagcaccttatatgcattgtctcatttaagactctaccctgtaaggtaaattctatgtgagtctccatttatatgtgagggaattaggaattagtgaagttatctgatgtcccagagttaggaagcagcatagctgatatttgaaccaaaatcaagagtccagaatccatagtcttgcaccatactcctgtgtaggatatgggatgctcactaagtggacaagttccctcattgggtcaaatgcagtgacagcacatgggacattagggaaaatcactatcaactttgggcagtgttgatatactgctgattatcaggactgtgactaaggaaggatgcccctcaatttttagaacttaacctacatcagagttgtccattaactccctggagccatcatgcccggcccaagctaacttctaagatgaagaatataatgaatatttacttgcctaatatacaccgatgccagctctgttaacatattgtctttaggcgagacatggtggctcatgcatgtaatcccagcactttgggaggccaaggcaagcagatctcacctgaagtcaggagtttaagaccagcctggccaacatggcaaaaccctgtctctagtaaaaatacaaaagttagccaggcatggtggcaggtgcctgtaatcccagctacttgggaggctgaggcaggagaatcacttgaacccaggaggcggaggttgcagtgagctgagattgtgccactgcactccagcctgggtgacaagagcaagactctgtctcaaaaacaaaacagaacaaacaacaacaacaacaacaaaaacatgttgtctttaaaaccaaaaaatgaaaaactgtttaaggagaggggaacaatgtggtgaatctattaccattggacatacttcatgcctgatctccatatgacgtgtttatcctaacactgatttttctgtcagtcaacacttttaaagtggcaatactagcttgtacatattgatacttgcttaagcacatattcttaggtattctcataacagttatataaaggagtactataattatatgagttttgtatctgttagcttttgcagggtaacaaaccaccctaaaatgtagtgacttaaaacaatgaccatttatttggctcacaattttgtgcatcagtagttggagctgggtttagctggatggttcttctggtctcagctgtattcactcatgaatctgctgttactaccagtttggttggcagatgggggactggctgatttaggtcagcctctgttaaaccacttcctctctgctttatgtggtctcctgtcttccagcaggctagtccaggcttgttcacatggctggggtcctgagagaccaagcagatcaagcatagtttcttgtggccccagctcagaactaacacaccatcacttccacctcattttttggccaaagtaggtcctaagtctggccttatgaggtctctaccttttgacaggtgacaaagttacatcagaagtgggagtggatgcagaaagggaaataactgtggccatttttatagcctaccggctattcaacagattagcttattaatacttaaaaaaacacagcttcattaaatcatctagtttttaagtggtggagtcaggatttgaaccaaattcagcccggcttgagaactcagacttgtaaccactatactcagctgcctctgatgtttctcacactaatttttcttctcttcacacatctttttctttatggtctcactaacaggtttttaagagcaatcatgaacctatcagggcacaaatatcttgggttccttcaggactggtttttcaacataaggtcattgggccaagagctggaggctttacaaaaatatgtattcttatgcctatctgacacttagctatcatctctaagaaaagaatataggaaatacagaaatacattttagataaactcctctcctctgcatgctaaattttgaggactgtttttttaggaacattatgtagcactttttactatcttttgagcccttagtagaaaccccactaatcgcctgcaaagacacttatcaagcctccttaaagaaacagaggttttatcctcttgccacataatagtaagaattaattcctacatcctttctgtgaaaggacatctacagctcttttataatagttttcagccacccaacatggagctaaggcttaccaccccaaagccttatgtcataaaatgacctgctgatgaagaaatatgacctgggctgcactctccctactagtgtgcccctggcccaaacagcccttggtagctaagaacagggactattatttagtctatatccagcaactgtagggagatctcagctcttacatatcagcctagatcaagcttgtccaacctgcatgcagctcccaggccacatgcagcttaggatggctttgaatgcagcccaacacaaatttgtagactttcttaaaacatgagatttatgcacagactttttttttttttttctctcattggctatcattagtgtcagcgttttatgtgtggcccaagacaattctttttccaatgtggcccaaggaagccaaaagatttgccactgctggcctagataaataattctactttttagacttaaagagaagcagagaatctatgaactatatctcagcagtttaagaaataaatgtatggtcccaaggagagcttatttccaaacttgcaggttagctaccagatagaaaggaacagtggggtgagtgtgaggttctgccatttgcaaataggtgtgcaatttgctgttaggatattgagaagaaaagatgggggtaacgaccatttgcaccccagatggatataaaaatgctcattaaaatgtctatttttggaaaatggcaatgatcaactgcatttgaccctctgaatgtactggcaatcaaacttctacttgtctcatactttctagaaccacttcaattcgaaatggaaactagggtaatggtttttcaagtgtctattatatgagacacagaaaaaggagaattaattaacaataatcctcccccagcacatgactcattgggatccagagctgcagttactttcattaagagacaggcatgcttttcaattgtccaatgaggtcaattccttagagccaaaaatgtaaaacccaaagttggatacatatctccagtaacgtgttagaaggggaattacaattcaaatgcctatggggtccaagcaggaagtagctgagggaagttggacaggtgttgactccataaaagctgggagcactcatctctatccacaggccaagtcagtctgagctaccaccattggtgcctggagagtagatgggtcagtcgtgtcctcttaaaggagagtcaaaaaatcagaaagcttatctgaatttcctgatcttttactatcggcgtctaattcaacctctttttgaaactgcgtaggaaaaaacaaaacaaaatccaaaactaaaaactacatctgcaggcaggatacattccttaggccaccagtttgcagtatcaacattaaatgagtcaaatgaaatgcctgagaagcctactaaactctggcatttttagtaaagctactgatggaaaattttctctttgctatgcaagcaatttagccgacagcaccaagactgttgttaaactcatcaattttaattcatggtcagaccttagtaccagacctataacttagttttgcagtggaaaggggcagagacacagcagttgccctcagagtccgcctattggtaatctcagagttacatgctgagcaaacatgatttactccaatttttcagcaccctctgtggtgcgatcattcacgcccatagtcacatcagtcacaagaatgaattgcagcagcagttttccccaaaagaagctgaatttactcttaacttggataagaaacgtacacaaattcttctgaatgctatacatgtttttccccaaaatgtcccagttaagatttactttaagttaacacatttaattttggtactcttggcttgaatgaatgagaaatgtatgtctcttcaatagtgtttcatgatttaactaaggaccaaaagaataaaaccaataatggacattttttttaagctaagatggacttagagatcatttcatgcctccttcattttacagcacaatgagctgagacttgaccagagtcacatggaaatcagtaattaggatccccatttctttctgaaaggacaagtggtgtctgggaatcaagttatcccaaaacacttcagcaatcactgcctaccacacagggatggagttttgaataaaaagagaaacagagacaatttttcaggaccagctttcctgttactgacattaattatagtcactttaattcaatatgctttcagtttttcaaattatttttgcatatgtttagtaaccttgcatctcataagcaactcatgaattcggttaggcaaaggtacctaactcagttttcttttcttttcttttcttttttttttttttttttttgagatggagtcttgctctgtcatgcagtggcatgatctcgactcactgcaacctatgcctcccgggttcaagcaattctcgtccctcagcctccagagtagctgggattacaggagtgcaccaccatgcccggctaatttttgtatttttagtagagttgggtttttgccatgttagccaggctagtctcgaactcctgacctcaggtgatttatgcgcctcagcctcccaaagtcctgggattacaggcatgggctactgtgcccagccctaactcagttttctaataaagacattgaggcctgggaagatttatatatgttacacaagggcagttgtttaattattggctgagctgggaccagaatctaagtcctcttgctattttcctatgctgactttttattcatgcgataaatacttattgagcatatactttgtaccaggctttgtgccatgtactggtaaagagaaaagacctgccctgctcttgtagagcatattacatagagttgaatccatcataaacaactttgtggtacaaagagccctattcctcatatctaattggattaataaggttcaccaaaatattttcttaggaaaaaaatctgtgtcaatttacatccaagcctcaaagtctctacttgtcctgttctgcactaaaatatttaaagaaatagccttcaccctcctttcaatgatatttgcaagataatataggactgtggcacttctgatatattttgagacctgcagaaagccccttatttatttaattttttgcccaggaaaaattaacacatgggttagccaaccataatgatttctaaatcttagaaagaagactaggaggagggcattttagtaggtaccaaagtattacaagagtagttaaatacattcagggatacatcaacatgttcctctattcctggggcagtagatcaagcatggaggaaacatttattgatttaattagtctgattgatatccctatctcaagtcactctctgtgtgttatcatgggtattgaatagtatagataggtttgtatgtcactgtgttttgaataagctgtaacacacatttgatacattagattcacttttaatcctaacaaccctatgaagtaaatgtcactatcccaattataaagatgagcatactctggaaaggtaagtgactcaccccagcactgaaaaacccatgtccttaacccagtgccacattgcagaagctctggaggaaatgtgtttatagcacaaaggtgcacacacattggtaatatggctagatttatggggcattccaattacaaattaagcccagatccacagcaagcccacctagcctttgttcccactgtaagttcctatgttgggaatctccctatccagcatcacccttctccactccttctcctaaagacaagaatgctgaggccttgtgcatgaatgcgtttctaaagaatttatatataaatgaattgtagatcaagtcctgtgttaaatctcttagctgggaaattaaggaagtcttggtaaagacttaaaaattccttccccatttatattttatgaaaccgttaaaagaagttcatgaattagatttgcataaagtcaagcctaccttagaaagaaaataaatttgcttttaaattaaggcactattttcttcaataagtgaaaggaaatatgacggtgagaggggttatataacctgaacaacatgtacacccattccagtcatgaatagcatcccatttttctggttctcaagagtaaggttaggctataacatcaagtgtcatttagagttggaaatttctgattgtactgatttcctctgtgcttgggaggctgagcagctaaagaaatctgatttcatataagtcattggctgtagctaaatgcctttttcattgtccaggaagaaataatgtttatattgaaatacctactttccaaagcattgcagccccaatttcaatggttacgtgaagcagatgggaaaatgttttaaatatctgtaaaacagaaggccatagctcctgaacactttatcctcataaactgcttctagataagtaagccagtgaaaatattaagtgatgtagattcaaattcagctgatggtgacaaacacagtgatgcctctcattatataataatggcattcaagagctccaaaatgtgcaggtgtttagaaaccatgtcacatgatgaatagttacatttagcatatacaagagaagaaacatggtggctgaacttgcatgtttgaggaccaatgtgtggaaggggcagtaggctaattacatgtctcaaacagcagaacaaagatgaatgggtggaaatactacagagatgtgtatatgtagaagaaaggacttcgagatgattggcactacccactgctgagcaggagtgcatttgaactgggcatgttcactagactgaggctagagactcccatgttgggaatgcccttggacaaaaaaaccggtgttgaatgggagatctggagtctgtactgttctcagatttggttattccttgactttctaaatgaagactctagggaagctggtgaaagttatgccagccctatatggtgtgagccatgctaagagtccaattcataactgcaaatccttcttgttcaggaacacagtaccatgcagaagttacactgcacgcaagttgacaaaattgtggcacagtatgacaaagagaagtcgactcatgagaaaatcctagagaaggcaatgaagaagaaggggtaatactgtttatttccttctgaagactttctctatgtttatattttgtcttttcccacagttttgctgctgtttaggtcaaggaagaacttagtgttgacttgattttcatcattaaaaattattcctgggaagtaagaaactcattcattttaaatgctctaacatcataacaggtcaatgagtggatgtagcttctggtttggggaaggttctcagcagagattctgatatcttttaattcatcataattatttctaatatgagaaagaaatcttagcctcaaataattgaaaaaatacctctttactctgagaattgattgtcctttttgattttgaactaattttaaatttacagaaaagtttccaaaatactacagagttcccttatgcccttaactcactttccctaaatgttaacatctcacataatcatagtacagttgtcaaaccaggaaattgacagtggtgcaataccattaaccaagccacagtgatttttcacattttaccagtttttccacaagtgcttgttttccactctgggatcacctccaaaattaaatagcatttagttgtcatctcagtatgtgataattcctcaatctctccctgtcttttgtgactttcacttttgaagagagctggtcagttgttttgtagaatggctcttcttttggatttgtctgatattttctcatgatgagagtgaggttatgcatttgtggcaagcacaccatggaaacaatgctgcttccttctcagtccacgatattggggggatgggggtgtgacattgatatgtcccattattggtgatgttaacctggatgacttggttaagctggtatcttacaggtttctgcactgtcagattacttttttccctttataaatactttggggaaaattccatgagaccacgcatacattctatttatctgagaaattatttttcctgcctttgaccttctccagggattccctctggtttttatctctttccttcaatctctgctgatgtcttctagttttccacaacctttggcacaagagaaaaggagaatgagatttctttttcctacttgggttttttggcatttggtttttgttttttattttttgttttaacagtcacccaagatatacctagaaaactaaactctgaaaacagaacagattatgttagttataattttcttggacattggttcatattgccgaaatttcagatcccaagatctaagttcatgacatgaaaccaatgtaatttgcttgaggagtaaatggtgggtaactaaaatgcctgccctggtatcaggcctcactatttgagaggtaccctcatttttattaaagttgtatttttcagaaaaatacaaatcaggcactgattattgagcatctgttattatgcatcatctgccttttgttttccccgtaggtttcactgtgtattattgaggcagaaatgtgcctgttgcttagaaaacattttgatctgtattttaagtgagtaagtgagtcacccacctcggagctcatgtggcaatattggtagtgattacagtaagttttgaggagctgtgattcttctagattctaaccacatcagctttggcctatttcttttttgtaaattaatttctcatatttaatgacattttaggctataatattgaaactgatggtagacagactctaataccaaggagcaaattgttgatgactttatagtactctccaagaataaggttatttgtatttacaagatatcttttcaaaaaatgtttcatgcatttttgtggatcggtgtatttagaaacacagttttggcttaaccaaaccaaaaatttttattaaggagatttcagatccaagcaccatagagtaaatttctttgctaaaaataatattacagttttctgattcaatcaatcatgagtgctacctttagaaatttttaaaaaattgataaaatatatctttacctcatgattgtttttactctcaaagataatgtgggatcaaaatgtaatttattataaacttggtaattattagaagtgtccctggtgtgacacttaaccccccaaacaggctattgagtgctcttggaggtctctcagcaaataaagccctgttttatcctaaacgtagatgagactggaaaagtctaatctgtagatttcttcctgagcctctgctgtcaaacgcagcactcctagcaggctcttcacacagagcatttccaagtactctaaagagtagaatcttagcaatacattaaaagttacttcaaaatcagacatcagatactttcttctggaaagccatatctgaggagagtttctcatcattaatattcaccatgatatcaaggttgcctggacttagtcttgctatgttgcccaggctgaagtgcagtagcacaatcttggcccaatgcaacctccgcctcccaggttcaagcaatcgtcctgcctccgcttcctgagtagctgagactacaggtacatgctgccatgccggctaattttttgtatttttaatagaaatggggtttcaccatgttggccaggctggtctcgaactcctgacctcaagtgatctgcctaccttggcttcccgaagtgctggaattacaagcgtgagccactgcacccagccttcctggacttttaactgcaactgagttgctaaaaagttagtgaaaggggaaactgtgacagtccttggagctttctcatgcaggatctatttttgaaacaaatgaaaggtttccccttactcttacctactcagctgaaaggaaagattgacctgggaaagggaagctttattcaagtgcttccagctttggctaatgactacctctcatatgctttccactcaaggatctttaaggtgatggtaaaaagatgaatgggggaacaagggaagacaagctaaagttgggaaaattctaaattacagaaattattttgcatagcccgaatataaagaaggttgatgcactagaaaggggaaaataaaatcttgattttcaaataaatattacaagtgcatgcccttatgccctcagatgagagtgttgaataaaacctctcattgcatttactgtgaaagatttgtctagaattaagtcacgggaatgtttcggcagtgctgcaaacttattgaataacagaagagagaagaaacttgctcagtgccagccattgagaagtgctagatttgatgcgagaccttgcatttttagagtaatgcttctctcacaggaacttggaattatattataaggaagcattctgacttgagctataataacctagagtatacatgctgaagatgaagctcaggacctgttcttgtttcagcagcgatgtggatattccaaaaggaagacataatcactgaaataagcagtaatagttgctgggcactcgcctagcatatatttcctactcacaatagaataagaagcaaaaattgccctgtggtgccaaggattgctattttctccttcactggcatatttaaaagacaaaaatctggctttataatgaaatggaagaatgaaaaattcacttcaagtctgaggacctattttccagttttcatcccaaataatattttattgaataagtgaaaaatagcttgagaaaaacaggaaccaaaatggaaactgacaacagccccttaatgatgaaataattgttaggtttgaagtgcctctttgtatagtggttgaattgagtaatcatgaaacagataatattttgtaaggtgtgaatctattactagaaagaccagtgttgcccaatgagccatgacatctcatatttgatgaatatattatcttcatcagaaagctttgtagcaaagacccatgggaatgggaaaatatctaatttctggcatgcatttgcaactttccattttcaggggaagtaattgtctcgaaatgaaaaaagaaacagaaatcaaaattcagacgctgacatcagatcacaaatctaaggtaagaaaatgcccatttttacagcagtgacttgcagaagacactttgtaattttttagaaggagtacctagtgtaaattagaaataacagtagcccagagctggtctagtagcctgcagctgatctgggatgtcaggggagcccagggttcatgtttgcctcagactcactggctttaagaagagccatttcatggaacatcttcttttgtcttgtctgttgaactatgctaacaatatttatgttgcctgcctcagaggcatcaaggaaaataataaatgaagatactaaaaggaaatattatataaaatacagaatatacttccctatagaaataacattaaacataggacagaaaaccgcccaaattgggaggtgatacttactccatcctaactttacatggaaatttggaatgagaaaaaattaagagctgatattctaaaagagaagcctaattactcacattttcttaaagacaggagaaaataggagcttgagagactttaatcaactttgtgggcatttggagaactaagtgttaagtcccagttaagaatgaaaacaattcttccagcaatgatagtttttaaatgaaaaggaaaaaaaaagaaaaaaaaaaccaacaacaactgttaaagaaagctcccaaaaatagctgtggttgaaccagccagcctcatctatctatatgcagctgtgtcatctggcctaatggccctgctgcatgcatggagcaggcaagatgttcaagatgttcttggtagctgtatgttttgtagggcatgaactctatagaggcagtaaggcatgtgtctttaagagttattccccactctctctcttcttaactggaatgtttgagaattagtagttgtgcaaactgtcatgattcttagatgcttggcatcaataagaaaagccttggcaacagtatcagtttgcttttgctatataatgaactgtgtcaaagaagagcacattgaaacaactactacagtttattaggtcacaattcagtgggtcagaaatttgggccatacttctgctgattttggctggagacacttgtgtatctactgtcagcagggggcgtatggccttacttatgtatctggtagttgtctggctgttgcttgttttcctacatgacctatcaacctccagcaggctagcacaggctcagtcagagggtagccacagggatcccagcatagcagaagggcaagtactttccagcctctgcttgcatcacatttgctactatctcattggctaaagcaagtcacaggtcacccagcttcaaggagctggagaaacagactccagctcttgacaagaggcactgcaaaaccccactgcaaagagcttggatattgggtggggaggactttctaccctagtgtctatcagggttgacacagtaagtcatgatccagaaataaaagaacacacagctctctattcagacatgtgggcttgtggacatgaagctggagaaacataaggtgataaagaaaatcctgatggaattggtaaaagagcctaaggcccacacaaatcagagtgttggctgagtgtggtggctcacgcctgtaatcccggcactctgggaggccgaggcaggtggatcacctgagatcgggagtttgagaccagcctggccaacatggtgaaaccctgtctctagtaaaaatacaaaaattagctgggcatggtggcacgcatctgtaatcccagctacttgggaagctgaggcaggagaatcgcttgaacccaggaggtggaggttgcagtgagctgagatcatgccactgcactccagcctgggcaacagaggcagactctatctaaaaaaacaaaacaaacaaacaaaaaacaaaacagagtgttgctaagtgaggcagtaaaataagggttcacagttaactattcagagccaaagcaattgatttattttgataagcaataacttcctgcttcccattgattaatacatattattttttggtggttataggtgtctcatgattcaccaattaagttggtgggaggaacctgaaatacctgaataatgttgtgcttttgggttcatacctgacctatgaggattacaatggcaccgtcccctttttcccaaacaggtcaaagagattgtagcacagcacacaaaggaatggtcagaaatgatcaatacccacagtgctgaggagcaagaaatccgagacctgcacctcagccagcagtgtgagctgctgaaaaagctactcatcaatgcccacgagcagcaaacccagcagctgaaactgtcccatgacaggtgggggaattgccgtctccagagtaaacatctaatatttaaaaacaaaagctgattttgtgtgtataagagagccaaggtaataagtgaaatcaatttgacgtacaacatgtagctcttttgtgtatctcatcatatggctgattatgagcaagatgagctataagaaatggcacccaggggccaggtgcagtggctcacacctgtaatcccagtgctttgagaggccaagacaggaggattacttgagcccaggacttcaagacatagcaagaccccatctctattttgaaaaaagaaatggcccctgccatcagagggcttacaggtgttggcaagatacaacacccatatgaacagttaagtcagataacaaagtagcgtatgacacatattttaaaatgtcatgggcactaaaggcatccagctcagaggagctctaccttttcagagtggtcatggagacttttcaaaatggtagggctggaactggcctttggagaatgatctggagtctcttaggtagaaaagacacacagagagataaagaccaatcagttcagctcctagagtgaccaggttctgatcatttaatagctacctgtggagagagtctccatttcccttccttacagtgttaggacttctgtgaattttgaaaagataagcctgattaaaaaacagcaaagtatcagtttattttggcctgtgcccacttcagcaaagtgaatattgcatttgaaatactgcaagccatgagctggacttatccctgagcagaagaaggttggtgtttgttacatctttttatcatagctcggttgcagcttgcttggttctcacttagtgcctaccgtatgccacagttagggtctcttgagacacaacaagagtagaaaatagaagcattatacaaataaatcaaacaaaaaaatgtgtttaatgccaactgcataagttatctggctgcatgcccaaattcccaacattactttggagtgacagatactgccacaagaacaaagtgtttttgccctggtttcccattctcatttgaggcaactaaatgcagtctcccatgctccattttctgtgggataatgtgctgtacccccatgcattttaaagcattctatttcgtcctataggattagaagttgtcttttcttttttccttagaaatgctcttgattcactatgcagaaagttgtgttcatcattctgcctttgatgattgctacaatgccagattttaggtgcctacccttattcaaagatacttcacggaatacagcatggcacttgtctaatcttcttttacattgttgaataaagagaaaaacattagctcacaacagtaggcattatctgaaaggaaaaaacaaaatatactaattcttgaattgcttaggaagtcatttgaagagatcatgacctagttactaaaatactttaaaaaataaatccatgggcttcattccaagatggctgaataagaacaggtccagtctgcagctcctagcatgatcgatgcagaagatgggtgatttctgcatttccaactgaggtacctggttcatctcattggaactggttggacagtgggtgcagcccaagaagtgtgagccaaagcagggtggggtgtcacctcacccaggaagcacaaggggtcaggggacttccctttcctagccaaaggaagccgtgacagactgtctctggaaaaacaggacacttctgcccaaatactgtgcttttcccaaggtcttagcaaccggcagacaaggcgattctctcctgtgcctggcttggcaggttccacgcccatgtagccaggctcactgctagtgcagcagtcagatcgaaccgtgaggcagcaacctggctggggtaggagcgtccaccattgctgaggcttgagtaggtaaacaaagtggccaggaagctcaaattgggtggagcccactgcagctcagcaaggcctactgcctctatagacaccatctctgtgggcagggcatagctgaacaaaaggcagcagacaacttctgcagacttaaacatccctgtctgacagctctgaagagagcagtggttctcccagcatggcgtttgagctctgagaacggacagactgcctcctcaagtgggtccctgacccccatgtagcctaactgggagacaccaccaagcaggggccgacagacacctcatataggtgggtgcccctctgggacaaagctgccacaggaaggatcaggcagcaatatttgctgttctgcagcctccgctggtgatacccaggcaaacagggtctggagtggacctccagcaaactccaacagacctgcagctgagggacctgactagtagaaggaaaactaacaaacagaaaggaatagcatcatcatcaacaaaaagttcatctacaccaaaaccccatctgtaggtcaccaacatcaaagacaaaaggtagataaaaccgcaaagatggggagaaaccagagcagaaatgttgaaaattctaaaaaccagagcacctcttctcctccaaaggatcgcagctccttgccagcaatggaacaaagctggatggagaaggactttgacaagttgacagaagtgggcttcaaaaggtcagtaataacaaacttctctgagctaaaggagcatgttcaaacccatcgcaaggaagctaaaaaccttgaaaaaaggctagatgaatggataactataataaacagtgtagagaagaccttaaatgacctgacggagctgaaaaccatggcacgagagcttcgtgacacatgcacaagcttcaatagctgattcgatcaagtggaagaaagggtatcagtgattgaagatcaaattaatgaaataaagcaagaagaaaagattagagaagaaagagtaaaaagaaaggaacaaagcctccaagaaatatgggactatgtgaaaagaccaaatctgtgtttgattggtgtacccaaaagtgatggggagaatggaaccaagttggaaaacactctttaggatatcatccagtagaacttccccaacttagcaaggcatgccaacattcaaattcaagaaagacagagaacaccgcaaagatactcctcgagaagagcaaccctaagacacataattgtcagattcaccaaggttgaaatgatggaaaaaatgttaagggcagccagagagaaaggtcgggttacccacaaaggaaagtctatcagactaacagcggacctctcggcagaaaccctacaagccagaagaaagtaggggccaatattcaacattcttaaagaaaggattttcaacccagaatttcatatccagccaaactaagcttcataagtgaaggagaaataaaatcctttacaggcaagcaaatgctgaaagattttgtcaccgccaggcctgccttataagagctcctgaaggaagcattaaacatggaaagaaacaaccggtaccagccactgcaaaaacatgccaaattgtaaagaccaacgaggctaggaagaaactgcatcaattaatgggcaaaataaccagttaacatcataatgacaggatcaaattcacatataacaatattaaccttaaatgtaaataggctaaatgccccaattaaaagacacagactggcaaactggattaagagtcaagacccatcagtgtgctgaattcaggaaacccatctcacatgcagagacacacacaggctcaaaataaagggatggaggaagatctaccaagcaaatggaaagcaaaaaaaaaaaaaaaaaaaaagcaggggttgcaatcctagtctctaataaaacagactttaaaccaacaaagatcaaaagagacaaagaaggccattacataatggtaaagggatcaattcaacaagaagagttaactatcctaaatatatatgcacccaatacaggagcatgcagattcataaagcaagtccttagagacctacaaagagacttagactcccacataataataatgggagactttaacaccccactgtcaatattagacagatcaatgagacagaaggttaataagatatccaggacttgaactcggctcttcaccaagcagacctaatagacatctacaggactctccaccccaaatcaacagaatatacattcttctcagcaccacatcacacttattctaaaattgacaacataattggaagtaaagcactcctcagcaaatgtaaaggaacagaaatcacaacaaactatctctcaggccacagtgcaatcaaattagaactcaggattaagaaactcactcaaaactgcaaaactacatggaaacagaacaacctgctcctgaatgactactgggtaaataatggaatgaaggcagaaataaagatgttctttgaaaccaatgagaacaaagacacaacataccagaatctctgggacacatttaaagcagtgtgtagagggaaatttatagcactaaatgcccacaagagaaagcaggaaagatataaaattgacaccctaacgtcacaattaaaagaactagagacgcaagagcaaacaaattccaaagctagcagaaggcaagaaataactaagatcagagcagaactgaaagagatagcgacacaaaaaacccttcaaaaaaatcaatgaatccgggagctggttttttgaaaagatcaacaaaattgatagactgctagcaagactaataaagaagaaaagagagaagaataaaaaagatgcaataaaaaaatgataaaagagatatcaccaccgatcccacagaaatacaaactaccatcagagaatactataaacacctctatgcaaataaactagaaaatctagaagaaatggataaattcctggacacatacaccctcccgagactaaacctggaagaagttgaatctctgaatagaccaataacaggctctaaagttgaggcaataattaatagcctaccaatcaaaaaaagtccaggaccagacagattcacagccgaattctaccagagatacaaagaggagctgataccattccttctgaaactattccaatcaacagaaaaagagggaatcctccctaactcattctatgaggccagcatcatcctgataccaaagcctggcagaggcacaacaaaaaaagagaattttagaccaatatccctgatgaacatccatgcaaaaatcctcaataagataaatactggcaaaccaaatccagcagcacatcagaaagcttaaccaccatgatcatgtcggcttcatccctgggatgcaagtctggttcaacatatgcaaatcaataaatgtaatccatcacgtaaacagaaccaataacaaaaaccacatgattatctcaatagatgcagaaaaggccaacaaaattcaacaggccttcatgctaaaaactctcaataaactagatattgatggaatgtatctcaaattaataagagctatttatgacaaacccacagccaatgtcatactgaatgggcaaaaactggaagcattccctctgaaaactggcacaagacaaggatgccctctgtcaccactcctattcaacatagtgttggaagttctggccagggcaatcaggcaagagaaagaaataaagggtattcatttaggaaaagaggaagtcaaattgtccctgtttgcacatcacatgatagtatatttagaaaaccccttcatctcagccccaaatctcctcaagctgataagcaacttcagcaaagtctcaggatacaaaatcaatgtgcaaaaatcacaagcgttcctatacaccaatgacagacaaccagagagccaaatcatgagtgagcttccatttgcatttgctacaaagagaataaaatacctaggaatccaacttacaagagatgtgagggacctcttcaaggagagctacaaaccactgctcaatgaaataaaagaggacagaaatgaatggaagaacattccatgctcatggataggaagaatcagtatcgtgaaaatgcccatactgcccaaggtaatttatagattcaatgccatccccatcaagctaccaatgactttcttcacagaattggaaaaaactattttaaagttcatatggaaccaaaaaagagccctcattgccaagacaatcctaagcaaaaagaacaaagctggaggcatcatgctacccaactttaaactatactacaaggctacagtaaccaaaccagcatggtactagtacgaaaacagagatatagaccaatggaacagaacagagcccttagaaataacaccacacatctacaaccatctgatctttgacaaacctgacaaaaacaaaaaatggggagaggattccctatttaataaatggtgctgggaaaactgtctaaccatatgtagaaagctgaaactggatcccttccttacaccttatacaaaaattaattcaagatggattaaagacttaaatgtcagacctaaaaccataaaagccctagaagaaaacctaggcaataccattcaggacataggcatgggcaaggacttcatgactaaaacaaaaagcaatggccaccaaagccaaaacagacaaatgggatctaattaaactaaagagcttctgcatggcaaaagaaactaccattagagtgaacaggcaactcacagaatgggagaaaatttttgcagtctacccatctgacaaagggctaatatccagaatctacaaagaactcaaacaaatttacaagaaaaaaacaaccccatcaaaaagtaggcaaaggatatgaacagacacttctcaaaaggagacatttatgcagccaacagacacatgaaaaaatgctcatcatcactggtcatcagagaaatgcaaatcaaaaccacaagagttgccatctcacgccagttagaatggcgatcattaaaaagtcaggaaacaacagatgctggagaggacgtggagaaataggaacgcttttacactgttggtgggagtgtaaatttgttcaacgattgtggaagacagtgtggcgattcctcaaggatctagaactagaaatcccatttgacccagcaatcccattactgggtatatacccagagaattataaaccatgctactataaagacacatgcacacatgtgtttattgtggcactattgacaatagcaaagacttggaaccaacccaaatgtccatcagtgatagactggattaaaaaaatgtggcacatatacaacatggaatactatgcagccataaaaaaggatgagttcatgtcctttgcagagacatggatgaagctggaaaccatcattctcagcaaactatcacaaggacagaaaaccaaacaccgtatgttcttactcataggtgggaattgaacagtgagaacacttggacacagggtagggaacgtcacacaccgggccttttggagggtgggggactgggggagggatagcattaggagaaatgtctaatgtaaatgacgagttgatgggtgcagcaaaccaacatggcacatgtatacctatgtatcaatcctgcacgttgtgcacatgcaccctagaacttaaagtataataaaaaataaataaataaataaaataaatccatggcagaagcacttttcaaagcaacagcagtattttagctttttctcaaacccctggtggttgtgtttcttcctcatgatcacaactattattcttggttaaaaatctttgctttcttgacatttgtcagcaacgtttggtcattggtgtttgttgaatgaatgaatacagaaaggtcaatttcctaacaagttatggtaaaatctgagagtgatcttcttgtgtccagagtttctatacatgttcctgctggagtggctctagggtagctgagtgagcaactctccagttcagtattgcccatctctttggatgcagagcaaatagcagtgcctaggtaacctgactgcttgtatgctggtttccaggcagtgctttcaatagatctccataggttatagaaaaaaatttttgtaataatatactatgtagcattttaagttttattcctttaatgcatgtgtgtcatgcatacacatgcattcccacatgcagtggttggtcacctgcaaacctacttttttgctattccctgtgcttacttgaaaccatttagtccctttcattcctgtggctgatagaaacaggaaggccgtttgtgatggttagaacattttctctctctcttccagcccatctgatcccaaataatatgaagcaaaactgagatctttatatttatgggcaaaaatactgtctcctcatcacaggccatcactgtcacttcaccactaggtggccactgcccctcaaggatcagcatccacatagcttggggtcccgtccctcctttttccaaaatacagaagtcgatgagctcaataatagaaagaaaaaaaaagaagagtgagaggagtgagcctagtcatattgctataaacagaagtatttttgtttttttccatgcttaaattatgtctatatatataaaatgtaaactttactgttgtaaccattaagtgcatgacattaagtacattcactttgttgtgtacccgtcactgccacccacctctagaactttctcattttccccaggtgaatctctctacccattaaacacaaactctccatcccccctccctgtttgttttcttgtttttaatacatagggaaagcaaggaaatgcgagcacaccaggctaagatttctatggaaaatagcaaagccatcagccaagataaatctatcaagaataaagcagaacgggaaaggtaagtctgagagtgttcactgcaggaatatggcattgacttgaggacacagtctcaactttctttatgtgtgtacacacacacacaactgagacagcaaaacacttgtggcttttgactaggaattctgctattataactgcaatggagatttgttattatcactgtagaacaatcgtccacattttctggttgcttactaccaccagtaaaattagtttacattcaatatatatgtgctgctttacaaacaaagttgcataaaatatgacataataatataattcttttttttattttattcatttttttttttgcttgtttgttttgagatggagtcttgctttattacccatgctagagtgcagtggcacaatctcagctcactgcaacctctgcctgggtttgagcgattctcctgcctgagcctccctagtagctgggattacaggcatgcaccaccacacctggctaatttttgtatttttaggagagatggggtttcaccatgttggccacactggtcttgaactcctgacctcaagtgatctgcccgcctcagcctcccaaagtgctgggattataggcgtgagccactgcgcccagcctataatcaatataattctgaagcatccttcccaggttccactgggtcattctgcaagcctctcccctgctcaggtgtcagtccgttctggatgggccagttctgaatagcagcaacagtcaggagggcggtcttcttcagtagtccttcacatgggatcatcttgaaagcccccatcccatttgtctcatttgtccttatgttaggtgagttttctggaagcagatcaaggcaggaattgatgtgcttgtgattcactgaggaagggaccttcagagaaagggagtgagaaagcaggaaggcccagggcaggccctaagcaaggatgtggtctcacctagggtcccagtaacctcaaataaaaaattccaccacagatttgtccctctttgaagcaagagtacctggcttttgtgtttccatattaggcagtcattggccgcctgagactggggggaaggtttgtgtgtcctctatagaaggtgccaagtgcaagccctttagacacagctggtgaaggggatctgaggagctgtcaatagtcatgttacccaagggataggcacttaattcccagcgatcaccagtgctgcccatcatccacctcaaggaacatctgagaatacaaatgctatcagctccataaccaagagcctggattacgccaccagcagttagggacagtggggttccttcttttgggggaataatacctagcaagaaggtggccttttggccaaagtccaacagagaaaagctgttttatgagccaggtgcagtggctcacacctgtaatcccagcactttgggaggccgaggtgggcagattacctgaggtcaggagtttgggaccagcttgaccaacatggtgaaacctcacctctactaaaaatacaaaaaaattagctgggtgtggtggtacctgcctgtaatcccagctactcaggaggctgaggcaggagaattgcttgaaccccaggggcggaggttgcagtgagccgagatcctgccattgcactccagcctggccaacagagcaaaactccatctcaaaaaaaaaaagaaaagaaaaaatgtcattctctggatgttattctcagataagcaactttgtttaagggccttatatacatggaaatgacaccttcttcagtttgaaaacaccaaatattccagccatgataaaacctcatgaatttgaactgttttagactatccaaagtgaaatatagaattaaccatgacaaatgtgccaattaatagctttttaccatctttttcaaatatgttacaaagtagactttagctcggttgaggtcaaattatcttcaatttggagttactgctaacttaattagcaagggtcttaaaaatttatcttattttgaaaactgtacttatttgttgtaactttctatttttatttgtgcaactgtatgggggtacgtgagaaaactttacatgtatacaatgcccagtgatcaagtcagggcatttaggttgtccatcacccaagtactatacatttgtggctaagtatagtcaccctactctgctatctcttataagtttgtatccagtggtatgtggttccaaaatatctacaaattggctgttttttaaaaaataatttttctataccaaatgatagttatattctaaacccatactgtgtgtatgtttgtatccactttatcaaactgaggagaaataaaatttaaaaatttgtcatagcactaagaaagatacatagaaactgaaaatcatacttacatttttagatcaaagaagacattttaacagaaattacccaatatttataactgaatgacaatgtaaacactatttatcaatgtgtagagggtagttaaagtgatatttggagggaaaaatatagcctagatgcatatattttttaaaagatgtgaaaattaatgagctaaccactcaaagagaatatgaagttggaaaaacagagtgaacccaaagatctctgatggaaagaaataaatttaaaaagcaaaaaatactgaaatagaaaacaaaatgcaatagagaacattcagaaaaacaaaagcttatttgaaaagaataataaatcagttaactttcaccaagactaaagaagagagagaaagcacgaattagtgatgttaggaatgaaaaggggaattaactacagagaaaaacgctttgaaaaactaagtctactattaaaaaaaactaccaataaatttgaaacgttagatggagtggagaattgctttgaaaaatataaatatccaaaactgactgaaaatggagaaaacctgaacagactggcaattattacagaagttcaagaagttataggtcttttcactcatgaaaaacactctacctcaccagtagtcagggaaatgcaagttaagacaataagctccattccataggagcatccaactgacagaaagtctgatagtactaagagtgggcaaagatatggggaaagggtaacacccagacactgcagatggaaatgcagttggggacaactggattggagtaaggaagagcctgttcgtaccctgccaagtgacaagtctgagtatacaccctacagcagcctttgcctgtgtgcacaagaagatatgcaccatacttcatccactcatctgtttattcaacagacacttattgtgtcaggtattacagggcccacgcacccgatcgttgtagcgttgtttgaaaataacctaatttttgttaatggcaatgaggaaatagtgtagtctgttcataaattgaaaagtccatacagcaaatgaaaataatgaagtggtctggaacataggtgtatctctaaaacataagactaagtggtaagctatgggaagaaacccagactatgttactctatgggtacatttagaaaacacaggaagcgatgccactgtgcctggccagcaacatcagcatcacctgggagcttactagaaattcagacctcccaccccaggcccactggatcaaagtcactaaggggaaggcacaacagtctgtggtttttatcatctctccaggtgattggtatgcacaggaaagtttgagaagctcttatattacacatgggcacatctgtatgtggtttaaaatattaaaacatgggtgagaagatccacaccaaattcacaatagtggtaacctctggggagagaggaataaggaaaactgaatcaggaagaatacacatggggctttaattacatctggaactgtttattgcctttaaaaatgtgagataaacatggcaaaacattaaaaatatcagttaatctgagggacacatacacagatttttaaatattcttctctggacattatatgtttgaaaatactgcaataacaattagaaaaataaagcaataattccatccagagaatttgatggaatatagctctttattatttgatataatattaatttcattcaatgtcataccaaccgttatttgtgcccattgcttttaggcgagtcagggagttaaacagcagcaacactaaaaagtttctggaagaaagaaagagagtaagtattttattatatttttggcattcttcctttaaaaaactataaacaataacatgcttagccaccagacctctagctaatttgtttaatttgatttttctgtacattaaacattccagcttctctgctccctgaaagctaaaataatgtctcactaaaatctttaaggtaatgatttggcaccattttatacagaaaatgaagccaggtttagtcatgcgtaagtcctctattattttctaagattttagcaggaaagatcttcccagaaataattatgagtttaaactctccaaattttgagatgattttttaaaaaattattatctctttcacttaaattataaagttacaagtcatctctcatccctgttttaagattgtaacccaaagttcaatcagaattttttttttttttttttttgcagcttgccatgaagcagtccaaagaaatggatcagttgaaaaaagtccagcttgaacatctagaattcctagagaaacagaatgagcaggtattttacctaaaatacgtaaaaacatgcaggcagctagccagctttgggatacacatgccatggcccacagtgaccagtggcttgcatattgtaattgaaaggtagatagaagaatttgttgcccattactatattttctccattatatccaaaaagaaaagaaagtaccagtttttggagcaggagcagaatctggctgtgccaaaaaaagaatatttggataaattatggggattatgtgaattctaagaatgaaattactaaaagtgagaggatgaaaaaaagagattacgaagtatttctccattttcatttagagttttataatttgcaaactataggcaagggatatgatgtttaaaagcaaatgagagaaaccacctattttcaaactcaatctgaaaacgaagtttaaaaacctccctgggacttacaggtggtatctaaagtcatgagcccccatcactctacaaatcactgagcatgagtggataccatagtcttggtctttttccctgcaagacaagacactaaataaagaaatatacacaaataaagagttatccaggccgggcgcagtgggctcatgcctgtaatcccagcactttgagaggccgaggagggtggatcaggaggtcaggagatcgagaccatcctggccaacatggtgaagccccgtctctactaaaaatacaaaaattagccgggcctggtggcatgcacctgtagtcccagctactcagttggctgaagcaggaaaatcacttgaacccaagaggcggaggttgcagtgagccgagatcgcaccactgcactccagcctgagcgacagagtgactccatctcaaaaaaaaaaaaaaaggagttacccaaacaccaactgtttagttaggccaatgggcatataccagcaccaaggtaaatgtatttttatctggtgcatagtacaggtgggcacctttccaaatgggctacagcccatcagccttctacagtaacctttaattaatggaaatccctctagttcctatggcaacaagaccctcagttatcatttacatttcagactctctcagttcaaatgttattctttaggtgtagttggtatagaagttattattcctaggtaattcaatttagaaacggagaggttttgatgaaatatgtacttgtgccacattattccttcctgttttctcccatctataaaacaatcctatttaaggaatacttttttccagagtaaatgactccccttgaagaatacttaagtaggaattatactaaaaagtacctttgagaaagtaaaaataaaataaaataaaataaaataaaatcttttttgtatggcaattgggtaacagataaatctgacttctagtttcagattctttactttttggtggacagaaattttattcatcaacatacttcctagttatgtttcccatttccttttcagctaagtgcttctattcataagcaagtccactccaaggggacaatacatggttattgtcccacaggtacaattcatttgaccaactcataaacacatcacattctggtacaagttacctagcttatgtttttgctcttaaagcacttctcagaaagtgctcctgggggaaatatgggaatatgagtaaggataaagtcaccatctccaaagctttagaagccacttcagtgattcaacaatgggtagggataaggatgccttggagaaggtttttaaaaattctccctagaggaagggcacagtgaaaggtaaggcacagttatgtgttagttaactaaattaagaaactacttggaaattaattgtgttgcttagcaacaagtttgactaaagaatgtaaatgtgctcagaattactcatcactacaatagtggtgtatgccagagctagagaaaacagtcatcttgtgtcgctagctttggagccgaagtacataatttttaaaaatcagtttgagcttttatcctaacacatggctaattcaagccacaccagagttcttgcattaaactgctagattagtgatagctgtattgattagattgtattgggagggtgctggctttttgttgcagaaattcaaatatgtcttttaaggtctaccacccacaactgacactttgagtcacaaaagcttgggaaagcatagaacatgaaaaggcttgagacctgataaagatttaatgagattcaaggaaaagacattcaagatatcatactgatgcttctggcaagcaaagaatttggacttgagtttctgtgttaagctttgctttagaaatatggcctgttcaattgcaaattcaatcccagatctttctagtatacattttttggcatttaagggtgagaaagctctcaattcacagttactctgtatggtacaacactgtcatgggcacagtgcaaaagatacagtgacttcatttctttcctcataaaaaggcaaggtctggaactatatagtataactgccttcataaccaggtaaacatttcatcagcaagaacagttctttgtctccagacaatgcaaacttctacaacaatcttctaaataattgttaaatcccaagacattttttctaagccagagataaatgtaaacattctcccatagtatttccctcaaaggtttctttctgttctcctgtgaccctactcctaatcggtgtcccaaatctccccttccaaagcaaggcctggaatggattcagtccattagctaaaccagtgttgggggcactggcagaaacaaaccaggcgtcagtatgttttggtcctgattctggatcctcaccttctaggttatttgtaagccactttatgtccttgcctacttggtcagccaactattcacttaacactctgaaggttggggatgtttttcctacttgagttttttcatagacttcccagctacacagtatatctcatctgtcttgacatgtaccatttcaaacattaacgactccattactgtcacacactcgagtctcaaaaattgatttttatcatcaatcctatcatttaataaagagaggtaaaaggttttgcttaaaggccaggttctccacttactgccacagaagagaggcacagtctgggaatgacaggcgttggttgtttgtttcgtttcttttttttctgttgagatcaactaggggaaagtttgtcactgaggggtgtgtacatgttttatccttagctttttgcttttctgtatatggttttgcattcatttttcaaattcacttcaatattcatttattttcttcgttttgtatgtatgactcaattttgacattactatttttgtacaaacagcttttgaaatcctgtcatgcagtgtcccaaacgcaaggtaggaccgaaactctgataagcaagacgttgctttccttctcgactacgtccgtattctctgtgcagtctccatttatgagtcacatctggtcataactaatatctgaagggtttggatttaaaagcttgactattccatgcttggatttctgatgtcatattcatgccaaaatgccctaagtctttagagaattacttctgagggtatttgaacctgtattttctattgcagatttaggaaacagatcatggtaataaagacataaccagaacagtgatgtgcagctgtcatttggactgaccagagctaagacagggtcacagagtcaggtcactcacaaatgttaatatgactccaattaatttttaaagcgctcgctgaaagttggttggtggtttttaatgatggagctgtgctgtgcatgtagaaaccttacacgatgactcttgtcatgctctctgctaagtcccatctgccaaagaccctaatcactcctcataagtaaggtggtcatataatttattgtccataccaggatagttttgagagtgaaaggcagctctgtttataatatctaggactacaggcataaactggaattgcctcagacaaatgagaatgaatggtcacccaactcatataagaacttagctgttggaatagtcttgtaatgtcctatgattcttccttctacaccgtggtcaatactttcttcagaagctaaagggggacaagcacagagaatcatttgctactatttaccgaacttggaagtatttaatttccagtgctgataatgtttcactgtcatcccttttgaatactgtttgtgtcatagtttcatgtttgtatatttttctccatttcttcatttctctattagagtattactatactttaggcataaaaaatatctgggcagagggaaccaaccatcccaaatttacacagaaagatttaattctttggtgttattatatccatcctcaccaaaatgaagcttaacgccaaaatatagaagtaagaagaagaaggaaatcacagtatagtctgtgggttaaattaattttgtcacaagaattcatttggaagatgcttctcatatatctacagagttgaccaaatcccctcccagtgaccttccatttagttggaatatctaagcagacataaatagtaacatcagggcacttcagaatcttcatccgatttatatcttcataggtccatgtttctattttcaaatgtcctttatttcaaagcagcatgtcactaaaaaaaagaaatgggcaatcatcattcctcaaaagatacgtgcatttggttgggcaaaatcatccaggctaccagttggataataaaagtcgaaatgtactatttgattttttcctatgtttccaagcaagtatttctcaccagacactgcccccatcatatcccctttcctcttctcgaattagctggttttcttagtgacaatctgaactcatgaggttgaattcaccattgcttacttcctggtagtccataaaaagtaccctagagaagtaagagcccacagggatagagtttgcacaataagattcctgaaagcctgcatgttcctgtaacattccatttacagaagactccagccaatccaatgtaatatgctctcacctgaacttctctatcaattagatttttagggaattacttttaactaaatttcaggctatttaggaaataagttgtacataagcaatacttattctaatgtgataaaattatctacacacagtcaaagcaacgtgtcaatctgtagaaactaaatcaaacagtttgtggtatggtctaaagataaagcaagtggtctaccctcttctcaagtggttctcctggcactgtgtaaaccagtccccaaaatttaatgtgtataaaaacttcctggagatcttgttaaaatgaagattttaactgattcaatagatctggggtagactccaagattctacgtttctaagaaggtcccaggcaatgctgatgctgcttgtacatggaccatattttgagtagcaaggatgtggtgacaggatcatatttatgggagaagagaggccagggttgttaagtgccttcagataaggatttcaacacacgtaaggccatgtttctgatgttataggcgaaggagatgcagcagatggtgaaattggaagccgagatggaccgcagaccagcaacagtagtatgaaactccaaaatgcaaactgaagcagcaaacccacaaagcatcaaaagactcactcacaaacttctgaacacaaactccatggatgaaagctgtttattttgtttcctttatgtgtaaacaagatgatatctgaaaccagagagacttggaatgtctgactgacttctatttaacagcttgagtattgcatttccttggccaaacaaaaatagctacaaatccacaaaaatttactattccagtaaggcagagtccaaccattgataatacaacttaaacatgtttgctataaaataccatcacaagtaaatgagcttggtgtgaacaactctcctttgtgatgccttaggacatgtttgaactgcagcaaaaaacaaaaacaaaaaacagtgcattagcaatttcatagcaagtgcatgcactaggaaaagaaaactctgtctacaagtttattagcagaagtggtggtctgctagacaaataattttgcaaaatttttctacatctaagttacctcatcagtaagtgccatgtctctaccatgccatcagaggctaatttcctgtaaaagttgtggaaattgttagaacaatagaaaaatagagcagtgtatgtgtgccaaaactcatcattactcaaaggagaactgtgttaggcacatttaagaaagtttacatctgacattgctttataggaattgtttctgcagattccggatattataattcacaccataaagattgtgaagtggttattggcaaacgtttgtaaatgtgaccatgtataaagtatttatactctttaattcacactgttagagagcaaaatcatctaagtattgccacatgacaagattagtaaacaggaatactagaactatgtttgcatgatacacaagcaccaataaagactaatccatacacagttaacctaatgccaaataaatactggttaaataaatgtatggcacagaatataatttgactatcaagacttttagcataatgaaaaaccctctctctatatatatatgtgtatatgaattatgtgggcattcttgatacttcaagttctagtttgaaaaaaatacataactaatttaattttacacaaaaatatttatgcagattttcagaatttcatatcaggaaatgacctttttatgtctgttaaatatcaaaacaatttgctacagtgttaatctgcatggtctttaagcctgctgtagttgagttgcagacagtgcatgaaaaagtattccgctgggaattgagccatgccaccaaagccaagaggagcgcatggaaacccggtagtctagaactaatcagattactgattttagggcacagcaccagatgaattgttgtatatgcttgtaaaaattgattctgtgtgttcctctgaacaaagcggagaaaatgatgataccatcaatattgaaattaaacttccaacttctctaataaaaaattaaaacacgcataacactcgtcaagagtatttgctcccaagacacattctagcaaatgttttgcctttttcatatacatgatatcatcgttattttcaaagggggcttattaataccctcagcatgtttttcacccaaatgatgcaaaacatgcagattctagttgacttcagttgtaatagacttgtttttctcctatttatgatttgaagtggattctgtaaaatatctcttgttcttagtttccttatctgtaaaacagtggagttagactacatatcttttggcactaacatctcatgaaaaattatggttaataaaatatcaccacatttggattgccaattttcaaagattctgagtggcttctcatcatcaaatcaaatcaaatccaagagctcaactatgctcaccattctgtaacacttgactgaattcatcacttgcctcctcttgtttctgctttggagaggtactactagtttttccatttttcttatttcttccctcttttcatcctcctaggccaccataagcatttatattttccagtgttatacatggaaccagtttgtttttctttgatccaggttacttttagtatttgagacatcataccattaatccattgtagtaggattaaaatgtacacacaactcaaatgtgcaacaaaagcatgtgttacctgctattgtcagttcatattgcactcaaaccttgcattatcccttattatgaagaaaaattaatagccaattaaagtaactcagtgtcttccagttttgtttttttttttttaaaaaaaaaaaaacattttcagggacatgtttagttacttgagagtcaaatcccctgttagagatccctccccattcaggagatcttgcttttttccccagatggcatctgggtatgagggaagctcacgtgtccacctggcaattggtaggagcatctggtttccccattgttggacaggtcctaactgcactctactgcagctttgcaaagtgggccttcccaccccagtggttcaaagtccctgctcagccaagtcctcattctggtatcagtttattccagcattcttctgggatatgcagaacttccaggtctttgggggctgtgcaggaaccaaagatgctgtctcaggtccatccatcaaaacactcctttggtcatttgtcagctactagggccatgtagtttcaataccacagagttttctaaatccaggaggcttgaaatgttccagagcaatgccccaaaaagcaagaagcaagcaagctttatactgccccaagactatctgggtttctacaacatcttgcttctcccaccatcagaactttttgttcttatttgggagccagggcacttgagtctcaattcttacctttattctttctttcagcccagaaaagatactcaactcccattcctgactgatggaatacccatacagtactatacttctcttttcctaagtaggttgctcttcacattttgggggaataaaaggcttcatggaaaaagagccaggttaccaagatagggaaacacatcagaaagtaccatctttcatcaaattgaaggcattattgattatagcttatactattattttatataccacacaaaatgaaacacactgccaattaaactataataccctatccggtgattgtcaaggcacatcccaatttcagagatgttaaaatgtgaaaaatacatacatcttggaatccatgaaatatgtagtattccaaaagtagtatacaaactcctcaaccctaagccttaaagaggagaggaaattttaaagataggacacaagagaatcattttatcacaaaactgaaactggttttgtggaactgaaaaatggttccaaaaaggaaccattctgcaactgagtttcaaatttagcaatgagcttcctggaaagcaattcaaaaaggggaagaaatctatctttcaccgtctttatttgaagaatcttgtttcctttagctgtttctttcaatcacatgcctttgatttctacttctttgcatgtaattctcgaatctataattctagcctttacctttctttcccgaagctctgactctccctctcagattgtcaatagttaaataggcggccatgtgcacattgtatgtgattaattaaaaaaaatagagactctttctccatctgtcctccccacatattttaatagtccataagcagtgctaaaccttgtggccatctttttctgctccatctcatttcctccagcacccaatctgttcataaaacttatgaattctgtcctgtcttggaaactttcttctccttccttataactcaacgttcagaattttaaacttgctgttcaatttctttgccctccaaatcccttttacacagagattaatcttcccaaatgacacctgcaatcatattaccattctgcttgtaaatgcagaattcctgtctactgcctaaagaataatgttgaaattagtgataacagcattcattttctgcccccaacatgcctactcattttagtcaatatgaatttatcactagtctctgttcacatacacatagtacacatcttttctagccacattacataataatgttctattaagtcttgaaaagcaacttccaaaaatgccatttctgaaaagttctctcattctcccaagcaagaagtaacctgccctttttcatttatccatttatactttaaaagctatttaagcataagacttttccaccagtcctgactaatttcttttcaggctttgttcagttgctcttcaaagaagaggtagtcactagatatcgaattactaagttattttctatgaagtaaaataaccatctgtatagactcttgggcaggaaatgcctttgaaaacttaatgaaaacctaaaagaagcttttttgcaaagtgtcttttcagttccaagaaaaataatttttctcaatacttattgttagcatacttttaaaacagtgcaatgatcacagtggccatcacggatctaacagtgtggatccatcaacattaagagattatggagagtgaagaaggaatacccctattattttattgctgaggttatcttagggacgcctcgttcaaaactctagcttctccttcttcatcacttgtgcaaatctaacagaaggccacacatttctacaactcttctttgatgcttgacgttgaacggaatctcaagcacatattttaattgcatctttaatatcataataaatctggtgatacctctgggatgaatatttatgagccatcttctttaataatattttgtggaaaacgttctgctccataggttagaataatgaaaaaatattaggcgggtggggggagtagggagatggttaaaatagcagcatcattgcttttacattaaaaaattggtgtctacactgtacttatcgtgataaatgatgctgtgccttttccactcctttcctctcctagcattaccttcttggaagttcagggtaaggggcaatttctgaagtacttcatcctggaaatttttgagtgtccagcacaataaaattaggaaaaatttccaaggaaggccaatttaatattgtatacctaatcacttgcatcaggactcaatagctttagatgaatcagaatgtaccaaaaacaaaacagacagaaaaaggatttgaccatctgtcatttcggaactttgatatcatataatgtgaatgaggaaatgttatactgatccatcaaaattgtttacccttttcaagcaattcatggattttctcaaaattcacatgcagcttttaacacttctatcttttgtttttccttagacaaatcttggtattttgttagggtgtggtatttgttacagcacagcatattgaaccctacagactgtacccctgtattatgaattcacttctactacatcaagtagccatataaatggttatattagacatttcttcagcattgaactaactttatttgttcatggattaaatatttattggaaaaccactcttaacctctctacccttgtaacccagttccaactcattctgctcaccacacaacagccagtaagtagagagacaaggagttggaacaaggaaggtgactttagttcaaagagccagaaaactgagaagatggtggactagcgtcctaaagtaccatctttggtcagtactcatttcagactctttatgttaagggtggtgggaagaggaggagttgggatcaagaggtgactgacaactgcagacatttgagtgccaacaagggtctgaggaggttggaaacttctttgtctttgtctttagccaagtcacaatgttcctataaatctttaacaaaacatagttgcttacatactctctctttaatcccagagtacaaatacaaaatggctatttttgtattttatctgtgtgcccaaattagcctagcctatgtgcaggaacaggaaaaggccccttaaacaaaaatggggtcagttatgttcttttagtgtttcactgttacacacttccaactttttctcttttcttttttttttttttgagacagagtgactctgtcgcccaggctggagtgcagtggcactgtgtcggctcactgcaacctccgtctcctgggttcaagtgatcctcctgcctcaacctcctgagtagctaggattacaggcacgcaccaccatgcctggctaatttttgtatttttagtggagatggggtttcaccatgttgaccaggctggtctcaaactcctgacctcaggcaatctgcctgcctcggcctcccaaagtactgggattacaggcatgagccaccgtatccagcccttcaacttgtttttttaccagtaatgcactctattttgaaaacttatcaacagttttagctttaggcgatattcataaggtagatgggtggcattaatggccccaattttttatgcacaaaattatttagaacagtgtataaaattaccctgaggctatgtgtatacagtgtaatgacacataaatatattttgtgtttggacttggatcccatccccaagatatcttattatgtatatgcagatattccaaaatctaaaaacaaccgaaatctgaaacacttctggtcccaagcattttggataaggaacactcaagctgtagcagcaaactggacacgagtggaggcacatttttgtttcttcactttaagtctctgacactgccgtgagagcacatgagaaggctggcctgctggcgggtatgcgcgacttgcagagagtggagttatctcgttcattttaccagctgacaatagatgtgtgagcctgcagctgagatcagccatgcctttcccagagccgtgggaacacccagccaacctataaccatatgagaaataggaaatggatgttgatttgagccactgagttttgatattttttgttatgtggccataactaactgatacagccaagctctgggaacaggaagatgataaaacagtctcatttcaaagtcccagagactgcagctttcaaaagccactggaatcacctacaggcacggaacatggttttctcagggagtgattccagctgctaagcctcatgtttgatgtctcaggtttctttttatttgtaaccttctgagtgtctgctgttcacttcctctaagctggactgctgatgatttcaactaactttgtcatttgacaaacacctcctcctcctcatcctcctccccctccttcttcttcctcctcctcctactccttcttcttctttcttctttgactttctccctccccctccctgtcttttcatttttttggtttgcttctaaaccttctctctttttcctttgggctccctggtcactcaaatgacctcctgccacagtcttggatgctaatattaagtagctgctttcggactggtctgtttgagttatgggtcctaaaattgcagataaacggggaattactttaccacattactttgtccaattgcataaaatatgggacacagattttttaaatgcaatagtctagcaatggaaatatatggtattgagtagttagactgattttaaagcaaaattcttaaaagaaaaatataggagcatatattaggtattaataagaggaatgtatttaaatatatttcgaataatttaaaagtatattatgctaaataatatatgctgaaataaaattcagcaaagtaaaaatattttctaaggcttggaagtctattaagctaaacgtctgccaatcttatgtcccagcaattacactctaagagtaatgagtgtaagccagacatggtgatacacacctgcagtccaagctacttgggaggctgacaatataattcaaggctatgcctcctctttaatcccagagtacaaagtagtgttctatgatcgcacccaagaatagctaccacaccccagcgtgcaatacgtaacgagaccccatcttaaaaaagaagaagaaaaaagaaaaaaagaaatgagtgtattgtgtatgtgttcatcaaaaagcatgttctttattcataataataaaaagctagaaacaaatcagatgtgtaccaataggaggatgcattgatgaaatgtagtatattcacagggtagaacacatgaaagtacttaccttatgattccacatacatgaagatcaaggaaaggcaatgctaatcttgaaggaagtcagagtagtggtcctctctgaaaaaaccttccaggatgatggtgatggtctatgcaagtggttctcgaagtgtgtatcaaggatcccttggcaagccattgtgtcccccaagagactgtcagagggtctgtgtagtcctcttgtttccaaatccgtctctgtgggaggccagatttcttcatatactgcagtgaaaatgacatatcacaacagaccgaatgaagaaaaagacattagaactcagatgacttctgtaaagccatacgttaaagacatttgcaacaatgtaaaacaatgccactcctcccaccaacttttagaaaatacagttatgtttcacaaaaaagttattgtaatagtacaatattggttatatattaacaagtgacagttttgttatttttattgaattgagaaatattttgaaattcctgtttcaaatttttaacatagtaatgcttacagatataattcacataaacaaactctgagttttttaaaaatattaagagtgttaaggaatccctgaggccaaagattttgagaactgctggtctataacttacgctgcgtggaggttacatgggtgtttatacaggtaaacattgatcagggaatcagggaatacacctaagatttgtgtcttccattgcatgtataattctcaattaaacccatgttttaaaaatatagcaatagatatatgttcatggtataaagagaatggggggaatgaaatataatttagtatacaaaaatacatatacacattcagaagaccaatagggatgatgccaaaataacaaagtttacttctgaagcctgttgcctagtggaaaccatcgaagaggcataattactcagaagagttttgagcataaaattaattcagcaggctttgctgctccacaaggaaactattctactcctctcaaaagcctgtgctgagtgagggaggcagagttggatgtggaatagactctctttattcttcccttctagcattttccatgccaactctccaagtctgcaacagaaaatgatttgaaacaatacaagagtaacttaagagagagcctctcacaagggacaggaaatgacacacccgagaaaaatagcagaaatatccacttaggaaaggtggcagctgtcagattaaagagaacccagatgatgaatttggcataaattctcccaaggggatctgcagtaacattaaatgatagtgcaaagcaaaatggaaatgggtgcaactgggatcagctgagatagatgaaactttctacttgtagaagtcagtgtggcaattaacagtctaatttgggatcccactgactacagcttagatcctaactccgctattcactaactgcggacttcaggcatcctacttaatgccgcagaattggagctttccatctgtagaatggatgtaatgccacctacctcatggtgctgctgtgagaatcaagttagcttttgaatcatttaatacatacagttccaggcatatcctaagtgttcaaagagtggtattttgaagatcatttgtggctgtgtttacctttttagctgagaactcctcttcatcttaatacatactctatagaaactcttttaggaattttaaaataatatcatgtcattatttttgcatgatatataaaggtatgattttaaatatttggaaaaatgtattagattgatatacttttaataattggttagcaaagttcatttcaataagatgtttaatagagtaatattcattagatacctctgaagagacaaattccaactttttcagtataccaagctttaaaggaagataatacattttatttattcatttatcagttaatagatatttgggttgtttctgatttggggctattatgaataatgttgctatgaacattcacatacaagtttctgtgtggatgtatgttttcttttctcttgggtatatacctaggagtagaattgctgggtcacatggtaactctacgtttaactctttgaagaactgccagactgtctcccaaagtggctgcgtcatttcacacttccaccagcagtgtatgaagattctgagttctctacatctttgtcaatacttattaccttttttattatagtcatcctagtgtgtgtgtcgttggtatcttattatggtttcgactttcacttccctgatccttaatggtattaagcatcttttcatgtgcttattggcaagttgtatatctttttttgtagaaatatatatctcagaacctttgctcattttaaattgtgttgtctttttattactgagttgtaggagttctttacacattttagatactagtcctttttcagatatataatttgcaaaatttttctctcattctgtgggttgccttttcaccttcttcatggtgtcttttgaaacacaaaaatttaaattttgatgaagttcaatttgtctatttttctcttttgttgcttgtgctcttggtgtcatatttaagaaaccattgcttcatccatggtcactgagatttatgcctgctttcttttaagagttgtatagtttaatctcttacatgtaggtctttgatccgttatgaattctttttatatctactgtaagggtgaatgccattcttttgtatatggatagctagttgtcccagaaccatttgtttttgtttttgtttttacataagttctagagatctaccgagcctctgttgaaaaaactttttctcaatcaaattgtcttggcatccttgtcaaatatcaatggattacaaatgtggaggtaaactcactgttaaactcccatcatgtccattggcattgcttaagatgtggatgaccttcacctagccaaatcccatgtgtctcttctacatgctcatcaaaacctctctgcaatgtttgacacagtcaaccattgccccattcttgaaacactcgcttgtctttgtcttcatgacctcaaactatgtggaggcacaaacttcccatgctccagtcccaccttatctaacaaaatgctttcttttcttcctttcacgagaaaagatggatctcaggaatcttttgtctatgatgcttccatcccatgacacccttccaaattcttccctactcacaatggaatgcagaatttatgacccagaccacgtctgttagccattagttctagacttttgtcttttacacacttattcttatcacctcatgtagattgcaagttcacattgtattcctcttctattactgcataacaaatgaccacagagttactgcaaacccacttactatctcacaattctgtaggtcaaaggtctgggcacagtgtggctggattctctgctcagaatctcacaggactaaagtgaagcgtcagctaggctgtgttctcatctgaggctcaggattcacttccaggttcaagtagttattttcagaattcagttattcgcagttatatgattcaaatccgcactcccatgctggctgttggttgatcaaggatagttctcagctcctagaagctgcctagttccttgtcacaaggccgtatatataggtcctctttacaacatgacagcctacccattcaaagccagcagcagaatctcttttagcattcctctttcaggaaggatctagcagttccttttaaggacccacttgattaggtcacccctaccaggataatctcccttttgattacctcaaagtcaactggtttgacttattatatctgctaaattaattacatctgcaaaattcccccatttcaggtaatgcaacctaatcaaggaagttaaatttatcagattcacggttctgcccatgcttcatgggaaggggttattcagagtacatgtacaaggagatgagagtattgggggccgtc

SEQ ID NO: 880 - DNA, 5640 bp, Homo sapiens
caggaatcctttgtgtttgaacccaactgcctcttcaaagtggatgagtttggcttctttctgacatggagaagtgaaggcaaggaaggacaggtgctagaatgctccctcatcaacagtattcggtcgggagccataccaaaggatcccaaaatcttggctgctcttgaagctgttggaaaatcagaaaatgatctggaagggcggatagtttgtgtctgcagtggcacagatctagtgaacattagttttacctacatggtggctgaaaatccagaagtaactaagcaatgggtagaaggcctgagatcaatcatacacaacttcagggccaacaacgtcagtccaatgacatgcctcaagaaacactggatgaaattggcatttatgaccaacacaaatggtaaaattccagttaggagtattactagaacatttgcatcgggaaaaacagaaaaggtgatctttcaagcactcaaggagttaggtcttcccagtggaaagaatgatgaaattgagcccacagcattttcttatgaaaagttctatgaactgacacaaaagatttgtcctcggacagatatagaagatcttttcaaaaaaatcaatggagacaaaactgattatttaacggtagaccaattagtgagctttctaaatgaacatcaacgagatcctcgattgaatgaaattttatttccattttatgatgccaaaagggcaatgcagatcattgagatgtatgaacctgatgaagatttgaagaaaaaaggccttatatcaagtgatgggttttgcagatatctgatgtcagatgaaaacgccccagtcttcctagatcgtttagaactttaccaagaaatggaccatcctctggctcactacttcatcagttcttcccataacacttatctcactggcagacagttcggcgggaagtcttcggtagaaatgtacagacaggttctcctggctggttgcagatgtgttgaacttgactgctgggatggaaaaggtgaagaccaagaaccaataataactcatggaaaagcaatgtgtacagatatcctttttaaggatgtaattcaagccatcaaggaaactgcatttgtcacatcagaatatcctgtaattctctcctttgaaaatcactgcagcaaatatcaacagtacaagatgtccaaatattgcgaagatctatttggggatctcctgttgaaacaagcacttgaatcacatccacttgaaccaggcagggctttgccatcccccaatgacctcaaaagaaaaatactcataaaaaacaagcggctgaaacctgaagttgaaaaaaaacagctggaagctttgagaagcatgatggaagctggagaatctgcctccccagcaaacatcttagaggacgataatgaagaggagatcgaaagtgctgaccaagaggaggaagctcaccccgaattcaaatttggaaatgaactttctgctgatgacttgggtcacaaggaagctgttgcaaatagcgtcaagaagggcctggtcactgtagaagatgagcaggcgtggatggcatcttataaatatgtaggtgctaccactaatatccatccatatttgtccacaatgatcaactacgcccagcctgtaaagtttcaaggtttccatgtggcagaagaacgcaatattcattataacatgtcttcttttaatgaatcagtcggtcttggctacttgaagacacatgcaattgaatttgtcaattataacaaacggcaaatgagtcgcatttaccccaagggaggccgagtcgattccagtaattacatgcctcagattttctggaacgctggctgccagatggtttcactgaactatcaaaccccagatttagcgatgcaattgaatcagggaaaatttgagtataatggatcgtgcgggtaccttctcaaaccagatttcatgaggcggcctgatcgaacatttgaccccttctctgaaactcctgttgatggtgttattgcagccacttgctcagtgcaggttatatcaggtcaattcttatcagataagaaaattggcacctacgtagaggtggatatgtatgggttgcccactgacaccatacgtaaggaattccgaactcgcatggttatgaataatggactcaatccagtttacaatgaagagtcatttgtatttcggaaggtgatcctgccggacctggctgtcttgagaatagctgtgtatgatgataacaacaagctgattggccagaggatcctcccgcttgatggcctccaagccggatatcgacacatttcccttcgaaatgagggaaataaaccattatcactaccaacaattttctgcaatattgttcttaaaacatatgtgcctgatggatttggagatatcgtggatgctttatcagatccaaagaaatttctctcaattacagaaaagagagcagaccaaatgagagctatgggcattgaaactagtgacatagccgacgtgcccagtgacacttccaaaaatgacaagaaaggaaaggccaacaccgccaaagcaaatgtgacccctcagagtagctctgagctcagaccaaccaccacggctgccctggcctctggtgtggaagccaagaaaggtattgaacttatccctcaagtaaggatagaagacttaaagcagatgaaggcttacttgaagcatttaaagaaacagcagaaggagctaaattctttaaagaagaaacatgcaaaggaacacagtaccatgcagaagttacactgcacgcaagttgacaaaattgtggcacagtatgacaaagagaagtcgactcatgagaaaatcctagagaaggcaatgaagaagaaggggggaagtaattgtctcgaaatgaaaaaagaaacagaaatcaaaattcagacgctgacatcagatcacaaatctaaggtcaaagagattgtagcacagcacacaaaggaatggtcagaaatgatcaatacccacagtgctgaggagcaagaaatccgagacctgcacctcagccagcagtgtgagctgctgaaaaagctactcatcaatgcccacgagcagcaaacccagcagctgaaactgtcccatgacagggaaagcaaggaaatgcgagcacaccaggctaagatttctatggaaaatagcaaagccatcagccaagataaatctatcaagaataaagcagaacgggaaaggcgagtcagggagttaaacagcagcaacactaaaaagtttctggaagaaagaaagagacttgccatgaagcagtccaaagaaatggatcagttgaaaaaagtccagcttgaacatctagaattcctagagaaacagaatgagcagcttttgaaatcctgtcatgcagtgtcccaaacgcaaggcgaaggagatgcagcagatggtgaaattggaagccgagatggaccgcagaccagcaacagtagtatgaaactccaaaatgcaaactgaagcagcaaacccacaaagcatcaaaagactcactcacaaacttctgaacacaaactccatggatgaaagctgtttattttgtttcctttatgtgtaaacaagatgatatctgaaaccagagagacttggaatgtctgactgacttctatttaacagcttgagtattgcatttccttggccaaacaaaaatagctacaaatccacaaaaatttactattccagtaaggcagagtccaaccattgataatacaacttaaacatgtttgctataaaataccatcacaagtaaatgagcttggtgtgaacaactctcctttgtgatgccttaggacatgtttgaactgcagcaaaaaacaaaaacaaaaaacagtgcattagcaatttcatagcaagtgcatgcactaggaaaagaaaactctgtctacaagtttattagcagaagtggtggtctgctagacaaataattttgcaaaatttttctacatctaagttacctcatcagtaagtgccatgtctctaccatgccatcagaggctaatttcctgtaaaagttgtggaaattgttagaacaatagaaaaatagagcagtgtatgtgtgccaaaactcatcattactcaaaggagaactgtgttaggcacatttaagaaagtttacatctgacattgctttataggaattgtttctgcagattccggatattataattcacaccataaagattgtgaagtggttattggcaaacgtttgtaaatgtgaccatgtataaagtatttatactctttaattcacactgttagagagcaaaatcatctaagtattgccacatgacaagattagtaaacaggaatactagaactatgtttgcatgatacacaagcaccaataaagactaatccatacacagttaacctaatgccaaataaatactggttaaataaatgtatggcacagaatataatttgactatcaagacttttagcataatgaaaaaccctctctctatatatatatgtgtatatgaattatgtgggcattcttgatacttcaagttctagtttgaaaaaaatacataactaatttaattttacacaaaaatatttatgcagattttcagaatttcatatcaggaaatgacctttttatgtctgttaaatatcaaaacaatttgctacagtgttaatctgcatggtctttaagcctgctgtagttgagttgcagacagtgcatgaaaaagtattccgctgggaattgagccatgccaccaaagccaagaggagcgcatggaaacccggtagtctagaactaatcagattactgattttagggcacagcaccagatgaattgttgtatatgcttgtaaaaattgattctgtgtgttcctctgaacaaagcggagaaaatgatgataccatcaatattgaaattaaacttccaacttctctaataaaaaattaaaacacgcataacactcgtcaagagtatttgctcccaagacacattctagcaaatgttttgcctttttcatatacatgatatcatcgttattttcaaagggggcttattaataccctcagcatgtttttcacccaaatgatgcaaaacatgcagattctagttgacttcagttgtaatagacttgtttttctcctatttatgatttgaagtggattctgtaaaatatctcttgttcttagtttccttatctgtaaaacagtggagttagactacatatcttttggcactaacatctcatgaaaaattatggttaataaaatatcaccacatttggattgccaattttcaaagattctgagtggcttctcatcatcaaatcaaatcaaatccaagagctcaactatgctcaccattctgtaacacttgactgaattcatcacttgcctcctcttgtttctgctttggagaggtactactagtttttccatttttcttatttcttccctcttttcatcctcctaggccaccataagcatttatattttccagtgttatacatggaaccagtttgtttttctttgatccaggttacttttagtatttgagacatcataccattaatccattgtagtaggattaaaatgtacacacaactcaaatgtgcaacaaaagcatgtgt

SEQ ID NO: 881 - protein, 1069 aa, Homo sapiens
MVAENPEVTKQWVEGLRSIIHNFRANNVSPMTCLKKHWMKLAFMTNTNGKIPVRSITRTFASGKTEKVIFQALKELGLPSGKNDEIEPTAFSYEKFYELTQKICPRTDIEDLFKKINGDKTDYLTVDQLVSFLNEHQRDPRLNEILFPFYDAKRAMQIIEMYEPDEDLKKKGLISSDGFCRYLMSDENAPVFLDRLELYQEMDHPLAHYFISSSHNTYLTGRQFGGKSSVEMYRQVLLAGCRCVELDCWDGKGEDQEPIITHGKAMCTDILFKDVIQAIKETAFVTSEYPVILSFENHCSKYQQYKMSKYCEDLFGDLLLKQALESHPLEPGRALPSPNDLKRKILIKNKRLKPEVEKKQLEALRSMMEAGESDANIDDNEEEIESADQEEEAHPEFKFGNELSADDLGHKEAVANSVKKGLVTVEDEQAWMASYKYVGATTNIHPYLSTMINYAQPVKFQGFHVAEERNIHYNMSSFNESVGLGYLKTHAIEFVNYNKRQMSRIYPKGGRVDSSNYMPQIFWNAGCQMVSLNYQTPDLAMQLNQGKFEYNGSCGYLLKPDFMRRPDRTFDPFSETPVDGVIAATCSVQVISGQFLSDKKIGTYVEVDMYGLPTDTIRKEFRTRMVMNNQPVYNEESFVFRKVILPDLAVLRIAVYDDNNKLIGQRILPLDGLQAGYRHLRNEGNKPLSLPTIFCNIVLKTYVPDGFGDIVDALSDPKKFLSITEKRADQMRAMGIETSDIADVPSDTSKNDKKGKANTAKANVTPQSSSELRPTTTAASGVEAKKGIELIPQVRIEDLKQMKAYLKHLKKQQKELNSLKKKHAKEHSTMQKLHCTQVDKIVAQYDKEKSTHEKIKAMKKKGGSNCLEMKKETEIKIQTLTSDHKSKVKEIVAQHTKEWSEMINTHSAEEQEIRDLHLSQQCELLKKLLINAHEQQTQQLKLSHDRESKEMRAHQAKISMENSKAISQDKSIKNKAERERRVRELNSSNTKKFLEERKRLAMKQSKEMDQLKKVQLEHLEFLEKQNEQLLKSCHAVSQTQGEGDAADGEIGSRDGPQTSNSSMKLQNAN

SEQ ID NO: 882 - DNA, 5498 bp, Homo sapiens
gtgtgtccctccagtgccgcttgccccttgttctcccaagcaccagggggacccctggtcttagattcaagttgcatcactagactaaccagctctgggaaccagagggacactggaggaactagtttgggaaatgaaaaacatctgcaatgagaggtaattttattctcctcttccttttaccctagtctcactctccatagtaggacctggatctttgcatcagagaaaacataatgaacaataactggaatgtgtgtttctttcttttctgccctagtattactagaacatttgcatcgggaaaaacagaaaaggtgatctttcaagcactcaaggagttaggtcttcccagtggaaagaatgatgaaattgagcccacagcattttcttatgaaaagttctatgaactgacacaaaagatttgtcctcggacagatatagaagatcttttcaaaaaaatcaatggagacaaaactgattatttaacggtagaccaattagtgagctttctaaatgaacatcaacgagatcctcgattgaatgaaattttatttccattttatgatgccaaaagggcaatgcagatcattgagatgtatgaacctgatgaagatttgaagaaaaaaggccttatatcaagtgatgggttttgcagatatctgatgtcagatgaaaacgccccagtcttcctagatcgtttagaactttaccaagaaatggaccatcctctggctcactacttcatcagttcttcccataacacttatctcactggcagacagttcggcgggaagtcttcggtagaaatgtacagacaggttctcctggctggttgcagatgtgttgaacttgactgctgggatggaaaaggtgaagaccaagaaccaataataactcatggaaaagcaatgtgtacagatatcctttttaaggatgtaattcaagccatcaaggaaactgcatttgtcacatcagaatatcctgtaattctctcctttgaaaatcactgcagcaaatatcaacagtacaagatgtccaaatattgcgaagatctatttggggatctcctgttgaaacaagcacttgaatcacatccacttgaaccaggcagggctttgccatcccccaatgacctcaaaagaaaaatactcataaaaaacaagcggctgaaacctgaagttgaaaaaaaacagctggaagctttgagaagcatgatggaagctggagaatctgcctccccagcaaacatcttagaggacgataatgaagaggagatcgaaagtgctgaccaagaggaggaagctcaccccgaattcaaatttggaaatgaactttctgctgatgacttgggtcacaaggaagctgttgcaaatagcgtcaagaagggcctggtcactgtagaagatgagcaggcgtggatggcatcttataaatatgtaggtgctaccactaatatccatccatatttgtccacaatgatcaactacgcccagcctgtaaagtttcaaggtttccatgtggcagaagaacgcaatattcattataacatgtcttcttttaatgaatcagtcggtcttggctacttgaagacacatgcaattgaatttgtcaattataacaaacggcaaatgagtcgcatttaccccaagggaggccgagtcgattccagtaattacatgcctcagattttctggaacgctggctgccagatggtttcactgaactatcaaaccccagatttagcgatgcaattgaatcagggaaaatttgagtataatggatcgtgcgggtaccttctcaaaccagatttcatgaggcggcctgatcgaacatttgaccccttctctgaaactcctgttgatggtgttattgcagccacttgctcagtgcaggttatatcaggtcaattcttatcagataagaaaattggcacctacgtagaggtggatatgtatgggttgcccactgacaccatacgtaaggaattccgaactcgcatggttatgaataatggactcaatccagtttacaatgaagagtcatttgtatttcggaaggtgatcctgccggacctggctgtcttgagaatagctgtgtatgatgataacaacaagctgattggccagaggatcctcccgcttgatggcctccaagccggatatcgacacatttcccttcgaaatgagggaaataaaccattatcactaccaacaattttctgcaatattgttcttaaaacatatgtgcctgatggatttggagatatcgtggatgctttatcagatccaaagaaatttctctcaattacagaaaagagagcagaccaaatgagagctatgggcattgaaactagtgacatagccgacgtgcccagtgacacttccaaaaatgacaagaaaggaaaggccaacaccgccaaagcaaatgtgacccctcagagtagctctgagctcagaccaaccaccacggctgccctggcctctggtgtggaagccaagaaaggtattgaacttatccctcaagtaaggatagaagacttaaagcagatgaaggcttacttgaagcatttaaagaaacagcagaaggagctaaattctttaaagaagaaacatgcaaaggaacacagtaccatgcagaagttacactgcacgcaagttgacaaaattgtggcacagtatgacaaagagaagtcgactcatgagaaaatcctagagaaggcaatgaagaagaaggggggaagtaattgtctcgaaatgaaaaaagaaacagaaatcaaaattcagacgctgacatcagatcacaaatctaaggtcaaagagattgtagcacagcacacaaaggaatggtcagaaatgatcaatacccacagtgctgaggagcaagaaatccgagacctgcacctcagccagcagtgtgagctgctgaaaaagctactcatcaatgcccacgagcagcaaacccagcagctgaaactgtcccatgacagggaaagcaaggaaatgcgagcacaccaggctaagatttctatggaaaatagcaaagccatcagccaagataaatctatcaagaataaagcagaacgggaaaggcgagtcagggagttaaacagcagcaacactaaaaagtttctggaagaaagaaagagacttgccatgaagcagtccaaagaaatggatcagttgaaaaaagtccagcttgaacatctagaattcctagagaaacagaatgagcagcttttgaaatcctgtcatgcagtgtcccaaacgcaaggcgaaggagatgcagcagatggtgaaattggaagccgagatggaccgcagaccagcaacagtagtatgaaactccaaaatgcaaactgaagcagcaaacccacaaagcatcaaaagactcactcacaaacttctgaacacaaactccatggatgaaagctgtttattttgtttcctttatgtgtaaacaagatgatatctgaaaccagagagacttggaatgtctgactgacttctatttaacagcttgagtattgcatttccttggccaaacaaaaatagctacaaatccacaaaaatttactattccagtaaggcagagtccaaccattgataatacaacttaaacatgtttgctataaaataccatcacaagtaaatgagcttggtgtgaacaactctcctttgtgatgccttaggacatgtttgaactgcagcaaaaaacaaaaacaaaaaacagtgcattagcaatttcatagcaagtgcatgcactaggaaaagaaaactctgtctacaagtttattagcagaagtggtggtctgctagacaaataattttgcaaaatttttctacatctaagttacctcatcagtaagtgccatgtctctaccatgccatcagaggctaatttcctgtaaaagttgtggaaattgttagaacaatagaaaaatagagcagtgtatgtgtgccaaaactcatcattactcaaaggagaactgtgttaggcacatttaagaaagtttacatctgacattgctttataggaattgtttctgcagattccggatattataattcacaccataaagattgtgaagtggttattggcaaacgtttgtaaatgtgaccatgtataaagtatttatactctttaattcacactgttagagagcaaaatcatctaagtattgccacatgacaagattagtaaacaggaatactagaactatgtttgcatgatacacaagcaccaataaagactaatccatacacagttaacctaatgccaaataaatactggttaaataaatgtatggcacagaatataatttgactatcaagacttttagcataatgaaaaaccctctctctatatatatatgtgtatatgaattatgtgggcattcttgatacttcaagttctagtttgaaaaaaatacataactaatttaattttacacaaaaatatttatgcagattttcagaatttcatatcaggaaatgacctttttatgtctgttaaatatcaaaacaatttgctacagtgttaatctgcatggtctttaagcctgctgtagttgagttgcagacagtgcatgaaaaagtattccgctgggaattgagccatgccaccaaagccaagaggagcgcatggaaacccggtagtctagaactaatcagattactgattttagggcacagcaccagatgaattgttgtatatgcttgtaaaaattgattctgtgtgttcctctgaacaaagcggagaaaatgatgataccatcaatattgaaattaaacttccaacttctctaataaaaaattaaaacacgcataacactcgtcaagagtatttgctcccaagacacattctagcaaatgttttgcctttttcatatacatgatatcatcgttattttcaaagggggcttattaataccctcagcatgtttttcacccaaatgatgcaaaacatgcagattctagttgacttcagttgtaatagacttgtttttctcctatttatgatttgaagtggattctgtaaaatatctcttgttcttagtttccttatctgtaaaacagtggagttagactacatatcttttggcactaacatctcatgaaaaattatggttaataaaatatcaccacatttggattgccaattttcaaagattctgagtggcttctcatcatcaaatcaaatcaaatccaagagctcaactatgctcaccattctgtaacacttgactgaattcatcacttgcctcctcttgtttctgctttggagaggtactactagtttttccatttttcttatttcttccctcttttcatcctcctaggccaccataagcatttatattttccagtgttatacatggaaccagtttgtttttctttgatccaggttacttttagtatttgagacatcataccattaatccattgtagtaggattaaaatgtacacacaactcaaatgtgcaacaaaagcatgtgt

SEQ ID NO: 883 - protein, 1029 aa, Homo sapiens
MNNNWNVCFFLFCPSITRTFASGKTEKVIFQALKELGLPSGKNDEIEPTAFSYEKFYELTQKICPRTDIEDLFKKINGDKTDYLTVDQLVSFLNEHQRDPRLNEILFPFYDAKRAMQIIEMYEPDEDLKKKGLISSDGFCRYLMSDENAPVFLDRLELYQEMDHPLAHYFISSSHNTYLTGRQFGGKSSVEMYRQVLLAGCRCVELDCWDGKGEDQEPIITHGKAMCTDILFKDVIQAIKETAFVTSEYPVILSFENHCSKYQQYKMSKYCEDLFGDLLLKQALESHPLEPGRALPSPNDLKRKILIKNKRLKPEVEKKQLEALRSMMEAGESDANIDDNEEEIESADQEEEAHPEFKFGNELSADDLGHKEAVANSVKKGLVTVEDEQAWMASYKYVGATTNIHPYLSTMINYAQPVKFQGFHVAEERNIHYNMSSFNESVGLGYLKTHAIEFVNYNKRQMSRIYPKGGRVDSSNYMPQIFWNAGCQMVSLNYQTPDLAMQLNQGKFEYNGSCGYLLKPDFMRRPDRTFDPFSETPVDGVIAATCSVQVISGQFLSDKKIGTYVEVDMYGLPTDTIRKEFRTRMVMNNQPVYNEESFVFRKVILPDLAVLRIAVYDDNNKLIGQRILPLDGLQAGYRHLRNEGNKPLSLPTIFCNIVLKTYVPDGFGDIVDALSDPKKFLSITEKRADQMRAMGIETSDIADVPSDTSKNDKKGKANTAKANVTPQSSSELRPTTTAASGVEAKKGIELIPQVRIEDLKQMKAYLKHLKKQQKELNSLKKKHAKEHSTMQKLHCTQVDKIVAQYDKEKSTHEKIKAMKKKGGSNCLEMKKETEIKIQTLTSDHKSKVKEIVAQHTKEWSEMINTHSAEEQEIRDLHLSQQCELLKKLLINAHEQQTQQLKLSHDRESKEMRAHQAKISMENSKAISQDKSIKNKAERERRVRELNSSNTKKFLEERKRLAMKQSKEMDQLKKVQLEHLEFLEKQNEQLLKSCHAVSQTQGEGDAADGEIGSRDGPQTSNSSMKLQNAN

SEQ ID NO: 884 - DNA, 1282 bp, Homo sapiens
tcagcaatgggtagaaggcctgagatcaatcatacacaacttcagggccaacaacgtcagtccaatgacatgcctcaagaaacactggatgaaattggcatttatgaccaacacaaatggtaaaattccagttaggagtattactagaacatttgcatcgggaaaaacagaaaaggtgatctttcaagcactcaaggagttaggtcttcccagtggaaagaatgatgaaattgagcccacagcattttcttatgaaaagttctatgaactgacacaaaagatttgtcctcggacagatatagaagatcttttcaaaaaaatcaatggagacaaaactgattatttaacggtagaccaattagtgagctttctaaatgaacatcaacgagatcctcgattgaatgaaattttatttccattttatgatgccaaaagggcaatgcagatcattgagatgtatgaacctgatgaagatttgaagaaaaaaggccttatatcaagtgatgggttttgcagatatctgatgtcagatgaaaacgccccagtcttcctagatcgtttagaactttaccaagaaatggaccatcctctggctcactacttcatcagttcttcccataacacttatctcactggcagacagttcggcgggaagtcttcggtagaaatgtacagacaggttctcctggctggttgcagatgtgttgaacttgactgctgggatggaaaaggtgaagaccaagaaccaataataactcatggaaaagcaatgtgtacagatatcctttttaaggatgtaattcaagccatcaaggaaactgcatttgtcacatcagaatatcctgtaattctctcctttgaaaatcactgcagcaaatatcaacagtacaagatgtccaaatattgcgaagatctatttggggatctcctgttgaaacaagcacttgaatcacatccacttgaaccaggcagggctttgccatcccccaatgacctcaaaagaaaaatactcataaaaaacaagcggctgaaacctgaagttgaaaaaaaacagctggaagctttgagaagcatgatggaagctggagaatctgcctccccagcaaacatcttagaggacgataatgaagaggagatcgaaagtgctgaccaagaggaggaagctcaccccgaattcaaatttggaaatgaactttctgctgatgacttgggtcacaaggaagctgttgcaaatagcgtcaagaaggcttcagatgaccttgaacatgaaaacaacaaaaag

SEQ ID NO: 885 - protein, 402 aa, Homo sapiens
MTCLKKHWMKLAFMTNTNGKIPVRSITRTFASGKTEKVIFQALKELGLPSGKNDEIEPTAFSYEKFYELTQKICPRTDIEDLFKKINGDKTDYLTVDQLVSFLNEHQRDPRLNEILFPFYDAKRAMQIIEMYEPDEDLKKKGLISSDGFCRYLMSDENAPVFLDRLELYQEMDHPLAHYFISSSHNTYLTGRQFGGKSSVEMYRQVLLAGCRCVELDCWDGKGEDQEPIITHGKAMCTDILFKDVIQAIKETAFVTSEYPVILSFENHCSKYQQYKMSKYCEDLFGDLLLKQALESHPLEPGRALPSPNDLKRKILIKNKRLKPEVEKKQLEALRSMMEAGESDANIDDNEEEIESADQEEEAHPEFKFGNELSADDLGHKEAVANSVKKASDDLEHENNKK

SEQ ID NO: 886 - DNA, 5356 bp, Homo sapiens
tcagcaatgggtagaaggcctgagatcaatcatacacaacttcagggccaacaacgtcagtccaatgacatgcctcaagaaacactggatgaaattggcatttatgaccaacacaaatggtaaaattccagttaggagtattactagaacatttgcatcgggaaaaacagaaaaggtgatctttcaagcactcaaggagttaggtcttcccagtggaaagaatgatgaaattgagcccacagcattttcttatgaaaagttctatgaactgacacaaaagatttgtcctcggacagatatagaagatcttttcaaaaaaatcaatggagacaaaactgattatttaacggtagaccaattagtgagctttctaaatgaacatcaacgagatcctcgattgaatgaaattttatttccattttatgatgccaaaagggcaatgcagatcattgagatgtatgaacctgatgaagatttgaagaaaaaaggccttatatcaagtgatgggttttgcagatatctgatgtcagatgaaaacgccccagtcttcctagatcgtttagaactttaccaagaaatggaccatcctctggctcactacttcatcagttcttcccataacacttatctcactggcagacagttcggcgggaagtcttcggtagaaatgtacagacaggttctcctggctggttgcagatgtgttgaacttgactgctgggatggaaaaggtgaagaccaagaaccaataataactcatggaaaagcaatgtgtacagatatcctttttaaggatgtaattcaagccatcaaggaaactgcatttgtcacatcagaatatcctgtaattctctcctttgaaaatcactgcagcaaatatcaacagtacaagatgtccaaatattgcgaagatctatttggggatctcctgttgaaacaagcacttgaatcacatccacttgaaccaggcagggctttgccatcccccaatgacctcaaaagaaaaatactcataaaaaacaagcggctgaaacctgaagttgaaaaaaaacagctggaagctttgagaagcatgatggaagctggagaatctgcctccccagcaaacatcttagaggacgataatgaagaggagatcgaaagtgctgaccaagaggaggaagctcaccccgaattcaaatttggaaatgaactttctgctgatgacttgggtcacaaggaagctgttgcaaatagcgtcaagaagggcctggtcactgtagaagatgagcaggcgtggatggcatcttataaatatgtaggtgctaccactaatatccatccatatttgtccacaatgatcaactacgcccagcctgtaaagtttcaaggtttccatgtggcagaagaacgcaatattcattataacatgtcttcttttaatgaatcagtcggtcttggctacttgaagacacatgcaattgaatttgtcaattataacaaacggcaaatgagtcgcatttaccccaagggaggccgagtcgattccagtaattacatgcctcagattttctggaacgctggctgccagatggtttcactgaactatcaaaccccagatttagcgatgcaattgaatcagggaaaatttgagtataatggatcgtgcgggtaccttctcaaaccagatttcatgaggcggcctgatcgaacatttgaccccttctctgaaactcctgttgatggtgttattgcagccacttgctcagtgcaggttatatcaggtcaattcttatcagataagaaaattggcacctacgtagaggtggatatgtatgggttgcccactgacaccatacgtaaggaattccgaactcgcatggttatgaataatggactcaatccagtttacaatgaagagtcatttgtatttcggaaggtgatcctgccggacctggctgtcttgagaatagctgtgtatgatgataacaacaagctgattggccagaggatcctcccgcttgatggcctccaagccggatatcgacacatttcccttcgaaatgagggaaataaaccattatcactaccaacaattttctgcaatattgttcttaaaacatatgtgcctgatggatttggagatatcgtggatgctttatcagatccaaagaaatttctctcaattacagaaaagagagcagaccaaatgagagctatgggcattgaaactagtgacatagccgacgtgcccagtgacacttccaaaaatgacaagaaaggaaaggccaacaccgccaaagcaaatgtgacccctcagagtagctctgagctcagaccaaccaccacggctgccctggcctctggtgtggaagccaagaaaggtattgaacttatccctcaagtaaggatagaagacttaaagcagatgaaggcttacttgaagcatttaaagaaacagcagaaggagctaaattctttaaagaagaaacatgcaaaggaacacagtaccatgcagaagttacactgcacgcaagttgacaaaattgtggcacagtatgacaaagagaagtcgactcatgagaaaatcctagagaaggcaatgaagaagaaggggggaagtaattgtctcgaaatgaaaaaagaaacagaaatcaaaattcagacgctgacatcagatcacaaatctaaggtcaaagagattgtagcacagcacacaaaggaatggtcagaaatgatcaatacccacagtgctgaggagcaagaaatccgagacctgcacctcagccagcagtgtgagctgctgaaaaagctactcatcaatgcccacgagcagcaaacccagcagctgaaactgtcccatgacagggaaagcaaggaaatgcgagcacaccaggctaagatttctatggaaaatagcaaagccatcagccaagataaatctatcaagaataaagcagaacgggaaaggcgagtcagggagttaaacagcagcaacactaaaaagtttctggaagaaagaaagagacttgccatgaagcagtccaaagaaatggatcagttgaaaaaagtccagcttgaacatctagaattcctagagaaacagaatgagcagcttttgaaatcctgtcatgcagtgtcccaaacgcaaggcgaaggagatgcagcagatggtgaaattggaagccgagatggaccgcagaccagcaacagtagtatgaaactccaaaatgcaaactgaagcagcaaacccacaaagcatcaaaagactcactcacaaacttctgaacacaaactccatggatgaaagctgtttattttgtttcctttatgtgtaaacaagatgatatctgaaaccagagagacttggaatgtctgactgacttctatttaacagcttgagtattgcatttccttggccaaacaaaaatagctacaaatccacaaaaatttactattccagtaaggcagagtccaaccattgataatacaacttaaacatgtttgctataaaataccatcacaagtaaatgagcttggtgtgaacaactctcctttgtgatgccttaggacatgtttgaactgcagcaaaaaacaaaaacaaaaaacagtgcattagcaatttcatagcaagtgcatgcactaggaaaagaaaactctgtctacaagtttattagcagaagtggtggtctgctagacaaataattttgcaaaatttttctacatctaagttacctcatcagtaagtgccatgtctctaccatgccatcagaggctaatttcctgtaaaagttgtggaaattgttagaacaatagaaaaatagagcagtgtatgtgtgccaaaactcatcattactcaaaggagaactgtgttaggcacatttaagaaagtttacatctgacattgctttataggaattgtttctgcagattccggatattataattcacaccataaagattgtgaagtggttattggcaaacgtttgtaaatgtgaccatgtataaagtatttatactctttaattcacactgttagagagcaaaatcatctaagtattgccacatgacaagattagtaaacaggaatactagaactatgtttgcatgatacacaagcaccaataaagactaatccatacacagttaacctaatgccaaataaatactggttaaataaatgtatggcacagaatataatttgactatcaagacttttagcataatgaaaaaccctctctctatatatatatgtgtatatgaattatgtgggcattcttgatacttcaagttctagtttgaaaaaaatacataactaatttaattttacacaaaaatatttatgcagattttcagaatttcatatcaggaaatgacctttttatgtctgttaaatatcaaaacaatttgctacagtgttaatctgcatggtctttaagcctgctgtagttgagttgcagacagtgcatgaaaaagtattccgctgggaattgagccatgccaccaaagccaagaggagcgcatggaaacccggtagtctagaactaatcagattactgattttagggcacagcaccagatgaattgttgtatatgcttgtaaaaattgattctgtgtgttcctctgaacaaagcggagaaaatgatgataccatcaatattgaaattaaacttccaacttctctaataaaaaattaaaacacgcataacactcgtcaagagtatttgctcccaagacacattctagcaaatgttttgcctttttcatatacatgatatcatcgttattttcaaagggggcttattaataccctcagcatgtttttcacccaaatgatgcaaaacatgcagattctagttgacttcagttgtaatagacttgtttttctcctatttatgatttgaagtggattctgtaaaatatctcttgttcttagtttccttatctgtaaaacagtggagttagactacatatcttttggcactaacatctcatgaaaaattatggttaataaaatatcaccacatttggattgccaattttcaaagattctgagtggcttctcatcatcaaatcaaatcaaatccaagagctcaactatgctcaccattctgtaacacttgactgaattcatcacttgcctcctcttgtttctgctttggagaggtactactagtttttccatttttcttatttcttccctcttttcatcctcctaggccaccataagcatttatattttccagtgttatacatggaaccagtttgtttttctttgatccaggttacttttagtatttgagacatcataccattaatccattgtagtaggattaaaatgtacacacaactcaaatgtgcaacaaaagcatgtgt

SEQ ID NO: 887 - protein, 1039 aa, Homo sapiens
MTCLKKHWMKLAFMTNTNGKIPVRSITRTFASGKTEKVIFQALKELGLPSGKNDEIEPTAFSYEKFYELTQKICPRTDIEDLFKKINGDKTDYLTVDQLVSFLNEHQRDPRLNEILFPFYDAKRAMQIIEMYEPDEDLKKKGLISSDGFCRYLMSDENAPVFLDRLELYQEMDHPLAHYFISSSHNTYLTGRQFGGKSSVEMYRQVLLAGCRCVELDCWDGKGEDQEPIITHGKAMCTDILFKDVIQAIKETAFVTSEYPVILSFENHCSKYQQYKMSKYCEDLFGDLLLKQALESHPLEPGRALPSPNDLKRKILIKNKRLKPEVEKKQLEALRSMMEAGESDANIDDNEEEIESADQEEEAHPEFKFGNELSADDLGHKEAVANSVKKGLVTVEDEQAWMASYKYVGATTNIHPYLSTMINYAQPVKFQGFHVAEERNIHYNMSSFNESVGLGYLKTHAIEFVNYNKRQMSRIYPKGGRVDSSNYMPQIFWNAGCQMVSLNYQTPDLAMQLNQGKFEYNGSCGYLLKPDFMRRPDRTFDPFSETPVDGVIAATCSVQVISGQFLSDKKIGTYVEVDMYGLPTDTIRKEFRTRMVMNNQPVYNEESFVFRKVILPDLAVLRIAVYDDNNKLIGQRILPLDGLQAGYRHLRNEGNKPLSLPTIFCNIVLKTYVPDGFGDIVDALSDPKKFLSITEKRADQMRAMGIETSDIADVPSDTSKNDKKGKANTAKANVTPQSSSELRPTTTAASGVEAKKGIELIPQVRIEDLKQMKAYLKHLKKQQKELNSLKKKHAKEHSTMQKLHCTQVDKIVAQYDKEKSTHEKIKAMKKKGGSNCLEMKKETEIKIQTLTSDHKSKVKEIVAQHTKEWSEMINTHSAEEQEIRDLHLSQQCELLKKLLINAHEQQTQQLKLSHDRESKEMRAHQAKISMENSKAISQDKSIKNKAERERRVRELNSSNTKKFLEERKRLAMKQSKEMDQLKKVQLEHLEFLEKQNEQLLKSCHAVSQTQGEGDAADGEIGSRDGPQTSNSSMKLQNAN

SEQ ID NO: 888 - DNA, 387 bp, Homo sapiens
atggggactcaggctttgggaacgctggcccttagcctctggctcctcctgctgctctgctggctctggccttggtccttaggtctggactggacagttggtggcccaacaatgggtagaaggcctgagatcaatcatacacaacttcagggccaacaacgtcagtccaatgacatgcctcaagaaacaattgagttttctgatagacagctctgcatgtctggagccatcgctgagtgctggggtaattctatcctctgctgcataaaactgagaaatgaggagtgtgaccaagagacgcacttgccaatgcacctgaaaaagaagcctcagccccaagtgcagtgctccttgtttagcacaccgtcagggatccaaagttacctc

SEQ ID NO: 889 - protein, 129 aa, Homo sapiens [sequence omitted]

SEQ ID NO: 890 - DNA, 594 bp, Homo sapiens
atggagcagctacagccgtgccctctggctcctcatgtggaatgtgagctgagaggcccagtgtcctttatctcctgggatcttaaagcagataggagaggcacaaatggaatgaacattctatatccttccaagcaagagaccaagctcatgagggaatcctttgtgtttgaacccaactgcctcttcaaagtggatgagtttggcttctttctgacatggagaagtgaaggcaaggaaggacaggtgctagaatgctccctcatcaacagtattcggtcgggagccataccaaaggatcccaaaatcttggctgctcttgaagctgttggaaaatcagaaaatgatctggaagggcggatagtttgtgtctgcagtggcacagatctagtgaacattagttttacctacatggtggctgaaaatccagaagtaactaagaatacaactagcttggaaggattttggtgtctagcaaagttgaaggcagttcagatgtctttcattaataagttacagctggcactgcacagcaaactgaaatcacagtcactagacgtaagatggaaatgcaggcctcattcaacatctcca

SEQ ID NO: 891 - protein, 198 aa, Homo sapiens
MEQLQPCPLAPHVECELRGPVSFISWDLKADRRGTNGMNILYPSKQETKLMRESFVFEPNCLFKVDEFGFFLTWRSEGKEGQVLECSLINSIRSGAIPKDPKILAALEAVGKSENDLEGRIVCVCSGTDLVNISFTYMVAENPEVTKNTTSLEGFWCLAKLKAVQMSFINKLQLALHSKLKSQSLDVRWKCRPHSTSP

SEQ ID NO: 892 - DNA, 5603 bp, Homo sapiens
caggaatcctttgtgtttgaacccaactgcctcttcaaagtggatgagtttggcttctttctgacatggagaagtgaaggcaaggaaggacaggtgctagaatgctccctcatcaacagtattcggtcgggagccataccaaaggatcccaaaatcttggctgctcttgaagctgttggaaaatcagaaaatgatctggaagggcggatagtttgtgtctgcagtggcacagatctagtgaacattagttttacctacatggtggctgaaaatccagaagtaactaagcaatgggtagaaggcctgagatcaatcatacacaacttcagggccaacaacgtcagtccaatgacatgcctcaagaaacactggatgaaattggcatttatgaccaacacaaatggtaaaattccagttaggagtattactagaacatttgcatcgggaaaaacagaaaaggtgatctttcaagcactcaaggagttaggtcttcccagtggaaagaatgatgaaattgagcccacagcattttcttatgaaaagttctatgaactgacacaaaagatttgtcctcggacagatatagaagatcttttcaaaaaaatcaatggagacaaaactgattatttaacggtagaccaattagtgagctttctaaatgaacatcaacgagatcctcgattgaatgaaattttatttccattttatgatgccaaaagggcaatgcagatcattgagatgtatgaacctgatgaagatttgaagaaaaaaggccttatatcaagtgatgggttttgcagatatctgatgtcagatgaaaacgccccagtcttcctagatcgtttagaactttaccaagaaatggaccatcctctggctcactacttcatcagttcttcccataacacttatctcactggcagacagttcggcgggaagtcttcggtagaaatgtacagacaggttctcctggctggttgcagatgtgttgaacttgactgctgggatggaaaaggtgaagaccaagaaccaataataactcatggaaaagcaatgtgtacagatatcctttttaaggatgtaattcaagccatcaaggaaactgcatttgtcacatcagaatatcctgtaattctctcctttgaaaatcactgcagcaaatatcaacagtacaagatgtccaaatattgcgaagatctatttggggatctcctgttgaaacaagcacttgaatcacatccacttgaaccaggcagggctttgccatcccccaatgacctcaaaagaaaaatactcataaaaaacaagcggctgaaacctgaagttgaaaaaaaacagctggaagctttgagaagcatgatggaagctggagaatctgcctccccagcaaacatcttagaggacgataatgaagaggagatcgaaagtgctgaccaagaggaggaagctcaccccgaattcaaatttggaaatgaactttctgctgatgacttgggtcacaaggaagctgttgcaaatagcgtcaagaagggcctggtcactgtagaagatgagcaggcgtggatggcatcttataaatatgtaggtgctaccactaatatccatccatatttgtccacaatgatcaactacgcccagcctgtaaagtttcaaggtttccatgtggcagaagaacgcaatattcattataacatgtcttcttttaatgaatcagtcggtcttggctacttgaagacacatgcaattgaatttgtcaattataacaaacggcaaatgagtcgcatttaccccaagggaggccgagtcgattccagtaattacatgcctcagattttctggaacgctggctgccagatggtttcactgaactatcaaaccccagatttagcgatgcaattgaatcagggaaaatttgagtataatggatcgtgcgggtaccttctcaaaccagatttcatgaggcggcctgatcgaacatttgaccccttctctgaaactcctgttgatggtgttattgcagccacttgctcagtgcaggttatatcaggtcaattcttatcagataagaaaattggcacctacgtagaggtggatatgtatgggttgcccactgacaccatacgtaaggaattccgaactcgcatggttatgaataatggactcaatccagtttacaatgaagagtcatttgtatttcggaaggtgatcctgccggacctggctgtcttgagaatagctgtgtatgatgataacaacaagctgattggccagaggatcctcccgcttgatggcctccaagccggatatcgacacatttcccttcgaaatgagggaaataaaccattatcactaccaacaattttctgcaatattgttcttaaaacatatgtgcctgatggatttggagatatcgtggatgctttatcagatccaaagaaatttctctcaattacagaaaagagagcagaccaaatgagagctatgggcattgaaactagtgacatagccgacgtgcccagtgacacttccaaaaatgacaagaaaggaaaggccaacaccgccaaagcaaatgtgacccctcagagtagctctgagctcagaccaaccaccacggctgccctggcctctggtgtggaagccaagaaaggtattgaacttatccctcaagtaaggatagaagacttaaagcagatgaaggcttacttgaagcatttaaagaaacagcagaaggagctaaattctttaaagaagaaacatgcaaaggaacacagtaccatgcagaagttacactgcacgcaagttgacaaaattgtggcacagtatgacaaagagaagtcgactcatgagaaaatcctagagaaggcaatgaagaagaaggggggaagtaattgtctcgaaatgaaaaaagaaacagaaatcaaaattcagacgctgacatcagatcacaaatctaaggtcaaagagattgtagcacagcacacaaaggaatggtcagaaatgatcaatacccacagtgctgaggagcaagaaatccgagacctgcacctcagccagcagtgtgagctgctgaaaaagctactcatcaatgcccacgagcagcaaacccagcagctgaaactgtcccatgacagggaaagcaaggaaatgcgagcacaccaggctaagatttctatggaaaatagcaaagccatcagccaagataaatctatcaagaataaagcagaacgggaaaggcgagtcagggagttaaacagcagcaacactaaaaagtttctggaagaaagaaagagacttgccatgaagcagtccaaagaaatggatcagttgaaaaaagtccagcttgaacatctagaattcctagagaaacagaatgagcaggcgaaggagatgcagcagatggtgaaattggaagccgagatggaccgcagaccagcaacagtagtatgaaactccaaaatgcaaactgaagcagcaaacccacaaagcatcaaaagactcactcacaaacttctgaacacaaactccatggatgaaagctgtttattttgtttcctttatgtgtaaacaagatgatatctgaaaccagagagacttggaatgtctgactgacttctatttaacagcttgagtattgcatttccttggccaaacaaaaatagctacaaatccacaaaaatttactattccagtaaggcagagtccaaccattgataatacaacttaaacatgtttgctataaaataccatcacaagtaaatgagcttggtgtgaacaactctcctttgtgatgccttaggacatgtttgaactgcagcaaaaaacaaaaacaaaaaacagtgcattagcaatttcatagcaagtgcatgcactaggaaaagaaaactctgtctacaagtttattagcagaagtggtggtctgctagacaaataattttgcaaaatttttctacatctaagttacctcatcagtaagtgccatgtctctaccatgccatcagaggctaatttcctgtaaaagttgtggaaattgttagaacaatagaaaaatagagcagtgtatgtgtgccaaaactcatcattactcaaaggagaactgtgttaggcacatttaagaaagtttacatctgacattgctttataggaattgtttctgcagattccggatattataattcacaccataaagattgtgaagtggttattggcaaacgtttgtaaatgtgaccatgtataaagtatttatactctttaattcacactgttagagagcaaaatcatctaagtattgccacatgacaagattagtaaacaggaatactagaactatgtttgcatgatacacaagcaccaataaagactaatccatacacagttaacctaatgccaaataaatactggttaaataaatgtatggcacagaatataatttgactatcaagacttttagcataatgaaaaaccctctctctatatatatatgtgtatatgaattatgtgggcattcttgatacttcaagttctagtttgaaaaaaatacataactaatttaattttacacaaaaatatttatgcagattttcagaatttcatatcaggaaatgacctttttatgtctgttaaatatcaaaacaatttgctacagtgttaatctgcatggtctttaagcctgctgtagttgagttgcagacagtgcatgaaaaagtattccgctgggaattgagccatgccaccaaagccaagaggagcgcatggaaacccggtagtctagaactaatcagattactgattttagggcacagcaccagatgaattgttgtatatgcttgtaaaaattgattctgtgtgttcctctgaacaaagcggagaaaatgatgataccatcaatattgaaattaaacttccaacttctctaataaaaaattaaaacacgcataacactcgtcaagagtatttgctcccaagacacattctagcaaatgttttgcctttttcatatacatgatatcatcgttattttcaaagggggcttattaataccctcagcatgtttttcacccaaatgatgcaaaacatgcagattctagttgacttcagttgtaatagacttgtttttctcctatttatgatttgaagtggattctgtaaaatatctcttgttcttagtttccttatctgtaaaacagtggagttagactacatatcttttggcactaacatctcatgaaaaattatggttaataaaatatcaccacatttggattgccaattttcaaagattctgagtggcttctcatcatcaaatcaaatcaaatccaagagctcaactatgctcaccattctgtaacacttgactgaattcatcacttgcctcctcttgtttctgctttggagaggtactactagtttttccatttttcttatttcttccctcttttcatcctcctaggccaccataagcatttatattttccagtgttatacatggaaccagtttgtttttctttgatccaggttacttttagtatttgagacatcataccattaatccattgtagtaggattaaaatgtacacacaactcaaatgtgcaacaaaagcatgtgt

SEQ ID NO: 893 - protein, 1050 aa, Homo sapiens
MVAENPEVTKQWVEGLRSIIHNFRANNVSPMTCLKKHWMKLAFMTNTNGKIPVRSITRTFASGKTEKVIFQALKELGLPSGKNDEIEPTAFSYEKFYELTQKICPRTDIEDLFKKINGDKTDYLTVDQLVSFLNEHQRDPRLNEILFPFYDAKRAMQIIEMYEPDEDLKKKGLISSDGFCRYLMSDENAPVFLDRLELYQEMDHPLAHYFISSSHNTYLTGRQFGGKSSVEMYRQVLLAGCRCVELDCWDGKGEDQEPIITHGKAMCTDILFKDVIQAIKETAFVTSEYPVILSFENHCSKYQQYKMSKYCEDLFGDLLLKQALESHPLEPGRALPSPNDLKRKILIKNKRLKPEVEKKQLEALRSMMEAGESDANIDDNEEEIESADQEEEAHPEFKFGNELSADDLGHKEAVANSVKKGLVTVEDEQAWMASYKYVGATTNIHPYLSTMINYAQPVKFQGFHVAEERNIHYNMSSFNESVGLGYLKTHAIEFVNYNKRQMSRIYPKGGRVDSSNYMPQIFWNAGCQMVSLNYQTPDLAMQLNQGKFEYNGSCGYLLKPDFMRRPDRTFDPFSETPVDGVIAATCSVQVISGQFLSDKKIGTYVEVDMYGLPTDTIRKEFRTRMVMNNQPVYNEESFVFRKVILPDLAVLRIAVYDDNNKLIGQRILPLDGLQAGYRHLRNEGNKPLSLPTIFCNIVLKTYVPDGFGDIVDALSDPKKFLSITEKRADQMRAMGIETSDIADVPSDTSKNDKKGKANTAKANVTPQSSSELRPTTTAASGVEAKKGIELIPQVRIEDLKQMKAYLKHLKKQQKELNSLKKKHAKEHSTMQKLHCTQVDKIVAQYDKEKSTHEKIKAMKKKGGSNCLEMKKETEIKIQTLTSDHKSKVKEIVAQHTKEWSEMINTHSAEEQEIRDLHLSQQCELLKKLLINAHEQQTQQLKLSHDRESKEMRAHQAKISMENSKAISQDKSIKNKAERERRVRELNSSNTKKFLEERKRLAMKQSKEMDQLKKVQLEHLEFLEKQNEQAKEMQQMVKLEAEMDRRPATVV

SEQ ID NO: 894 - DNA, 5461 bp, Homo sapiens
gtgtgtccctccagtgccgcttgccccttgttctcccaagcaccagggggacccctggtcttagattcaagttgcatcactagactaaccagctctgggaaccagagggacactggaggaactagtttgggaaatgaaaaacatctgcaatgagaggtaattttattctcctcttccttttaccctagtctcactctccatagtaggacctggatctttgcatcagagaaaacataatgaacaataactggaatgtgtgtttctttcttttctgccctagtattactagaacatttgcatcgggaaaaacagaaaaggtgatctttcaagcactcaaggagttaggtcttcccagtggaaagaatgatgaaattgagcccacagcattttcttatgaaaagttctatgaactgacacaaaagatttgtcctcggacagatatagaagatcttttcaaaaaaatcaatggagacaaaactgattatttaacggtagaccaattagtgagctttctaaatgaacatcaacgagatcctcgattgaatgaaattttatttccattttatgatgccaaaagggcaatgcagatcattgagatgtatgaacctgatgaagatttgaagaaaaaaggccttatatcaagtgatgggttttgcagatatctgatgtcagatgaaaacgccccagtcttcctagatcgtttagaactttaccaagaaatggaccatcctctggctcactacttcatcagttcttcccataacacttatctcactggcagacagttcggcgggaagtcttcggtagaaatgtacagacaggttctcctggctggttgcagatgtgttgaacttgactgctgggatggaaaaggtgaagaccaagaaccaataataactcatggaaaagcaatgtgtacagatatcctttttaaggatgtaattcaagccatcaaggaaactgcatttgtcacatcagaatatcctgtaattctctcctttgaaaatcactgcagcaaatatcaacagtacaagatgtccaaatattgcgaagatctatttggggatctcctgttgaaacaagcacttgaatcacatccacttgaaccaggcagggctttgccatcccccaatgacctcaaaagaaaaatactcataaaaaacaagcggctgaaacctgaagttgaaaaaaaacagctggaagctttgagaagcatgatggaagctggagaatctgcctccccagcaaacatcttagaggacgataatgaagaggagatcgaaagtgctgaccaagaggaggaagctcaccccgaattcaaatttggaaatgaactttctgctgatgacttgggtcacaaggaagctgttgcaaatagcgtcaagaagggcctggtcactgtagaagatgagcaggcgtggatggcatcttataaatatgtaggtgctaccactaatatccatccatatttgtccacaatgatcaactacgcccagcctgtaaagtttcaaggtttccatgtggcagaagaacgcaatattcattataacatgtcttcttttaatgaatcagtcggtcttggctacttgaagacacatgcaattgaatttgtcaattataacaaacggcaaatgagtcgcatttaccccaagggaggccgagtcgattccagtaattacatgcctcagattttctggaacgctggctgccagatggtttcactgaactatcaaaccccagatttagcgatgcaattgaatcagggaaaatttgagtataatggatcgtgcgggtaccttctcaaaccagatttcatgaggcggcctgatcgaacatttgaccccttctctgaaactcctgttgatggtgttattgcagccacttgctcagtgcaggttatatcaggtcaattcttatcagataagaaaattggcacctacgtagaggtggatatgtatgggttgcccactgacaccatacgtaaggaattccgaactcgcatggttatgaataatggactcaatccagtttacaatgaagagtcatttgtatttcggaaggtgatcctgccggacctggctgtcttgagaatagctgtgtatgatgataacaacaagctgattggccagaggatcctcccgcttgatggcctccaagccggatatcgacacatttcccttcgaaatgagggaaataaaccattatcactaccaacaattttctgcaatattgttcttaaaacatatgtgcctgatggatttggagatatcgtggatgctttatcagatccaaagaaatttctctcaattacagaaaagagagcagaccaaatgagagctatgggcattgaaactagtgacatagccgacgtgcccagtgacacttccaaaaatgacaagaaaggaaaggccaacaccgccaaagcaaatgtgacccctcagagtagctctgagctcagaccaaccaccacggctgccctggcctctggtgtggaagccaagaaaggtattgaacttatccctcaagtaaggatagaagacttaaagcagatgaaggcttacttgaagcatttaaagaaacagcagaaggagctaaattctttaaagaagaaacatgcaaaggaacacagtaccatgcagaagttacactgcacgcaagttgacaaaattgtggcacagtatgacaaagagaagtcgactcatgagaaaatcctagagaaggcaatgaagaagaaggggggaagtaattgtctcgaaatgaaaaaagaaacagaaatcaaaattcagacgctgacatcagatcacaaatctaaggtcaaagagattgtagcacagcacacaaaggaatggtcagaaatgatcaatacccacagtgctgaggagcaagaaatccgagacctgcacctcagccagcagtgtgagctgctgaaaaagctactcatcaatgcccacgagcagcaaacccagcagctgaaactgtcccatgacagggaaagcaaggaaatgcgagcacaccaggctaagatttctatggaaaatagcaaagccatcagccaagataaatctatcaagaataaagcagaacgggaaaggcgagtcagggagttaaacagcagcaacactaaaaagtttctggaagaaagaaagagacttgccatgaagcagtccaaagaaatggatcagttgaaaaaagtccagcttgaacatctagaattcctagagaaacagaatgagcaggcgaaggagatgcagcagatggtgaaattggaagccgagatggaccgcagaccagcaacagtagtatgaaactccaaaatgcaaactgaagcagcaaacccacaaagcatcaaaagactcactcacaaacttctgaacacaaactccatggatgaaagctgtttattttgtttcctttatgtgtaaacaagatgatatctgaaaccagagagacttggaatgtctgactgacttctatttaacagcttgagtattgcatttccttggccaaacaaaaatagctacaaatccacaaaaatttactattccagtaaggcagagtccaaccattgataatacaacttaaacatgtttgctataaaataccatcacaagtaaatgagcttggtgtgaacaactctcctttgtgatgccttaggacatgtttgaactgcagcaaaaaacaaaaacaaaaaacagtgcattagcaatttcatagcaagtgcatgcactaggaaaagaaaactctgtctacaagtttattagcagaagtggtggtctgctagacaaataattttgcaaaatttttctacatctaagttacctcatcagtaagtgccatgtctctaccatgccatcagaggctaatttcctgtaaaagttgtggaaattgttagaacaatagaaaaatagagcagtgtatgtgtgccaaaactcatcattactcaaaggagaactgtgttaggcacatttaagaaagtttacatctgacattgctttataggaattgtttctgcagattccggatattataattcacaccataaagattgtgaagtggttattggcaaacgtttgtaaatgtgaccatgtataaagtatttatactctttaattcacactgttagagagcaaaatcatctaagtattgccacatgacaagattagtaaacaggaatactagaactatgtttgcatgatacacaagcaccaataaagactaatccatacacagttaacctaatgccaaataaatactggttaaataaatgtatggcacagaatataatttgactatcaagacttttagcataatgaaaaaccctctctctatatatatatgtgtatatgaattatgtgggcattcttgatacttcaagttctagtttgaaaaaaatacataactaatttaattttacacaaaaatatttatgcagattttcagaatttcatatcaggaaatgacctttttatgtctgttaaatatcaaaacaatttgctacagtgttaatctgcatggtctttaagcctgctgtagttgagttgcagacagtgcatgaaaaagtattccgctgggaattgagccatgccaccaaagccaagaggagcgcatggaaacccggtagtctagaactaatcagattactgattttagggcacagcaccagatgaattgttgtatatgcttgtaaaaattgattctgtgtgttcctctgaacaaagcggagaaaatgatgataccatcaatattgaaattaaacttccaacttctctaataaaaaattaaaacacgcataacactcgtcaagagtatttgctcccaagacacattctagcaaatgttttgcctttttcatatacatgatatcatcgttattttcaaagggggcttattaataccctcagcatgtttttcacccaaatgatgcaaaacatgcagattctagttgacttcagttgtaatagacttgtttttctcctatttatgatttgaagtggattctgtaaaatatctcttgttcttagtttccttatctgtaaaacagtggagttagactacatatcttttggcactaacatctcatgaaaaattatggttaataaaatatcaccacatttggattgccaattttcaaagattctgagtggcttctcatcatcaaatcaaatcaaatccaagagctcaactatgctcaccattctgtaacacttgactgaattcatcacttgcctcctcttgtttctgctttggagaggtactactagtttttccatttttcttatttcttccctcttttcatcctcctaggccaccataagcatttatattttccagtgttatacatggaaccagtttgtttttctttgatccaggttacttttagtatttgagacatcataccattaatccattgtagtaggattaaaatgtacacacaactcaaatgtgcaacaaaagcatgtgt

SEQ ID NO: 895 - protein, 1010 aa, Homo sapiens
MNNNWNVCFFLFCPSITRTFASGKTEKVIFQALKELGLPSGKNDEIEPTAFSYEKFYELTQKICPRTDIEDLFKKINGDKTDYLTVDQLVSFLNEHQRDPRLNEILFPFYDAKRAMQIIEMYEPDEDLKKKGLISSDGFCRYLMSDENAPVFLDRLELYQEMDHPLAHYFISSSHNTYLTGRQFGGKSSVEMYRQVLLAGCRCVELDCWDGKGEDQEPIITHGKAMCTDILFKDVIQAIKETAFVTSEYPVILSFENHCSKYQQYKMSKYCEDLFGDLLLKQALESHPLEPGRALPSPNDLKRKILIKNKRLKPEVEKKQLEALRSMMEAGESDANIDDNEEEIESADQEEEAHPEFKFGNELSADDLGHKEAVANSVKKGLVTVEDEQAWMASYKYVGATTNIHPYLSTMINYAQPVKFQGFHVAEERNIHYNMSSFNESVGLGYLKTHAIEFVNYNKRQMSRIYPKGGRVDSSNYMPQIFWNAGCQMVSLNYQTPDLAMQLNQGKFEYNGSCGYLLKPDFMRRPDRTFDPFSETPVDGVIAATCSVQVISGQFLSDKKIGTYVEVDMYGLPTDTIRKEFRTRMVMNNQPVYNEESFVFRKVILPDLAVLRIAVYDDNNKLIGQRILPLDGLQAGYRHLRNEGNKPLSLPTIFCNIVLKTYVPDGFGDIVDALSDPKKFLSITEKRADQMRAMGIETSDIADVPSDTSKNDKKGKANTAKANVTPQSSSELRPTTTAASGVEAKKGIELIPQVRIEDLKQMKAYLKHLKKQQKELNSLKKKHAKEHSTMQKLHCTQVDKIVAQYDKEKSTHEKIKAMKKKGGSNCLEMKKETEIKIQTLTSDHKSKVKEIVAQHTKEWSEMINTHSAEEQEIRDLHLSQQCELLKKLLINAHEQQTQQLKLSHDRESKEMRAHQAKISMENSKAISQDKSIKNKAERERRVRELNSSNTKKFLEERKRLAMKQSKEMDQLKKVQLEHLEFLEKQNEQAKEMQQMVKLEAEMDRRPATVV

SEQ ID NO: 896 - DNA, 163701 bp, Mus musculus
  misc_feature (1)...(163701): n = A,T,C or G
agcacgaaaacgcaagggatccaatcagaaatcatttatttgaatatcttcatgctaactgtagaatgtttcagtagtactttggatttttacaaaggatgtatgtatgtatgtatgtatgtatgtatgtatatgcctgtgtgagttcatataccatgtgcatgtaagagcctgtgaaggtcagaagagggtgccccatcctctgaaactagagtcacaggaagtttgcaaggtactatgttggttctgggaatctaacccaagttctctgcaagagcagtaagcactcttaaccaccaagtcacctgtagccccaatacttagtatttttaagacaattccctggacgcagcttcaaattcacaggtgtggaatgaggaaggctgttttccaggatctgcgaatcctgccggagtagcgggatgtgtgtggtaaaaccctttgcttactcccatgaccatcagtcagcatgtagacaggtcgttagagacacaacccactgctgagatatacagataccctcctgtatctggagatagcagtgccttagatgttctgttaatctgagctgtaaacaggtatcacaggtacttgataatgcaatactgagttctgctaccaactctctcaccctgggcactgcgcattttcaatgcacgcatgagttatttggagggagcatcagatccttctagttagacagcattcacaacagacaccagctacaagcagggaccctaacctacctgctcttcggtctgactttggctataatttggggggtttctgtgagcctacttcatgttactactcagagcatgcaagatactgaaggcggagtctcagtcctgtggagtctagcacatcattcttgagtacgtccatttatccacaagccaagaagctcctctaagacagtgtcctgaggtttccgttgttctgaagctatgtgcctgcatcgtaagtcactggaaatgtgacttagctacatctccagatccagcacccctccccaggggttggaggtgaggctgaaagtctcggccttctaatcacatggcacatctcattagtaccccaagggatcaattatgaacagcacaagctattcctgtcccccaggaaagcctaacggttttgaaccagagcctgaaaccagagacaaagtctggaaatatgctttattacatcacatgtatataaatcgtcttctgactgctgcatagcattcacaattcctttccagtcacatcttttataaacattaattgtgcaatgttgtatgtgtgtgtgtgtacatgcatgtgtgtgtgtgtgcatgcatgtgtgtgtgtgtgggtgcatgcctgtcttgcatgaattaggcaatgggaagagaactgcattcgctgggatactttgcatttctttggtactaattgttccatttccttccacccactacccagcacgtcccttattctccagcctgcacattagcgaaagcttgtctctttagccaaccaattgttcctgctgcatcaatcaggtgatagagttggtctaatcagtggtcacagcttgccacaatatagctgggggtcccttacctgagcaggggactgactataagcaggacagaaagacagaagcatagggaaagacagacacagttctcaggtgttcgtctcaggtagcttgctaaggaaggccctgtagcagaagagtgtggttaagttcctgctgagctgtctctttggctcctatagatcattcctttctccagagacctagccctctcccaactctgggttcaatcttgtccactgtccctcagtgctaaaatactgattatcctttgcttggagttcaatataaaataaatcttcatgtcaatctgcataccttctacccacttgtagtaattagattttgagtttttctctggaaacccagccttaccctataactccaatgcagtgagcacttgatgatctgcacagctctgcataccaaataggatctgagagtgagctggctttaacattttttctccttccctttcccaaatcttatactttggttcacaccaaaaatgatcacagtcaggaccatcatgacgattataatggatgaagtgaccagatagttaaggagtacaggtaccaagaagtgtgaaatataatacctaacactatgacatataacacagacatgttatgtttactgagctgctgagctgtgcatgcatgtgcacacacacacacacacacacacacacacacacacacacacacaggacatctctaatacagagcagtgtagggatgtattacttggtaagagacagttggtagcatggacataaagaagagaggagtccctggtagcatgaccaaggtcgacttcacgtgcctgaggagctatgaatcaggtgttacggtagggttagcttttgaagaacataaatcagaggagagcttggattaaaaagccagcaaaacctcaaagcaagaaaggacaatggatatggaaacaagaatgagagtttagacaaagaagatctgggaataggacaggatgcaagctattctactgtcagcatccctttcattactgggataagacagctggcaaagcagcttaaaaggaagagagatttgttcctttttggtgtggtttcagaagttttggtccatggtccttggcttccttgattctagaaccaagatgagacaaaacatcatggtggtaggatcctgtggaagagattattcacatcatgtaggacaggagtcggtgggggtccagaaaccaggtaacctttgaagatattccacaccaccttccaatgccctacttcgttcagctaagcccagttcccgaactttctaacatctcccaaaatagcaccacagagggggccaagtattcaacacaagtacctacctgtggggcatccaatattcaaattgtggcatccatatgcctaacagctactttaattgagaaggacagttgtgtatttttagagggggaaaaaagctaacatggacaaagcaagctattatgagattgtttaaaattggcttcaaaatggaatagtacagtaatttcttttttcttaagttactgaattttgttggatactgaacatttcttgaataagtgactgggaatgtgtcaataaaagagaaaaatcattttaaatagctgttatgctggctctacaatcgaaaacaatgtctattagactcagctgtttccttgtacattcaaacaaaacagctcctatgctctcttcttttctcacaaaagaaactgggctcccagggctggagacagctggccagcatctttctgcctacgccacatgcgtcctgggctctgcagactgttaccaacaccaacatctggctctgctagcttgcttgctttaaacagaatttcattttcctgtttccagaaacaggaaataccatgtgcttttcagtggaattcgggattaaatatttctaaaagcaactgctgtctttacaagacattttagagtgatagtttattttacagctttttgcccttgggaattatttctatgggaactgttgtgaaatttccaaggccccttgttcttctataagactggtcttgtgctcttattttccccttgggacatgggtgagaatccactgaagatctgactaccaactaccaagtaacacttgcagtgccagctttgttacctatttattcagaacagtaggtagttgttgttactgctcattgtttcttcaagcccagggaccttgtacatgctaagccagcacttgaacacttcactgaacccagaatggtaggaaccacggccaagtgtatggatgcaggaacttcactcaagcagaagagagccatacaaacaatgcatatccttttctatctaaagcataattcagactacatgctactgcccctcctttcccccgaccctgccatcttttgtgctttgtagcaggagctagcctgcactgcagagatggtacagaactgagggtagaagatactgttcacaggaaaagacccaaagggtagggcttaagaaaaacagaaatgaatcatccactatacgttcttgtaactagagtgctcatttactgcataaaccaggcatgatgaacaagaacatgcatgtggtttcagcccttgggagatagaagccaactgatccagagttcacggtcacccttgaatacatggagagtttcaggccattctgaaacctaccttctgattcttggcttagtatattatactaaagtgatcgttgctgaatagtgtgaaactgagccttctctgcacattggctttgcattaagcttgagtgcttgaccccaggagagaaacataaggaatgcgtgagatagggtagctcaggacaatgggaatacccgtaacagaaagacagttttgaaaaggctctgttttcacctttggaaagcctgtctcttgctgtcctaagttttcttcttcccaatagaaagtatgaaatccttaagccctgcctttttctctgcagggcagcgtgagatcactaagttcctttagcaggaggctttctcctcacctcccctgagcatctttccactaccttcacctgctctcatctgcctacagacacaataaactaccttagatcttagcacttgcattactggaactccacaggtttcctatgctagggcaagacactgagcttttcacaagtttacaaaagtttcttgggaaacaggaaagacttgagcccagttagggattcagctacggtcttcaatgacactgtctgccaccttatgtgatccaaccatacaaacgtgacaatcaactgtgtcaaaaatctagcacaatatatacatcttgtgcgcgctcgactggccaggaagaacgacgctgcaacaggatccttctgcacacgtttattgggtgagcttgattgtagaggcgaaaagaccccgagcccagaactggtgctgcttttataggtctaggagaggcgtgtcttacacccggattggttatgcactacgcctcatttgcatgttcctcatctgattggctactctctctcagtacctcacagagcctcattatcatacctcatttgcatgtctcacatctgattggttatactctcagtaccttacagaacctcattatcatgcccgggccaggcagtatctttgcaaaaaactttactgcatatgtacacattggttgtttgtccaaacttatgcgtggtggccagcagtagtcagtgccactctgcaacggcacatgtggcttcccacatatatagagttttctagcaagctttccactgagctgtatctgattgctttgcttccaattctgtctcagcctctcccataaccctgagttctgccaattccctcatctgagttgtctctgtatggtaagcaagcctggagattcttatgtccaagaaaccatttgagtgaaaaggatcaagaatgtaattaataagggtgaagaactttccaaccaagattccttagctcagtgatcgtcctgtgattcttagcagaaatagtttaatttaaaggaagggataggaaatttattctagacagagctccttgaaaggagaaagaatagattgctagtgtctgtaattgaaaatttcatgagtgacatttttagggtcattggatgaagaaattctcaaagagcaagctgtgctggcccatgaagaatacaagtcagagagagagagagagagagagagagagagagagagagagagagagagaaaatatatctgttatttttaccacagaacaacagcacctaacaagaaataaattcaaaatgcagacatagtcaatattaagattcaatcaatgctaggacaatattacatgtttcatcttttaaacatcaataacagtggctcggaatggcagtgggacatactaattaattttttataaaattgagccatagattacttgaagtcaataaatgctacacagataactattttcgatggagttgctggagccgtggaagcctagaagagctgtgatggttaacttctttgtcagcttacaggattgagaatcgcccaagagaaacctctctactgggatctacgacaagcttctacagagcttaaaccaaggacaaaagaactaccctgcggcaagtggctccaggttagagtcccagagtaaatataaatggaaaaagaaaagaaacaagagggggggggggagaaaagaaagctgaataccagaacacatctctcctgttttctgtctctgagtgcaacatgatcagctagctgtcttatgccctctgcaccatgagagatcgtaccctcaaacaacgatttcctaagttgcttttgtctgttattttattatagcaacaagaaaagtatcaaacaccagttctttatttaaaagtcccgatgtaatttattctactagcttttttttaaattaagatactcttacaaaacaaacaaacaaacaaactgtaccaggggctggagagacggcttcatggatgagagtatatactactttttcaaaggacccaggttcaattcccagcacccacatccagcaactcacaactgcctgtgttgccagttctagggatctagtgctctctttagggcatctgagacagctacacgtgcacacatgtcacacagcacacccacatataaaggaataagtaagtcattagaaaatactcaaccaaatttactatgatggagcagatccctcattttaaatgaattcgtttttgtgaactcattcgtttctaatttataatcaaaagagactatatatacagttgagagaggttaacctctgtagaataatatataaatacacacttgcttccaaaacttcacacacagggagtgctatctatgcattaactaataaagatcgtctttgaaacacgtgtgagttctcattggatgattgcagatcctgatctgagcaatttggaaatggaaatgaatctctagtgtgtcgtttggtaaagggagcttgggaaagagactgaatcagtgatttctcctcgttcactcttcctgtgtgaaatgaggatggtaattgcacttgtccccagagagtgtgaatgttgcccttctaaatccctggcaatcttgtgtaggtaactgcaggattctgatgctctggaaaccactttgtgcagccctaattcaagaagctgcaaagtgggatggagacaagagacatacttcttccttagaaaaaatgaaagccttcctaactcaaaaagttcgcaatgtgtttttcttcgttagggttttactgctgtgaccaaggcaccttttataaggacaacatttaattggggctgactcatgggttcagaggttcagtccattatcatcaaggtgggaacatggcagcatccaggcaggcatggcgctggaggagctgagagttctacatcttcatatgaaggctgctagcagaatattggcttccaggaagttagaagtaaggtattaaagcccacaaccacagtgacacacctattccagcaaggccacacctcctaataatgccaccaacctgggcagagcatattcaaaccatcacagtctctcaaactatgtggaaagtattgcagagttttctttataagattccagtcatttcctgttacctgaagcttgctcacaccggagccagagcatggcgtacctgctcagtgggcgttctcttcttggtgcttattctttgacttgattgctgtgtgtgtgacatatgtgcatatacatgatcatgtgtgtgcatgagcacacatggagagcccagagtttgatagtgggtgctttcctcaattgctctgcacctcatttttgagtcaggatctttcactgaacctggatgtccctgattgagcctggtccccaagtcccactgatcgctccatctccacacccccagatctgaaatagcagatgtggcttcaacatctggctttgtaagtggtccctttctagggatcccaatccaggtcctcttgtgtgtgcagcaagcactgcatcaactaagccccacagaatgcatttttttaagagcaaaaaatagatacaataacttcctatatctaatttagaagatcattgtgggattcaatgaggtaagtcattgtggtggttaatcttgtcagctttacaggacttggtgtgtcttagggaaaggtgttcccagagaggcttatctgaggaggggaggctcttgctgcccttgggcagtgccatagcatggactgggatattggaataaaaaggactaaacacctctcatccatcccgactgtcaatgccgtgtgaccgacttcctcacgctgctgccttctgcgccatggtagactggaccctcaaagcatggctcgaaccaaagccttcattccctgagtcgctgctgttgccaaacattttgtcacagcaatgagaaaagtcactagtacagcctggtggtgaaatccagacctttataagttctcaaaccaacgaacctctcaccgtcctctaaatccagccaagttggatcctgcatccttattctcaaagtacctttccaagctgaagactgagtttaatatctcctacacatcctcctctgcaacgtattaacattcctttctcctttactcaactccctattcccacccctttgctcctaatgagccgtttttatccagccaacttcacactacctgagtgaatgtgtgtatgtttaatatcactcgtgcctgttcttccccattagagaaaacaaatgaacttgtcagacaaataactgtttggtttagagttcagtggacttggctcagaagtcctgagtgtcacatctggactggttatttgtttccacactgtctatccccatttccgggttgcttgtttaataagttaaaattcaaggccaacaaaacccttgtcagatttatctgcagcttgttccaggcaatattcgagtcctccccaccccaccccactcccccacacaatctcccctcccactccctcccccagtgcccagtgggtgaacccgaaccatagtggatacgccttggaaattccaaattaaaagcattttcacctgattctcaggcagacccacacgccagtagctgctctggggtctctgtcctcgtaagtggcaaggaagaacagggtgtgggaggcttgcagccctggaatagtcttggaccctattggaatagggattccccatcctccagaccttctgaatgtgcgtaggcaagtgttgtattaccatacaaccagcacattctcttggggagctttgggcaaggctatttacaacctacatacctgggccccacctctcagagtctcctgtgtttactttggagtccagccaggacaaagggctcctacaagctcctcaagttcttactctgcatcagatcaaagtgaaaggtgtcctgcaaattgcagtccttgaaggttaagcaaccatctgggttaaacttgacctttgcaggctgtcctgggaccctaaggcagttccccatagactgcttcttaagggacaatgggctaaggagacaacctcagtcacagagtttttggtcaccagccctgattttgcgaagctccagctccttgccctgcagctggcagccacattagcctcgcagcaacccccccccgaccccgccccacccttctcgctccgcccaaccccgcccgttggcaccgcccccgtgacgtgccgcagcagtcgcgaacatgcgcactgagtcccgcgcgctgctccgcctcggcgctgtcattctccgcggcgcggcggccagtgcggactgcggttcccgcccggcgcgcgggtgctgtgactgctcctccggggcggactggtgactctgcagcgctctggagcctctcgtgcggggactccgtggtgtcgcattccctcagagagggagacacgcacccggagctccgagcacagctctcaagggctggcggccacgacggcgtttgctcgggttcccggtgcagtccgagtctctgcggccgcccggtgcgcccgggagagcgcacctcccccggcacggcagaaccgaggcgacgaggatcaggagggtcctgcgcccgctaccactgcccaccgcgggccagcccggctgcgagcagcggagttgcagcgctttttagcgctctggagccccagaagacctctgcgaaccagtaagttgactgtagtttctgaagtttcgggcagcgtgggaaggacaggttcgttttattcctgtggttccaggccgaggttttacctcccgttagcggggctgcggctggaggaaggcgtactggactgcaaaggatggggcatggcattcgaagactcaaggctggagtctagggctggctcctgcctctcccgaatgtgccagctggaaatgtgctaggggagacaggtgctccgagggcatttggcccgccgctaaattgcacattctgagctccttgattttgcgccgcgtggggtcagggacgtcagccacctccatcctaggaagctctgcctacatcccctccatcccctcggaggactggcacagagatgagaagctgagacattgctgctcgggcctgcaggctttctgcacatcccacttcactcttcccttaggcagaagttgccaacctcccataattggagcctagccctttagggaaaaacaacttatgtgtcaaatgagtgttttgtgctccaaggcatagaaaatgagaaaagtgctctatgcgttttaattcatatgctttaagaatgtgggcaagtctcaaagaaacaggattccgaggatggctgagttgtcctgcatctcttatgtaagcctcctggctgggtacctttgcatctgcaggggctgcatctgggcctctactcactccattttttttttcaagtccagcttgagccgtatttaataaaaacgttgacatgatatagtggttcgtagtcagaaacagggcagtctttaaattagactgtcttctcctaatagggagcatgggaggaagaacttggtgtatttttttcaaggcagttcaaggaattagatacataaatcatgctttaaaataccatacattgtacagagagcatgcacagaaccctctttagaacacatccccttttgttttagtaaaagtggagatttgctcataccagacaattgttgagtctgaaagtgaagtgcactgatggccttaattatcttaataaacaaagagcatgatttataggtagctacagtggcctactttgaagggtagaaatctttaacctttcattctcagctgcccctagagattccttttaagcagagcaatggattaatgccattgatgtttaatacttgagttgattaaatttgtaaaaggaattctttgaaataccatacagccctgctgtgtgactgataggcagtgactgttataaagaaagataatatttagagtaccagctttgcattaaccaaacagctcatattgcagctgccctgtgatacacatgtatccatagatggaaagaaatatgcacacagaaaaatatatacatgcatatggatttgaaataaaaactcagggatgtgagtcaatgtgagatttatttaggtgacctttagaaagaggcatgtatgggttagagtgcttcagtggatataacaagatgaactaactagttataggcacctggtttaagcatagttattattttaaggattctaagaaaaaagaaagattattttaacgttgaaaagctagttatcacattgtagtttataggagcattgagtgctgacccctagaagaaattttgtccaagtgtgggctttcaagagaccaggctgttggcactattgctggctttgaatctgagcaataccggaattctgtgcccggcgtctccatctgtaaaataggtgggtgtaattgcagtaccttcctggttgggttgtgcgaggcttaagtggaatcctgatgagaaggtattgagctggtgtcaagtatcgtaggctgactttggggaaaaagtttcatgctgtgaaaggaaatttgtcttgggataagctgtagacattaaacagctgttgctggaggtcagtagaagcagtgcacatgtgtaataggagagaggatataaacaccctggccacatgttaatattggatttactgtctccagcagtgcctccctgaaggccttctatggagatggctttgtcttgatgttagagaggaagaaactgaggccgagagagatcaagtagtagaaattagagctggcatcttaaacatgcctgttggaatcttgttctttgaccctgctgcctcaacttgcaagcaatgtgggtgggttatcctttctccacgggaagtttatgtttaaagtttcaagtatgcaaagtgctaaatagcactccttcttcgagactggaagctattatcatcaacttctctgttattaaatgccaggccctggttgcaaaccccgtttagtgctattgtgagaaagataacagggtgttttgccttcagctgaaactggattctgttacttctttcttccctgtttatacattcgtagaaccaaagagaaaagttgggtaacttgatactttgtattggtggttgatgctcgctattctgcctccctgcagcctgtgtctttgctgtctgtggtccacatggacacaagcagcaataatcagccagcattgtctctgagcatagcccagtgtccaaggaagaactccactcaggcagagagatggggccttgtgcttatcttgaactcagtgttctgaagtggaaatcatttatccatcacatctatgggcacacttcctttagtcttaggtttaaagccataggaagcagttgttggcggattccatacgagctattttggtttaaaatctccatggactgttgagtttctcttctgagttctagggtgtggggtgattgagtggccatggtactttgggctttcttaggtattctggtctttatcttttagatactgaaatcaattgctatagaaagctcctaggcagctgactcaccccaggtgagtgaatgtttactgaaaccctcctagctgatatccttaccactaaaagtactctaagatggatgctcactgctacctggctgatgctctggatctctctcccctcctaaccccccccctctctgtgtgtgtgtgtgtgtgtgtgtatgtgtgtgtgtgtatgtatgtatgtgcgtgccatgtatctgtctctccaaagctgctcaacagtgagtttccagtagtgagcttctgagagcctttggaggcacaacgccacaactgcagtatgccaaaaagaactcctgccaccaaccgagttctctctactgatatttcatccttccttttcaaacaatacatacacactttgcctcagtagctagattccagctgttccctgttctggattttctgatcaaatgtctccctggaacatggctataactagagctaaccctgtgaaaataatttccatatggatgttttatttcctatttgtgttgttatagtggattttctgttgtcacttttaaatctacaagaaatccttccccccctcaaaacacacacatccgttttcttttgctctcagaagactgatgtacaactacagacatcctacccttcattcacccaatcttatatgatttctgaagctaagcaggcttgggcctgcttagtccatggatgggagacggctcaggcatatagtctgcacattaattgtaatatggatataagtgagtaaagaccatttactcttccttaatcgcattactcctgtggatttttcacttttatctgaggagctgggacttgattttgatcctacctcattcagtgtatgggctgacttggaagttacacacttaagttatacagacaaggtcaggatgctgcagagttcaggggcttggggtagatttgagagaagacagccttgagcatgatttatctgaccacttttctagtcgctactggtcatgctttctgataagagctcttatcgtaatattcagctgggagtgagcgctcactgtgtgttggctgtttatggcaacattatgtacagtgtttccctccaccctgacaccagccttttgggaagttcctatactgtagtgcttttgcaaacgtagaaacggacctagaaaggaaatgcatccaagattacatgagtaagttttgcaagaaaaagtagagctcagaacattttgatattccttacagaatatcctcctgcctctggtttttcagctattgtagtaagttctatagtagagatggacagtctcaggctctgcaaactttcccgtccacagcgtggattggctaaataagaagtaccagctctgtgtttttgtcaaggtagaagcttaagcttaatttatgttagaaatcaaaaaccacatatcactttgtgagaaagaaggagcgaaagccacgtgttactctgtaagtaagaagtttgagtgcttccggtagggtggcaaggcaaacttgcttccgttgtgctttgagtctgaggtttgcgtcattgtcctcgaacaaaggagaagtagaaaggcctaagatttttctcaaatgattttttaaagtttatttaaatctaaaaatgtcagagttacaacagcagtagtagttatttgtggtatgactgtgtgtgtgtgtgtgtgtgtgtgtgtgttttaaaggaaatgcacccacatatctaacaagtagggatcagaacaaacacattgactccatgcaagctcccatgtctgtggtgtagccttcctgactccagtccggataaaaagcagagactctaaagccatactgttagattctcaaacccttctgtgagataatacctctgcagggaaagggggaggggtaggggagggggaaagcagagagacagactcactgcctggagactaagccctctgcctgccgctgagctatatcttcagccccatttcccctctggattttacattggaaccaccatcatttcgggtgtaattgaaaagttagtcagtcatcgtaacattcaggcatagactggatagcgcctctgttcctatactagactgtaagactggataagtgttaaaccagcaagtgattaaaaacttattttaaaactctgctttctcctttctaaatatagactgccaggggacaggaaactcgacctgaccgtggcctttattaaaacacagagcatttgagtccctgtgcactttatggaatggactttaaagttgctggcaacctttcgtaagcctccagctggcccaacgaaatatatcatatccactctttatctgcaagcttcccctgtcttcctcaaaggaccaaaggtgtgagtgtgtcagctcttgtcacctgtcctcctgcatagccgccctgcgtgctcaggcttctctgaatgtagtcctcgtgcatctggtctcctgtatttctgactgtctgtcactgttggctgcttcgcccaccccagtcctttaccctgacgtgtacccgtgcctcgccgtcccatctgtgtggggtgggaaacgatcctgaagcagcacaagctgtaagtcagggcaggaaagctgcacagcgcagcgcagtgacttactgttaaagagagggccagttactaccacagcctctgtcctcagcacctgacaaccgtactgagtagccttattatttcatatgtgacatctaaaaagagctgtgtccctctaattcacacttaaccagccgccagcagcttggctgtgcatgcatcaagtttggtgaaagtgattgatttggatttttcagatatgtattttaggagataagctgttagggataagccgctccatacaattgtcaaagaaaagactcaataaaaataaatgaaaaatacaggaattaaaaaaaaaaagaaagaatgtggctttccttcaggggctggtacttggtctgggtccatgttcggggttggggcagatggaggtcattgctgagctgggtagtggactgtaagacagcagctccgtgagctgggtagtggactgcaagacactttgtgaagtgtcttggtggccagacttggtcctggggtgagtgagttctggggctggattcagggcctctcgaatctgaggcgcctgagctctatcccagggttctgctggctttttattttgagacctatttgcttgggctggccttgaattcagtctgcagcccgagtaatccccttgccttaaccgcagtagctggggggaccatccactactgccaggcctggcccaggctgtcggtttagaatgttcaacctggtgcatccacaaaacaagtgaactaggagacggaaaagggaagccattaaagtctgagttcagactggtaagggtatagacgctgagggcacggggcgggggtagaagcaaggaggtggcgcagggacgctgaagagcctccccagatgacctcgctcagatcactgaagagataaaagttccattggtgatgacagtgagcacagagggtggagcattccacaggggaaggtgacaagctgtggatttatgccgtgtgaggcaccagagggacatcagagcctagagattctatgcaactgccagcttacaattcaaggcaaccgctgagatgcagatggagacttagcatccatttgcagcttattaaggtgtccagtccactgagatatcttggatatagtatgactctcgcttgtgtttataaaacggcctcaccgtgctctagatagtggagtacatggaatggatgttgaggctgctggtcagcctgagaaaacatgtagaataaaaaataaagtcaaggccagggtggcacacagaaagataaaggagatgggatagaaagttaactgagagaaatttttgacaaaaaaaaaaaaaacgacagaagccagaggcagagcagggtgaggcgcttggctgagtgtgagctgaggacacagaagtgaaaccggaggtgccacagggcagggtactcctcctcactgtgtctgcaccggagatggggcgattgcctggtggctttcagttcccctccatcagtattaagagtctggatggtaggtaggatgccattcaggaatgaagtacgatcctgaactcagtctactaatggagtatggacatcgtgtcgtcttcttttcctttaattttccccatcatgatcagaggagtgcagacactggcagagtgggaaggatgggaaacacgccttcttaatgcataaagtgctcgatcctccgtgcgagcaggagtgcgtggatgggacgtggacagcagcacaatccaagttcacaaacaactctgctttcacgtggcgtgctgtcattagaaaggtggcactgtgtgccagtacttgcaacacttgtgacgtgtctagcccattgggctgtctgaggtgttctgtatatagcatgccatgactttcatttgttttatattgtagacaatgtggagtatttattaaccatggagatagtttctgtgcttccattcctgtccatactcacatgtgtgagcctatcaaccagtggttctcagccttcctaattctgtgatcctctaatacagtcttcatgttgtggtggctctaactataaagttattgcattgctacttcataactgcaattttgctactgctatgaatcatagtgtaaatttctttgttttcaaatggtactaggcgactcctgtggaagggtcctgcgacacacaccacccccaaaagagctgcgcctcactggttgagaactgctgctagagcaggaacattttgcatttaagccattgcactacattacagaaactggtaacttgaaatagagtccagaggagagacccagctgctaaatgattaaggttgtcagacccaaactcagatgttctggcttcacattgtgggttcagatgattctaaggtactttttatcatttgcaactaaaggtaaacttggaggaggatggaatccttcgatgtcttttaaagttagttcacttaaagcatcagcactagaaactgttgctgactaaaactcctctacttaatggaccacaggttatttatgcaaatatctaattaagctgggggaaagtaggggtttcttctataaaacaagcttttttctattattgatgctgacttttttagaaagctcctatccataaagcctcgaggcctaatattttaaactgaaattcttgtacttaaatttgttctttgtgggaatatatttcttaataattgcagtttctgctgtgtgtgagggccattcagcatgtgcattttgtgctacaagtatatcagacaaaacccagccaagttaggtttaaactattggtttcccttaataatgttcttgactgctttggtcatatgaaccaataggcatattttggcttgtggaagcagctattatgttaccaatataaggctgaagtcttacactgacattgtctttttacctaagtgctacaagatgatgcagtatagctctaaagatgcctgttccacaacttgtattttggctctgaatagtccaaattttccttaatattgtcatcaaatcatatatagatacatacatatgtgcagtaatgcttgagttagttgtgaaatggatatgtactctcataaccattgaaaaagtttacaatgttgcttttttatcacacacacacacacacacacacagtgtatcccaattgctagctggcaatttgcagatggaagcacttcctagcaagtaacaaaggccagtgctgtccccagatgtcagagtcacttctcatgggccagttttacactctagcttcagtaggaaaatctaaaggggctgacatttctgtgtcttcagtggatggctctttttcttttttttaattcattggatggcaattattttttttaataatgagacatttgtaaattctgaaatgttaataaaaatgcaaggcaactatcttagtctggtaattactgtcccacacagtagtgtaccagccttaatccattgcagtgagaaattacaatataggcacatgaaaatctaagtaacaatgtagagcatcatggtactttaaatatgattttattgtactttataatatgtcaaatgaagattaatttgttcttttcatgcctgatgggttccaatttcatcccaatgcaaatattgtaaaagagaaagcggttaggcttcggttcttcaggtgacttgccaccgccgtatactcatccacacacatgaacagtcaagctggcttgcctactgatattccattatagcatgtactatgagttttcacttcctaaaaaagagtagctatatttcttctaagtcctgttggatttcagtcatacatttttatgttctttatactcgacgtgctagaacatgtctaaattagcgatctaatttgaatactataattatatgcacagttgagtttgagtacagtgtttttgcataatgtgatggtctctcttagtgaatttaggaattccatggttccaatttcagagtcctaaatctatatacgcttatggaggggttcacaggacagaatgcaaatactttaagcctatttgagttttagaaattaacatataaactatctacaatagctttttttatgtataagaaagtaacaagaaatacagaattaattaagaactaggttggtgtcacatctagtgactaaattttgccatcagggttaaaactcatactttgttttgctaaaatgataaataaaggtatatttaagcaaagtgatagcatgaattctcataaataattgtacatatttaatagggctaacatctttctctgactttactgtactggtcatgttggccaaaatgcacatcttgagcacaaatattagctttgtgtaatgttcaatgactaaagttgagtggcacactctgtaatcccagtgctctggaagcagaggctggagaagcaatgcaagttcaaacctagcctggtctacgcagttccaggacagccttgagatcttgtcttaaaaacaaacaaacatgaaacaacacacacacaagacaagagagagagagagagagagagagagagagagagagagagagagggagggagagagagggagagagagaacgaacgaacgagggcaggaaggagagagagcataaaaatttaatgcctctaaagtggcattggaaccgaatgcttttagagtcttgttaaaacagttcagcatcatccaggctgagatgttaggagtggagctgccagacacggcagccggtgagaccacagcagtacacagtgttatcacccttactcttaaagctaaccgtccctccctccacacttcataaccttgccaaccagatgagttatttgctaatagtagcatgtcaaaaccggaattattatggatcttttcctttaataaatattcaacagcattttcaaagcagttagatacaattcctaataaccagcgccatgctggctgcggtgtgcacactcctcagaccgctcatggccacagggcattgggcctttagacccttttctatgtattttcaagagctccacaatccctgggctggaataatccttttacttctccacagttacatatagaataaagagaatttctcatcttttcttcacctacgacgccaaggtctgtattcagagaatccctgttcgttgtgttctctgtctacagtgatatccgtccgtcttttacaagtaagagccttcacgttccctactgttcaggaagacgcagcactgactgtcttcctacttcagggctgttcatctgaaatgttaagagaggatggtgctgttgacgtagcaaaacgttgctctataagttgatagagtctttcacgttctgttggaggtgtactctgtgtgccgcagtctgtgctgactgagcagtgctctggcgtttaggagcgcacagaatgggacaactcctgccacaccggagctgctcagtcccaagaggagccctgagcctgtcatagggagtctccgggctctcaactgtccctgtccctgtccctgtccctgtccctgtccctgtccctgtccctgtccctgtccctgcccttgcccctgtccctgtccctgcccctgcccctgtccctgtccctgtccctgtccctgtccctgtccctgcagccatgaccgggcacttctgaatctcacttgtctttctctgtgcttcaccttaaaaaaaaaaaaatcatccaaacatttcatttggaattctaatttttaccagtaaaaatgtaatttgtcatcttttcttcaaagtcagtatcactttttcattgctcatatttacatactgtaagcagatttggatatgtttattaaagtgaaggcatacagccaggaagatatgcctgtgtgcagtgcagccgtgttttagagtagaccatgagcctgcttttcagcttgtctctgatatcagcccttctcctgaactcttcgcccggtgaatcgatccaataaaatcatgtagaaatcacggagctgaggtcaggcaagtgcctgtatcatttgggggaacatcaaaagaatcaacactgggaaccctgcctgtctggaggcggtgcaaaggcaacctctcccaatgccagtgtagctcagctgttacatgggccatgacagtgctcatcttaccacccaggggtggaggcccgggacagctgtgaccttgaggccagcctggtctacatagcaagtttcagaccagccaaggctacacagtgagacaaacaaaagccagcttttacaaaggtaatgcaatgctccccctaaagaaaagcagtcgactcagggattgctagtttctagaagttgtagtcacttctgcaccaaagtgaatcaatatttatatttagctgcataaaggaaaaccctaaagcagttcaagtgaagttttggagcaaattcaggtagaaaataaggtatccagttttcagaaatgtttacatttcagccttatgaagttttgtgagaacccaagggtactcactttcatttaccatctccttgtcccctcatcccctctgccatatccacattttagatggccaagccacaatgttagctttctatcagacttgatacagggccaagtcagctctttggggtagtgaatgaaggccgggtttggatacaatatggccagccaggctgcggtttgtggttccaactctttgtgacaagcctggattgtagccatgctcagactatacccagtgtggcacccagtttggttctgctgccttcagatcaagatgtagaactctgagctccttctccagcaccctgtctgcctgcacgctgctgtgcttccagccttgatgataataagctaaacctctgaagctgtaagcccaccatatgataatggactaaacctctgtttgtttctttttttttaattagatactttctttgttacatttcaaatgttatcccctttcctagtttcccctctgaaaacccccatcccctcctccctccccctgctcaccaacccatccactcctgcttcctggctctgacattcccctatactggggcaaagaaccttcacaggaccaagggcctctcctcccactgatgactgactaggccatgttctgctacatgtgcagctaaagtcatgagtcccaccatgtgttttctttggttagtggtttagtcccagggagctctggggggtactggttagttcatattgttcctcagcaaacatcttcagctctttgggtactttctctagctccttcattggggaccctgtgctccgtccaatggatggctatgagcatccacttctgtatttgtcaggcacctacagagcctctcaagagacagctatatcaggctcctgtcagcaagctcttgttggaatccacaataggttctgggtttggtgactgtatatgggatggatccataggtagggcagtctctggatggttactccttcagtctctgtttcacactttgtctctgtaactccttccatgggtattttgtttccccttctaagaagtatcgaagtatccacactttagtcttccttcttcagtttcatgttttttgggaattgtgtcttgggtattctgagcttctgggctaatatccacttatcggtgagtgaatatcatatatgttcttttgttattgggttacctcactcaggatgatatccaacagatacatccatttgtcttctaagaatttcataaattcattgttttcaatagctgagtagtactccattgtgtaaatgtacgacattttctgtatcaattcctctgttgagggacatctgggttctttccagcttctggctattataaataaggcttctataaacatagtggagcatgtgtccttattacatgttggagcatcttctgggtatatgcccaggagtggtagtgctggatccttcagtagtactatgtccaattttctaaggaactgccaaactgatttccagagtagttgtaccagcttgtaatcccaccagcagtggaggagtgttcttctttctccacatcctctccagtacctgctgtcatctgactttttgatcttagccattctgactggtgtgaggtggaatctcagggttgttttgatttgcatttccctgattactaaggatgttgaacatttttttaggtgcttctcagccattcttcagttgagacttctttgtttagctctgcaccccatttttaatagggttatttggttttctggagtctaacttcttgagttctttttctatattggatattagccctctatcggatttaggattggtaaatatcttttcccaatctgttaatgacctttttgtcttattgacagtgtcctttgccttacagaagctttgcaattttacgaagtcccatttgttaattcttgatcttacagcacaagccattggtgttgtttaggaatttttttcccctgtgcccatatcttcaaggctcttccccactttctcctctataagtttcagtgtctctggttttatgtggagttccttgatccacttagacttgagctttgtacaaggagataagaatggatcaattcacattcttctacatgacaacctccagttgagccagcaccctttgttgaaaatgctgtcttttttccactggatggttttagctcctttgtcaaaggtcaaatgcccataggtgtgtgggttcatttctgggtcttcaattctattctatttatctaccttggactaacatcttaaactgtaagccagccccagttaaatgttttcctttataagagttgccgtggccagggtgtctcttcacagcaatgaaaccctaattaagaccctcacctacttcagaattggggcctggagagactgagatgatgatgatgatgatgacgacgatgacgatgatgatgttaaaaggatatcccgggatatggctggggagagcgcccagttgtgtttgttacataagcataaggacctaggttctgagttcaagcactcatgtgaaaagccaggttagggactcacctgacaggcaacaagagagatccttcttaataactaaagtgggagcagaaaagggagatgccttatgtagactacaggctgcacatgtacacatgtgctcaagtgataatacacacatgggcatgtgagcatgcccacacgacacacataatgactacatgaatacttaacaattcatgaagaaactccatgggcaacattcccagttttcagtccaggtagcctggcacaaggttgtggaatgagaaaataggcagtatagaaaggcgtgaaaactggggaagagagtccactaggaaaagctttcttgtggtagatgaaagtactgagagctcaagaggcatcatgggagctgtaatgggagctgtgcgggatctccattgcactcacctctcaggaggacactggctcagagcaaaacacctaggcatgttctgaattgtcaagttcttcattgccgtgtaaaatagtgtgcctaatgatagcaaataatgatgattagtcatttactcgtgaacttcccatctgtgttcagttccagatccgggtggtttcctagggtaggccagagctcatttgttttgtttttgtttgttttgggttttgttttggaactcctattccctcccccacccccacaccctgcccccaggaataaggtttgctttttttttttttaaaacaagtaaatgtatattctatcacagtaaatatccttgataaaaacatatttgagattgtgagacccatttatgaaagagccatgtgtactatcacatcaacaatagagaaaaagatatgcattcacaggagcgtctgagatggctggcctgaatattcctgaattgtacatatttctttgctttcccacattttccattgttaaaaagctgacagtctgttacacactatctcctcatttaaatgtgctctccccgcactgtctgtgttcgccatggtcctttgtgtggtggttttccaggatagctacacattagcatccctggggaggcctacaacttgctgactagtccctacttagtcattctgattaaagggtcctgctttggggccttgaccttaatgggtttttaggacacagctgatgttaataagtagcgatactcaaacatacctgaatcgaccatgtcaagagccattgtgaaaatcagaggaaggcctctgtggttgagtgcttgcctacctcgcagaggtcctgtgtgtgctttctagaacccaaacctggcagtacacagtagattcagctctagctcaggagggttcatcctgtcttctggcttctgtggacaccggcactcatgttcacatacccacacggttacatagcttaaaaataagacccagaaatagcaactcagagtccaagcctagtacaaaacatcgtatgccaaccgggtgctgaaatgctgctcttgaatacctcttctgtggccacagcctggtgagactgtagcaggctaaattcactggttaaaatgtgtgttagaagcgatgacttccaggactgggcgtgtggctcagttggtagagtgcttgtctacctctcatgagctcctgagtccagtcaccaacatcatataaactacatagggtggcacttgcctataatcacagcactcaagagctagaggaaggaggaggcatatttcaaggtcaaatacatgatgagttgaagctagcctgtgatattgagctcctatctcaaaaggaaaggaaagggagggagggaggaagggaggaaacaatgtcctggtttggtgtttatctaataacagattgggacctagacttcattaagtctccaggtagctcatctcagcagagatacaagggccagtcttcaagagaaaaaaattatatctgaggactgttttctttctttaatacctcatttgattctcacatgaacctcatgagattcaaaagaagcttattttttgaagttacagattaggaagtaggctcagtacaattaaacatctagcccaaggtcatgcagccaatgcatggtaggtctggcaacttaggccatttcacaaatagaccctcatgtgtgtaaatggaaagagcatagccatacaacccaggaaacctctacaagcaagcagatgactgagatgacagatgcagatacccacagccaaccactggactgagcttgggggatccttatggaagagttagaagacagacagaaggaactgaaggagagggcaactccataggaagagcaacagtgccaactgatcagacccctcagagctcccaggaactaaaccaccaaccaaagagcatccgtgggccagtccatggctcctgctacatatgagccaaggactgcctgtctagcctcagtgggaggggatgcgtttggtcctgtggaggcttgatgttccagagaaggggatgctagaaaggttaggtgggagtgggtgggtaggtgggtgagcaccttctaagaggtaaagggggagagggactcgtggaggggagaactggaaggggaacaacatttgaaatataaattttaattttaaattttttaaatttaatttttaaaaagtaattaaagaaagaaaatataaccccccaaaaaatgtgattgtagattaggtgtagtgatacatgcctctaacttaagcacttgggaggctaagacaagggattacaagttcaaggggagcctgtaatacataacaaaataaaaacttaaatgtagatatgataaaccataaatttatgtttgtggctcatacttgtaaactatggtatatgttttattccataaagtacatttaagggttaagaaaagagcttagttttgtttctcaaagctagagtcgtagatctgaaggaaaatatctacattgcaaagaagacgtttgatcttgttggcctttatctctaccctttcccttgaaagaactgaagagggctaaggggtggcaagtctttatccccatggacttgagaactgaccattgtgcgttgtcaagaaccgccctgcttcccgccaccatgaatcatttacgtcttaagtggttcttgaactgttgctgtgtagatgatgtaagcgtgggaagggagttgctgactggaagcacattgatgatcataaatcacgcttaaaagcgctcctgccaacacatctgcttctgcaagttacctgtctgcgtccatccgaatgtgggaggcaggttccacttcattttctgtagataggatatcgaccatgtttgtatgagagatttcatttcctcatgaagtggggttcagcagcctgggaagtgcgtggacagaacatgagaggacaagagaagggtcttctaagccagcctttctctactgtgtgctcattgtcaggccatttacgggtgaccagggacagactggcctggacccaggctggtgctgcctgtctctggctggaaaccagcatcagtgatgtatagaatcgatagagaagagatactggccgttttattcacaattcactccaggtttgccatactggagagagagacagggtttccttcaaaacttgaggtaagcactctttcctggggttattttcattgacagcaatcaatccattttcttctgtgacactgattgtccagagaggctgatgtcttctgtccaggttttcccaaagggatatgggcagcctgggttgtgtgatcagtctcactgccaaactgctcatggtggcgctgggccatgtctgggaaacttgcataaagacaaggcacatcagacgtggatgcaaaatggtccccatctgtgcccacagttgtaagcaaaggaaagaggaatatcagtgacacccttaaaagggaaaaactgtgagcagttaattgcggcttgaagagcagacagggggaactagctttgggtataggaacagcattccatgagttgattgtgtgcattgtccataaagtctggacacattttctagatatatgcattataaaataatattggcataccatttattatggagattcatctatttctatactttattaccacatgaggtctttaattaaaacaaaacttaattgagctaggtagcattctcagtggctgtctgtgtctgtggtagctggcttactctccaaagagaagatgttttatctgcggtagatttgggtcagaggggtagatttgggtcagagatggggtcaggtcttgtttttaatgactttttttaaacatttgttatattttatttaggtgtgtgtgcatgagtgattgagtgggtatgcgcgtgcatgtgtgtatatgtgtgtgtgtgtgtgtgtgtgtgagagagagagagggggggggatgtgcannnnnnnnnnnnnnnnnnnntgtgaatgccagaaggttttgaatccctcgagtgacaagcagttttgaactgcccagtgtatgtattgggaatagaattccagtcttctgaaaaaacagtaagtgcttttaacttcttttgtttcttcttttttttttattggatattttctttatttacatttcaaatattatcccctttcccagtttcccccactctggaaaccccttatcccatccccccccaccgcctacttctatgagggtgttccccccacccacccactcttacctccctaccttcatattctcctacattggggaccaagggcctctcctcccattgattgctgacaaggccaccctctgctacatatatgactaaggccacgggtcactccatgtgtacttcttggttggtggtttagtccctgggagctctgggtgtgtggttggttgatgttgttgttcttcctatgggttgcaaaccccttcagctcctccagtcctttctctagctcctccattgggttccctgtgcagttctggttttattcagccagtttgatggcaccacaaggcactatacagtcagcatgctgttttcagaacagtcatcccttgatattcatgggagatgtttttcaggatgttctacagatgtcaaaatcagaggatattcagacccatgtataaaatggcatagtatttgcacataacctatacatatacttctatttactttaaatcgtctctaaattacatgtagtttgaaaaatggaaatgccacttggcctccataggctcaccatatttaaatacttgggctccaattggtgggactatttgcgaaagatcaggaagtaagaccttgttggaggaagggcacgctttgcgggatttcagaagcccatgataccccttattagctctctctgcctcagtgaatggagatgtaagcgcttggctactgctccagtgccatgcctgcctgcctgctgccaggttgcctgctataatcggcatggcctctactgatctgaaagggaaggtcccaaacgggctcttttccataagttgctttggtcacagaatagaaaagtaactaagacaccaggcaaacagttggtacattgtaattgtttgaggataacaaaaagaaaaaaaggttgtatatgctcacaactgatacttttttgcttatgaatatatttggcaggaggctagttgtatccatagatggagaccctcagggatttgggaggcatagtatatatatttaatcccttaccttctaaatatttgctaaaactcagttgttggtttttttttaaatattttttaattttatgtatatgtgtgctttttctgcatgtgtgtctgtatgccatgtgcaaacaatgcccaagaaatctgaaagaaggggtcgccccctggagctagaattaccgatggtttaagccacatgtggatgctgggcacagagcagcaagtgcccttaaccactgagccatttctcctgctgaaggcaattgctctgacacatgctaggacatactgttaaggcctcactgttcccgcctcgtcagagggtgaagtgagtggaatggtggtgtggaatgtcaaatgcatgtatacgtggtatggtatgatctgtctaatgaacacatgtgcagtgtggcctgtctaatgcatgcatgcacagggcctgtctaaaacatgcatatgtggtatggcctgtctaatgcatgcatgtgcagtgtggcctgtctaatgcatgtatcctggaagtgttttggttgcactcagagagctggcagaagtcacaatctggcctccattccctgtatttttctgtgattttttttttctctttaagttcaccagtacaagaaataagtgccagattttatatcagataaagagattaaagaatgagttaataagatccctatgccatctgaccagtaaagtggcatattccagtgactttcctgagggaacaattttcagtgttttttcttctgtatacagtagggggaaatcttaatctacaaagttacaatattgtttagtttgtcatatcagctccatgatgagagcttagattttggtatagctgtacagaagggcgtagtcgtctgatggagagttgtgggtatctatgagtgaacgccttctctctgagatccagggagtctagcaaactgtcgaacttcatatacctaaaatgaaatcacatttaaagtgaataacttttaaataccattattaaaagtcatattgtcactataatatacataaatttcttttttaaattcaggcagatgtctaaaccactattgtgaaggtacttgctttaattatgtagcctgggatatacctgtcagaaatatgattgtaaagtatgccattgattgatgggcaaatgtttcatggattttggcatatagcaaggcctgccatgagttatccgtccacgtatttgaattctcaggtttctatgaaggaaatgaaccagtgttcctgcctctttgtcagttctcccttggacctatgaattatgatcttctcatctacagtgtacagatacccagcctacccttctgttccacatgtgtcctgttacatcttctctccctgcggtcttgccttactgtctcccatcactagctgcacagataagacagatcagtctgccgtagcttcatcctttaaggtctgttatactgtctgctaagcactggtcccatattatgtttgtagtctctagctagtctgcattctgccagatctggccagcccttacgttcttacctgatgctgagagaattttctagtatattgatttgttcatatcattctttaaaatattacattgtttcttctgaacatgggtccagacacttttgtgtccttagcatggcatacagagtctctagagatgagactcctgatggtggattagcctgctttcctacactttcctaggttctagctgagcacgcagtgtgctcagatgtgtcctgcagccttgcgtgagctatccctgagtccagctactaagtcctgctttacttttcagtgcctcccttctctgagaagctgatgctgattgtccgatgccccacacaatatgctttaaaggctttccacttccattcccataatgttatcagcttcaagagcgtttcatgctgtattgtcttaatacctacttcccagtggccagcattaaatctactctgtagtaaccagatatttgtgaccttgagcaaattcagtgtactgtctgtctagttgtcttcatccagatagcaaatcttttctcatagagtttcaggagataaaagaacatacagcatcaacccaatggtcggcacacaagtagagctccatcatcactgtcttctaatgttatagtccgcccaaagagtgtgcacaggacactcgctcaatgtatatagatctctattgagttaaaaaaaaaaaaaaaagagctgggcggtggtggcgcacgcctttaatcccagcacttgggaggcagaagcaggtggatttctgagttcgaggccagcctggtctacagagtgagttccaggacagccagggctatacagagaaaccctgtctcgaaaaacaaaaaacaaaacaacaaaacaacaacaacaacaaaaaggatttgacaaattatcgaagaggaagtttagaaagattttaggatatgtggtccttgtagttgtaatactgtaccccaggagaactaggaaatcctctaaacattgcaagtgtatttaatattaacaaggtaaactacaaaaattagaccttttatttgtgaaaaatattaggattgttaagatatatgccaggtaaggggaaagatattcattgttcgtggatcaagagatgcaatccctcttcaaattaatcagtaactacaacacacctagtcttcaaagcttttttttattattttcagaaaaactgaaaatgttgagagtattctccctactttcttcacatttactatgtcatgtggacagagacactcacaatctttttgtactgagctatcttttcaagaaaatttgtgatatgaatatctatgaaggaaagagatagcacttccctgcaaacaaagagtaggcttgttttattgcctgacaagatattgtctccttgcagcggaaggctgcattaaggacaacacaagatccctgtacactgttggcgtgatgcaaacctacagcagtcatggcgtccaccaggcctttctctggcgccactggaatgtgagcatcaggcagaagagacagaggataaaacctgtgctgattgtctttctctggcacccataaagatgagcaggtcactatgttaacttggagttgcagaggcctcaggggttaggagtactggctggatttccagagccctcgtgacaaccaagaactatctaactccagttccagggatctagggtcctctttggcctcgaagggcaccaggcaggcatacaatggacagacgtatatgcaggcaaaacaagcacactcatagcatacaaaaagtaaaaaattaaaagtgtgttagcttgagaatttgatgaaatctgagatctctttcaattcttcacagaattcaggaatccctacttgtaaaagtcatttaacatactgaattataagggtgaacaattaaaatgagtgcaatgcttactcaaaaaacagagcaaatcggccagctattactgtcccccaaaggaaaattgtttgctgattctacttttctctctcctttaagatgacaaatgtacctcttcaatatatctgatgcctttcaccctgacaatttctgtgaccttacctttgttagaatttagcatttctgggcttttctattgacatgttaagctgtattttcccccagtatttttatgtacagtgtggttgtttaaatatttgcattaaataagcaagacagtttcattcaggctctttcctttgagaaagctctttccagttcttttctgtgtcaccatgtcctgctccctcttattacacctaaatatatcatagtcatttctctgtttactcattgcaaggataaccacattgtagggtcaaatgcattagagggagagatagagggccattaataatgattatggagtgttgtcttagtgccaggagctactgtttgggaggtaatggacactggggaaattaaagatcataaaaattgtattaatgtccagttgtaactttaacaaactgctatcacagcacagtgttccaattttcacaaacttctaaatcacttggtgactttgagtccttttgggaaggaattgctatataaataacacacagacaacggggcattttccaaaccaaagctctttgggatactagatattgagtgatttttgataaaaacgagttatggctgcacaatgtaaaaataagagtaagactttatttgcagggatcttgagcttggaatcactaatgattccaatcactatgtacacataattgaagggtactagtgacaactacaatgtctttccatttttataactgtgacaccccccctaaaatcatggtgaacagtagaaagaattgttctatggattttcatagccactttaggtctttataaccatgttttagtatctagtacatgaatgactgcagtgtcctctccagctgagggcttgcttatctgcctcagtgactggaccctgggtactaatgggcatcattgcccatgcgtatatccccagtgctcgctgggctgtctctgggaccttatgcaagtagagccatgctctgtgtatcttgtgacttgcttcttttattcagttattttgcatctaactgtagtttatttttgttgctttgtaaactagtgttttatgactattcaaagatcatctatccagtcaccattgatgttaccttaggttttattgtcttctttgcttgtgaatagaggactaagtatacacataccacacacacatgcacacacactcacacatgcacatacatacacaccctctttaaaatggggaccagcaaactcttttttataaatgaacacttagtacataatataggctttgcagagtacattggtctctgctatctatcctttaaagaaaattgtaaaaaccactcttggcttgtaggccatagtttcttggaactgttctcagataacacccaagaggagaaatgtctatcatcaattatagacacagccattctgacatgaaatgggaattgttttcagtgagattaagcctacttatcctccctcccacaagcagtgggagagagatcccagcatgcatcatccgtatcacaactgagtgttatcatagtcttcatttgctggtgtgtgacagtccttcccactcaagacggagcactgctgtggtgtgtgacggtccttcccactcaggactgaggatagtaaacttgaccttgtggtaaaagaaacttttcaccttgcttattcaaagttttgtggatttttctttcatttttaactgtatattgttcatcttaagctggtgtttgcatatgatatgaggtatgattgagaaactacacttcattaaccagttgtctgagtatttttaatgacactcaggcagtgcatatggattccaggataagctgaaattaaatagtaagtgaacatgtagctgaaatgaacatttaaacacaaggacacatttttccttttcctacaatgagagcaagaactagcattgggcctcaactcctttaccatagtcctatctcagaaaagcaaagcaagtgactttccctttatattactcctatctctatgttctgatttaaagtatgctttcataatttattctgttattagctactgtatgtcagccatgttaaaaatatgatatgcctgctaaagcaattagcgttgtatatgaaaaagatcacagggccctaccaccaaaaatctaacaaacaaaacccctcctgctgtaatgtaaactgtaacattgaacaacttcccatgctgactgtgaagcacagtctgttgattgcattgacaactcggctttgtatctagaagactcagtgtgaccaaacaagccttaagtttatttagcattattcttagttctaaggcacttggatataggagctgtgggcagacctcagctctggcacactgtcccttgtggccttttcacagaaaggacacatattctcgtgtgtcgagactgggcaggaatggctagtgtttccttgagaggtatcctggggcaggtgtggtgttttgaactctcatgttgactacactcgtagagcacagtgcaagttttcaacacagctagttaatctgcactacatgttgctcactgtaacgtgctctttgttggatactttcggattggctgtatgtcaagctggtgaggaagcttaattctcctgcatcttcagaacggcttgataatgcttgctttatagttcactgagtacggtaccgtgctgtttccttctgttcacccagcaatgagaaaatagctgcatcaagcagtattgtaatgaattttcctagcccaaggagctgccgtttgcttctaattgctatgtggagcatgaaatcagagccccaagttcctcagaacttctgcaaaagaaggccccatagtcacccagctacctcagagaacgtacagcgtctcttaaagagccttctcaatggcacttacgctcactgccatgccatatcttatttggctctattgcctttaactgaatttctcaagagtaatccatttgtgttcattggcggaaactcacatcaatgtatgttacagggacgtccactcattattagctaatgcttttgccacactgtacattttacttcgagagttgactaacgtgagctaggatgtacattaagaccttagtggcactttagtaatgtcactttgtatgtgcatcctacaagcaggtcactggggagaaaccctcagagactacgacgagatgtaagtcctaggtggctgcttctcattaaacagaaaagaaagattccctcagataattacccaagtaggaaaggaactcgaacataggagttcttggtagtaattacgaattatcacccacacataaaagatctccttctgctttctaaacgaaagtgaacatcactaagtattttctttgaaaaaaaaatatttaaagcatattacttaaaaaccctttaagtctttaataaccatcccaaattgatttcatgtaaccttctgctactacttgataaaaattttcagtgtagcaaatgcaatttccttgcttaatcacaattctaaatttagcctcaatacaaagggaagtattttctctctgcctccagaaagatggcatagacatactttcctctgttctgctaagtccaactaaaactcaatgtatagtatatgaatcaaacataggattctaaagatgacgaggaatcaagaccctgtggaccctgcgcacaatccaatgatacatgtcctgggtttccttccacttcacataccccagatctggaggagaaaacattattgagaaaacaccaacataaactaattaacaagcaatcacacagcagcaccagtaaaatagaaagtgttttctgtagttaaattgccagaatgtgatggccttgacaagaaacccttaatcaacagtccccactctaaggcactgttctagagaaatgcacggctccattccgacagcagtcactggtgggaagcagcaatcggccacgcctgctaggctgcagttccccagccttcctcactggtggtgtcacagacaaaagcattcctttcaggtgggtgctaataaaaacctgcattccatctccatacaagtaaagaacatagagaggcctggatgacccacttccaatagtgtggccctttttcttctcctactgaagtcagaatacatcacacaagaaacaatgggtgactcctccgagccaggaaagcatccatgaaggccgaatagagactcagagtctcactcctgccaggccttcagaggaagtcctcccctcagacatcagtggagttgtgctagggagtcctaatgacaccttccttctcccacccctacccagcttccttagctggagttgatatcgaaagaatgcaagggatccagcaatttctaccatatttccatatgtccacattttgatgaagaacaaaccaaaaaacaaaaccaaacagcaaagtcaaaccatgttacagaaggaacaaggcagcctctggggagagaaggctcagtcagtggaggccagcactagatgacagatgtgagagctgcccgctaaagacgttagagcaccaccatgaaccaggagctacaaatgtgaacattgacccctagcaagcaagtgggaaatacagtgaagatctcgtgccctcctggaatggaaaagtctaggaaccggaaggaaggcctcagtggagacactgtagaaccagatggagggcacacagcacaggtcagtgagctgggagttagaaccatagaaattattcagtcggaacaatggagagaaagtagactgaagaataaaataaaagaaccccaggaatggtaagagtgtgccaaaaatctaacattgtatctttggaacaccctaagaataggaaaaggcagggaactgaaacacatctgagtaagaaacgaaaacctacaaaatttgaccagaaatttgacagacataagaaatgccatctagttgcctggataactctccctgtaagccttgatcctaaaactgtgaatgcattgttgtatatgataaaaggacttcccaggggtgatgggatttttgagataagaaaacaccttgtgtcataagagttctcctaagaaacagacagaaagggcactgggacgagtgctcagcagtcaggcctgcaaggagcactggaagctgtgaggtcaggaggtggatctgctttggacttccaggtcagtgcagaacttcttacctctgcatctgaaagacaatcaattcaagatagtttaagctctgaaacttatgaaaattccttacagccacagtataaaactaatctactgatttaacctcagacaaaaggaagccatgccatggtgcaccatgcccctgaacagagtgccaaggagacaagcctgggaagcatgcggcgtggctgcagtctgaatgccagtggacagaaactacaaagaccaaaaggacttgacacttcagtattctaagtgatgtaagagctgtctccccagaatcctgtttcccatgaaaataccctttaggaggaaaaggaaatcaaggtactctctggtgaaagaaagcaatcaccagtagatctctctaagggatttgctaaaggacatgccctaaaaagagataataatcttgtaagatcaagaaacttaaaaaaaatgcagtgaatataagtatggctgaagaatataggatttccaaaggttttgttgttgctgttgtttgtttgctgtctttttcaaacagggtttccccatgtagccctggctgtcctagaactcatgtagaccaggctgaaactcacagagatccctctgcctctgcctctgcctctgcctctgcctctgcctctgcctctgcctctgcctctctgcctctgcctctgcctctgcctctgcctctctgcctctgcctctgcctctgcctctgcctctgcctctgcctctgcctctgcctctgcctctgcctctgcctctgcctctgcctctgcctctgcctctgcctctgcctctgcctctgcctctgcctctgcctctgcctctgcctctgcctctgcctctgcctctgcctctgcctctgcctctgcctctgcctctgcctctgcctctgcctctgcctctgcctctgcctctgcctctgcctctgcctctgcctctgcctctgcctctgcctctgcctctgcctctgcctctgcctctgcctctgcctctgcctctgcctctgcctctgcctctgcctctgcctctgcctctgcctctgcctctgcctctgcctctgcctctgcctctgcctctgcctctgcctctgcctctgcctctgcctctgcctctgcctctgcctctgcctctgcctctgcctctgcctctgcctctgcctctgcctctgcctctgcctctgcctctgcctctgcctctgnnnnnnnnnnnnnnnnnnnnnnnnnnnnnnnnnnnnnnnnnnnnnnnnnnnnnnnnnnnnnnnnnnnnnnnnnnnnnnnnnnnnnnnnnnnnnnnnnnnnnnnnnnnnnnnnnnnnnnnnnnnnnnnnnnnnnnnnnnnnnnnnnnnnnnnnnnnnnnnnnnnnnnnnnnnnnnnnnnnnnnnnnnnnnnnnnnnnnnnnnnnnnnnnnnnnnnnnnnnnnnnnnnnnnnnnnnnnnnnnnnnnnnnnnnnnnnnnnnnnnnnnnnnnnnnnnnnnnnnnnnnnnnnnnnnnnnnnnnnnnnnnnnnnnnnnnnnnnnnnnnnnnnnnnnnnnnnnnnnnnnnnnnnnnnnnnnnnnnnnnnnnnnnnnnnnnnnnnnnnnnnnnnnnnnnnnnnnnnnnnnnnnnnnnnnnnnnnnnnnnnnnnnnnnnnnnnnnnnnnnnnnnnnnnnnnnnnnnnnnnnnnnnnnnnnnnnnnnnnnnnnnnnnnnnnnnnnnnnnnnnnnnnnnnnnnnnnnnnnnnnnnnnnnnnnnnnnnnnnnnnnnnnnnnnnnnnnnnnnnnnnnnnnnnnnnnnnnnnnnnnnnnnnnnnnnnnnnnnnnnnnnnnnnnnnnnnnnnnnnnnnnnnnnnnnnnnnnnnnnnnnnnnnnnnnnnnnnnnnnnnnnnnnnnnnnnnnnnnnnnnnnnnnnnnnnnnnnnnnnnnnnnnnnnnnnnnnnnnnnnnnnnnnnnnnnnnnnnnnnnnnnnnnnnnnnnnnnnnnnnnnnnnnnnnnnnnnnnnnnnnnnnnnnnnnnnnnnnnnnnnnnnnnnnnnnnnnnnnnnnnnnnnnnnnnnnnnnnnnnnnnnnnnnnnnnnnnnnnnnnnnnnnnnnnnnnnnnnnnnnnnnnnnnnnnnnnnnnnnnnnnnnnnnnnnnnnnnnnnnnnnnnnnnnnnnnnnnnnnnnnnnnnnnnnnnnnnnnnnnnnnnnnnnnnnnnnnnnnnnnnnnnnnnnnnnnnnnnnnnnnnnnnnnnnnnnnnnnnnnnnnnnnnnnnnnnnnnnnnnnnnnnnnnnnnnnnnnnnnnnnnnnnnnnnnnnnnnnnnnnnnnnnnnnnnnnnnnnnnnnnnnnnnnnnnnnnnnnnnnnnnnnnnnnnnnnnnnnnnnnnnnnnnnnnnnnnnnnnnnnnnnnnnnnnnnnnnnnnnnnnnnnnnnnnnnnnnnnnnnnnnnnnnnnnnnnnnnnnnnnnnnnnnnnnnnnnnnnnnnnnnnnnnnnnnnnnnnnnnnnnnnnnnnnnnnnnnnnnnnnnnnnnnnnnnnnnnnnnnnnnnnnnnnnnnnnnnnnnnnnnnnnnnnnnnnnnnnnnnnnnnnnnnnnnnnnnnnnnnnnnnnnnnnnnnnnnnnnnnnnnnnnnnnnnnnnnnnnnnnnnnnnnnnnnnnnnnnnnnnnnnnnnnnnnnnnnnnnnnnnnnnnnnnnnnnnnnnnnnnnnnnnnnnnnnnnnnnnnnnnnnnnnnnnnnnnnnnnnnnnnnnnnnnnnnnnnnnnnnnnnnnnnnnnnnnnnnnnnnnnnnnnnnnnnnnnnnnnnnnnnnnnnnnnnnnnnnnnnnnnnnnnnnnnnnnnnnnnnnnnnnnnnnnnnnnnnnnnnnnnnnnnnnnnnnnnnnnnnnnnnnnnnnnnnnnnnnnnnnnnnnnnnnnnnnnnnnnnnnnnnnnnnnnnnnnnnnnnnnnnnnnnnnnnnnnnnnnnnnnnnnnnnnnnnnnnnnnnnnnnnnnnnnnnnnnnnnnnnnnnnnnnnnnnnnnnnnnnnnnnnnnnnnnnnnnnnnnnnnnnnnnnnnnnnnnnnnnnnnnnnnnnnnnnnnnnnnnnnnnnnnnnnnnnnnnnnnnnnnnnnnnnnnnnnnnnnnnnnnnnnnnnnnnnnnnnnnnnnnnnnnnnnnnnnnnnnnnnnnnnnnnnnnnnnnnnnnnnnnnnnnnnnnnnnnnnnnnnnnnnnnnnnnnnnnnnnnnnnnnnnnnnnnnnnnnnnnnnnnnnnnnnnnnnnnnnnnnnnnnnnnnnnnnnnnnnnnnnnnnnnnnnnnnnnnnnnnnnnnnnnnnnnnnnnnnnnnnnnnnnnnnnnnnnnnnnnnnnnnnnnnnnnnnnnnnnnnnnnnnnnnnnnnnnnnnnnnnnnnnnnnnnnnnnnnnnnnnnnnnnnnnnnnnnnnnnnnnnnnnnnnnnnnnnnnnnnnnnnnnnnnnnnnnnnnnnnnnnnnnnnnnnnnnnnnnnnnnnnnnnnnnnnnnnnnnnnnnnnnnnnnnnnnnnnnnnnnnnnnnnnnnnnnnnnnnnnnnnnnnnnnnnnnnnnnnnnnnnnnnnnnnnnnnnnnnnnnnnnnnnnnnnnnnnnnnnnnnnnnnnnnnnnnnnnnnnnnnnnnnnnnnnnnnnnnnnnnnnnnnnnnnnnnnnnnnnnnnnnnnnnnnnnnnnnnnnnnnnnnnnnnnnnnnnnnnnnnnnnnnnnnnnnnnnnnnnnnnnnnnnnnnnnnnnnnnnnnnnnnnnnnnnnnnnnnnnnnnnnnnnnnnnnnnnnnnnnnnnnnnnnnnnnnnnnnnnnnnnnnnnnnnnnnnnnnnnnnnnnnnnnnnnnnnnnnnnnnnnnnnnnnnnnnnnnnnnnnnnnnnnnnnnnnnnnnnnnnnnnnnnnnnnnnnnnnnnnnnnnnnnnnnnnnnnnnnnnnnnnnnnnnnnnnnnnnnnnnnnnnnnnnnnnnnnnnnnnnnnnnnnnnnnnnnnnnnnnnnnnnnnnnnnnnnnnnnnnnnnnnnnnnnnnnnnnnnnnnnnnnnnnnnnnnnnnnnnnnnnnnnnnnnnnnnnnnnnnnnnnnnnnnnnnnnnnnnnnnnnnnnnnnnnnnnnnnnnnnnnnnnnnnnnnnnnnnnnnnnnnnnnnnnnnnnnnnnnnnnnnnnnnnnnnnnnnnnnnnnnnnnnnnnnnnnnnnnnnnnnnnnnnnnnnnnnnnnnnnnnnnnnnnnnnnnnnnnnnnnnnnnnnnnnnnnnnnnnnnnnnnnnnnnnnnnnnnnnnnnnnnnnnnnnnnnnnnnnnnnnnnnnnnnnnnnnnnnnnnnnnnnnnnnnnnnnnnnnnnnnnnnnnnnnnnnnnnnnnnnnnnnnnnnnnnnnnnnnnnnnnnnnnnnnnnnnnnnnnnnnnnnnnnnnnnnnnnnnnnnnnnnnnnnnnnnnnnnnnnnnnnnnnnnnnnnnnnnnnnnnnnnnnnnnnnnnnnnnnnnnnnnnnnnnnnnnnnnnnnnnnnnnnnnnnnnnnnnnnnnnnnctctctgcctctctgcctctctgcctctctgcctctctgcctctctgcctctctgcctctctgcctctctgcctctctgcctctctgcctctctgcctctctgcctctctgcctctctgcctctctgcctctctgcctctctgcctctctgcctctctgcctctctgcctctctgcctctctgcctctctgcctctctgcctctctgcctctctgcctctctgcctctctgcctctctgcctctctgcctctctgcctctctgcctctctgcctctctgcctctctgcctctctgcctctctgcctctctgcctctctgcctctgcctctgcctctgcctctgcctctgcctctgcctctgcctctgcctctgcctctgcctctgcctctgcctctgcctctgcctctgcctctgcctctgcctctgcctctgcctctgcctctgcctctgcctctgcctctgcctctgcctctgcctctgcctctgcctctgcctctgcctctgcctctgcctctgcctctgcctctgcctctgcctctgcctctgcctctgcctctgcctctgcctctgcctctgcctctgcctctgcctctgcctctgcctctgcctctgcctctgcctctgcctctgcctctgcctctgcctctgcctctgcctctgcctctgcctctgcctctgcctctgcctctgcctctgcctctgcctctgcctcctgagaacttccctaagttttatatgagagtgacacacacaaatttgtaactgtccgatgtgcatgcacaaatggataacaggacaaagaaggataaaggttcataggggagaatattaaaacagaaaagatgaaaaaaatattgggtgtaatctcagaagagcttgtgcattgaaacttgggtactgatgaagcagggtgtggtcatggtgagaccccgtgtgctgatgaagcagggtgtggtcatggtgagaccccgtgtgctgacgaagcagggtgtggtcatggtgagaagatcccgtgtgctgatgaagcagggtgtggtcatggtgagaagaccccgtgtgctgatgaagcagggtgtggtcatggtgagaagatcccgtgtgctgatgaagcagggtgtggtcatggtgagaagaccccgtgtgctgatgaagcagggtgtggtcatggtgagaagatcccgtgtgctgatgaagcagggtgccgccgtgggtgagaagaccccacgtagtgaagatgctgattcctccagagctgctgtgctggcttaacacagtttctctcaaaatctcagcaagagttttttgtagacctaggcaaaattatcctaaaatgtatatagaaagaccagggctagaataactctaacaattgtgaaggagctgaacaagtggcatcgaaagaaggatgaacatcagaggaatcagatagaaagtcagagctgagtcatacaagatactcactcacctgaggatagatagacccaaaagcacttacatgaaagaataaataagaggaaatactgataagtaagatgtctctaaaacctgcctagcagaaaaccttgttaggggtttgaaaagacaagctacagagtggaagagaataattgtaaagcctgtttgcaaaacagagggctagggaaactccagcaacaggaacaggaagtgatgctgttagagcatactcacgggtatatggcctggaggggtaacttagcactcacctcgcatgcttaatgttctggattctattccacacaacacaagggcactgtgagaaagaagaaatgggccaaaggaatagacattttattaaaagtggggggtatacaggacctcaagtatattttgttgacccatttaatgctagtaaagttgttttttgtttttttttgttttttttttttttgcttatattggtagcatatatttaagcattgtaaagtataatagaaactccagatttctaacttctcttaggaagaaatagaaaattcactcccaaaatacttccccaaatcataactgtctaagggttgctcttccatggaaggcttgtgctcctccgcactgtccccatcagtgtcaggtaacattctgagacactgaaaggaaacaggagccagcagctacatttttctccttccccttgtgggaggctatcttctttattgttacaattactgtaacatttcttgctaaagatttcctagtggtttctctggggtttcaacagaaggcttgtggctgattatagttcgtgtcttacatgatttggttcgtgtaagaggaaatgtttcctcagtgtctgattttctaatgagccattttagttctataactcagagcctcccacccgaccgactcttgctggtctctcttcttaggggacccgaagtggaaagactttcctgggttttattaactcggtctaaaggggttaacacaaaggaaatagaagaacgttacagaaggaatttactatggtggccatgattaataagctattctgattgagaaacttggcaacacttagcacattttgttacaaagtagacatcagaagtaaagccattatgtttgatattgaactcccaagtaacttggtattttctaagcacaatagtattgcgtactatggtacagttagacaggctgtttgtctgagcaaggagtatatggcagaactaaaaggaaagtagatggttagtgcaggattgaaggatggccagagtccatgactgtaatagcctttcaggctacctagagaagtggcttccgtgttctatttggcttttcccatggatccaaagtaagaatggaggactagggatataatcagtaggcgagcacttgtctcacgtggttaagacctcaggttccactcctagccccgtcataggtactaggataaggtggccactagagagatctctcagatgttaggacttgcggctcttgcaatggactggagtttagctcccaatgcctacactgagtgacccacaattacctagtgtcagctccaggagcatccaacactgtcttctgggattctctggacannnnnnnnnnnnnnnnnnnnnnnnnnnnnnnnnnnnnnnnnnnnnnnnnnnnnnnnnnnnnnnnnnnnnnnnnnnnnnnnnnnnnnnnnnnnnnnnnnnnnnnnnnnnnnnnnnnnnnnnnnnnnnnnnnnnnnnnnnnnnnnnnnnnnnnnnnnnnnnnnnnnnnnnnnnnnnnnnnnnnnnnnnnnnnnnnnnnnnnnnnnnnnnnnnnnnnnnnnnnnnnnnnnnnnnnnnnnnnnnnnnnnnagagcttggttataaaggtggctttctgaggtgaggctgggcctcagcaccctgcatatgctgacctcccccaaatgtggaaacaacccactgcataatttatggtattggggggctgctcccctattattatgaaaagaaagaaatatttagcaaagaaaagaaatttacataaggaaaagtagaaagagaaagaaagagatggaaaaatgaaagtgctacttgggattaaagctcgccatctggctgctaatttatgtgattgctgttggaaggagaggttctagtgaccttatgccccagcatctgtaagaaagaggataaaggagtgggtgaaaggagtggaatggaggcaggggtgagggtctgagtgtgaaatctagagctgaactgttggaattgtctctgtctctcactgtcctagctctgacctctccatgcttcagttttctcctctgtgagtgggaatcacgcagtctccgtaggagggcgatgttgtcagagaatgcagtagtgcccggtgcgttgtcagccacagcactggctgctggagaggacaggcacaggctcaagaatggcagaggctcgcacttgacagagccatgcttgggcttgggactttgtcatccgtgagtttttcctgatgtctcagtagaacacctatttctgcctttagatatttgtcctgacttagcctatgtgctaaactcagatagctcagtgtgttcaagacacaccaattcgtagcatagaaagaatactttggcaagaccttggccaggaaagagacctaaggttttatttgttcattcctaaggcccagcaaagagaagtctcccacatacaaggaattagttgactggcctcagcttttgctgttttgtttggagagtacggttgttttggagtactgttgctgctgttgttgtttggagacattcttacttaggctggctttaaactgtagcccaggctgagttaggctcagagcaccccctccagcagtctcttcagtgcttactcatagctcctgccttagcatcaagtcttttcagatatttgtttttaaagtatcattaataatagattttaaagttttgaagttgattttaaataggttatattcactttgccagaataaacaggtacatgaaaaaatatacaactaaataatgtatgcccagaaaaccgtagaactacgcgatgtatacaaataagatacaactaaataacgtataccaaaaccatatataccaccccctccaaaaaaacccatatataccacccctccaaaacccatatataccaccccctccaaaacccatatataccaccccctccaaaacccatatataccaccccctccaaaacccatatataccatcccctaaaaaaaaaaaaaaaaaaacctcgaccatagccagcagaaaccttccatggttttaattttgagtgttcagagccctttatagcagtggacctgtacaggtggtctggatcttcacggatctatttcctgtttcatgagcttgatggttgtgggaccacaggcaccagagcagtgatgcccaagtctgagaggctggagtcccatctcagggagctgcccttcctcctctcccagagctctgctgagctcatccgagtctgtttcggatgtaaagaaggaccagcataagcaaccagcattctgactcaagagagcagaaagaccggtttgaactgggtaggtggggagtcggaaagatcaagtccagggggaggtgacagattgatagcatcctgtgccaaagtcccaactcacaagggagtcagatgagccagggacccctcagcccttcccagagagccacggtttatttaggaagctctagaacctagatcaatcaatccccttgcactgattctcagtgtgtcactttcagcaacattttaatattcttcctacatcctgagttattgattgaacactctcatgttttttaagcccacctccttcagcacagcacccttgaatcccatgcatacttttatgattcctaaattggtagacgaaatgttagttacggacaaaaatacaatctcttcacacctggaaaaattaatgttttttttttccccagaaaaggtaccatatgatgggaggagaccagttgctatttgcttgtgagtggagagacggatgtctgccagacagagtaaagagcctgcctgtccctttcagcctcctaaaatattagtggtgcaacactgatgtaatctgaatattattgaatatccttcacattctggctactttcacagctgaaatctagagggaaataaccataatcaaattctcctgcttagaaattaatgttccgagtctgttttaggaaatatataataaccgcgctgtcagggtatgggaggggctgctttagaagatgcctcagaaaacttacaggccagtggcaactcaaatacagttctgggattgttagtgattctaagctgatttgcagtgcacatccttgtggctttggcagtttggtggggctctcaaacgccaaggcaacgctttatgtaagctatgactttaaagcttgtcataaggtagaaaatggggtcagagaagaacagtggtcagggctacatcactggaccacacatatgtagaagtccagaaatccagaagctttcagctcactgccaaaaagcagagtgtccagtctcacacgttatctgtgtcttcactcccccaaagcagcatgtgatgaacaagcctactcctgagcaatgctcatctctaactccatcccagcatcttggaaatgtatttaggccattggaagaatgccctatgtcaggtagagtgatggcttggttgttaagaacatgctctgttcttgcagagaacctgacttcaactcccagcatccaggtgcggcagtgtacaaccaactgcctgtaactaactcctgctccagaaaatgccttcatctgaattccataggcaccagctctcacgtgtacagaaacctccatgcagatgtatatacatatacacataattaaatctttagagaaagaatacagaccccatgacaagcaaacacaagcagtctgacatgcttctctatatggcacagagtgtggcttattctcatcttaaatcccaacaccccatagtagggtcagagaagaaaagcattgcggagtgagccaaaggctgtacaacactggaatctagatgttggagtcccacaaaaggacaggttactagttccacagcctgtctaggcctgataccttttcacttgtaaaatgacacagttgaactggacaggccttgagtgtatgcttcctcgactaacatgcataggaggaactggggtgtcctgtaaattgcagatcctgactcagtaggtgtgacctgcggcctgtgttttgttttcctgtagaggagtcctgatactgctctacaatgctcacactgctggtccactgatctctcagcgtttagttagttctgtgcatgtgtgtctgtcaactagatggctctgtgacattgcaggaaagatgggggctttcaccagtgaccctcccatggaatcaacagtcctcattcttcataattaatctctatcagacactctttactatgtaattatgcataacaatttcatgtgcacaccagaaagcactgatagatttagtcccagcttaccagacttgacaacagaagacagaaatatgtataaagacagtaataaatagtaagttatgatatatgcccattcagacattgagtacattcaaatagaacaagcatatatttagatggaccatagaatatttgtattcaacatcttttttttttccttttaatctctggtaaatgaagtatatttctgacataaaacaagatttctgtttctctcttcctggtgagagctgggagtggcaaggtcaatttctgaactgctttttttgaagactgactgattctggcctcctcagccccaaaccttaaccctgtgactgactgtgcagctgcctcggcttaacttggggttaaaccccgagtgtgtcctcacaggttcattgactgactctcagtgcttcctgtccagggctttgacccagccgtcacccttgtgaatcagcgtgggaagaagtggacagcactatctctgaatcacagagctgtgggcactaccgaggagggggccagcgcatccgaagcctctcggtcattatatcagaggaaggctggcttggtactcgctcttctgtacacacaggtctcatgacctagcctgaggatgggatcgaaggagcaacagtaggcagcattgacccctgaaggcagagctggatctactcctgagggccatccagacactgtgctggaaacaacatctggtacccatggtgataagccagtttattagaactgaatccctggttagaagagagatgctaggatgactcagggaactgatttattctaactcagcaaggactgaattatcacaggtctgttctatctactcaagggtttcccaactaaatactagtagtgaaattagaaacccttcatttaaccttctctgactcatgtgaacacatgtgataattaataatggtcctatgcacatacataggaatacagccatgcagagaaaacaatacataccatgccctcagcacacagacgtgcatccatgggaggagaggagtaactgtgaaatctgatacactgttttgaaacgtggccctaccactgcaggctgcatcagttcgcctttcagactgcagctgttccacctgcagggtgatgttggcgtggcttccgtgcagtatgtgtgtgcactgtctgaggtgcagatgggtggagttatgtagcatgatgtctgaaaacctaatcacagtcagcaaccataagaaacctgattatgtgacagcccctgtgaaattgtgcctcaggggaaaaaatagaaagaaagcgtccacgtttgtgtttgtctcttgcttcgtatgcaggcctttgtgcgggaggttgtgtctgggttcataaaatgtcacgctgcttattaggaatgaagctgtggtgaggacaaagcctgcattgattaggtaggctcagccctgttcactcagttttgtcacacgtagctgttgtttccctgttaactatctatacataaacctagcaataaagggtgaaagcagcctgctcatattaaggaaaacacgaacccatagatgattactgaattggaaagctaaatcttaaaaagccataaatgacagtccatctactttgcaccaatgcctcttactgtctctctgagcatacagagttgtacagacatgacaggatgccgcacatcccgctaaccgctcacagggaggtaaggagaatggaggagtgggtctggactgtggtcctgggaagagaaggatgccctccacgtgcagccagggagaagaggcacgagtaggagcggtgctgacgccttccacccgtgttagaagggcatgaagaccacaggcagagggtgtgaggcagacttctaaaatgcaaatgatccataggggccaaatctgagcgaggccttggacgggccatcacctcaaacctgctcacacagtgtctgaacagggtgttactgcttctatgcagggagagagttgttcatcttaggttgaatgtaacagtagttaggacagttagttctttcccagatttattgtgcacttgagtcatctgtgacagtattaaaatgcagatcctataggtctgagacctgcatttctaaagagcccctaggtattgctgaagctgctggttcaaagactgtattttgagtaggaagtgtctaacccattttctccccgaactctctgtttcccactcccatcctacttacttctgttcctccctccgtacgcccgtgccgttccttcactctttctctgatagttgcttcctgcttgctgacctaactctcatgctgtctcgtggagtcactcttgcatccagcctgagtctttgcttagactttccccctttcttctttaagcgtgcatactaaagctccagtcctccaaaactcaccgtttcctgagtccatcacctcccttctactccgggtagggctgagagggcctgcatggccatgctccaggtctcatgtctgctgctccttcactcctccttccttctgtataactgcctgccagtcatgttgtcgcaggttgaacctaagtctccatagactcaagtctggagagcttgttcaccagctcggggactgttttggaaagctatggagtgtttaagggatgaaggctggctgggacaaagcactagggacaggctcttgggggtttcagccaggctctggccatagttcagttctctgctttcctctgatccatcagtgtgagaagctgctctacctcatgtcctaccaaaagaaggaaccaacagcttgccttccccaccatgatggcccacaatccctctgaaaccatgggtcaaatgaagacttcctcctgttaagtgggttacctctggtagacagctcagtctccagaccttaagtccttccttcccctcccccactgtgtgctaacctcccctcccccactgtgtgctggcttccccccccccactgtgtgctggcctcccctcccccactgtgtgctggcctctcagcccagcccctcctgctcctgagctttcattccttcagtgagcaccacagcagcccaccaggtggacagctcaacctcttctctaccactaagctccatgaggacaggaaaatctgtctgtcttcatcagtatcaaaactccaaggggccacagtgacgggtatatggagagatttaaaatagttgtagttaaacagaattagaaaaacatatatttaaagccctcttgatctttcaatagctaggactaaggaatgcccctgtgttagcactcatttgaatctaaaaatgctgtttagtaaaaactgttgagcctaccaggccctttgaagattaggactaaaaaatgaccaaaattaaactctcttcaaaagtttctgtcccttgtctcagtcaaggacctcaggaaggttgctggctaaagtgaggatttagtcaacctcattgctcttctcctgggacacaacacagagatgcaagcagtcagcacttaatgattctggcctggcctctgactcctgtggtcctcccagcaagagagcaactgtctgtctctaagatggcaatgacccaagtcacaaaatgcaagatcttccattaagaacccattctgccacttgctcttaaggacactaacagcgaaggagactgatgttcatagacgttgtagccatgcttacttttagtgtactccaaagtcacatccatgctaacgatgttctcatttatagcctgtatgatggcctcctgactggatgataggagatcttaaagcagttgcattatacattccctgatggctgagtgtgggacttgtttagctccatagcctgattttaaatttgggtcatttgtattttggagtttggttatttggattccttatgtattccagatacagagttggaaaatatctctcccaccctgtggggtacctcttcattcagttactcatttcctttgctatacggaagcattggcttcatgaggtccacttgtcaaaagttggtgtaatttcctaagccactagagcgctgtttaggaaaccctatcctgtgccccagtgttgaagcacattccggggcatcatgtcttacattgaggcctttgatctatttgtaattgagttttgtgtaaaatgaaacacagggatctagttttttttataatatgttgatgttcaggttttccagcgccatttgttaaagacactaacttttctcagatgcatatttttggcatcattgtttaacattaggtgactgtaattatgtggacttatatgtggatcctctattcttttccatgacctgggtctgctttgtgccaaaaccattctatctttcttactatggctctgtagtattagttgaattgagtgtactatctcctgtagtattctttttgttcggaattgttttagctagcattgacttttgtgcttccatataaagtttgtatatatctgcaattttgattgaggttttgaaagaacctagtggggaaacccccactcagctcccgattcggcgtgtacccaagaatcacgaatagaacacaacaccttgatgtaacaacacgaggtattttaatggcggagctccgggtcgaaacgtatctcacacaggagacagtggattcgaccacgaggcttggaagctaggggtttttatagaaaaggagtggggctgggggaggaattggcacggtttcacatgattggtccatttaaacatcagcagcctgtaacatttaacttaggtcagaggggtgggagatagggaggcgatgggcctacccgggcatgtcctggtctgttctgctatgttctcagccccaggtttcaaagctcacaaacaactctttgggctatttgacatacatcacatgaatcacaggtctcaagttttatttcctttcagtttcattcaaattaataggttgttcttagtagaggggctgttttcacagtagattttcttccaatccagtagtgtataaggtctttccatcttctagagttttcctccgtttatttcttctgtgtcgacattatcatcctggaggtctttcttaccttgcttatgttgatttcaaagttgtgagcagagttgttttcttaatttctttctcagtatttttgccgttgggatataaaaaggcttttggctatttacattaatttctatactaccatctttctgaaagtgtttatcagctttaatagtttctctggtggaatctctaaagtctcttttgcataggatcatatcatctgcacaatgtatcaaggatgcagtgacttacttcttttcctatttacatggcactacttccttttcttgtcttactactgcagctgagacttcaagaagtctgttgaatagaagtggagagagggagcagcctggacttcctactagtcttagtggcaatgctttaggttcttctccatttgcatgatgttgggactttctggggcacgagcttgcaaataatgacacgaagactacatttatttatgaatgcctagaacttaatgaatgctagacttgttcctgactagcttataaccaattatcccatttatacctgtctaagtttggccacatggctggttggttacctcttcttccttcctggcctgcttcctccttcatgttccactgcatctccccatgtgagatcttccccagagttcctagctctgcctggaagtcctgccttcctatctttcttgctttgctattggctaacagaaaggtgagagaaaatgtttgcaaaacaccgagacaggtcatacaaggtcctacctgtgctgaaatctctgcaggttcagaaaccagcatttgtctaatacagagacaatcttacacagtgcataaaaacgtcactctgataatgctggctttttgacaggtggcttttttatgctgtggtaggctttctccattcctagtttctctctgacttttatcaggaaggcatactggattttgtggaagcctcttctacacctgatgaaatgattctatgattgctatctgagtccatgaaaatgacagattacattgattgatatatgcatgtcaaatcatctctgccttcctgtaatgaagcccattggatcacgatgaatgatctttttggtgtttgccagtgttttattggaaatttttgtatttgtgttcatcagggagatatgcctggaattttctttttttgttgttgtcgtcaaagttttagtatcaggttaatactgacttcctaaaaagaatttggaagcactcattctttcctttcgtgttcttgggaatgatttgaatagtaatggtgttagttcttctgtgaagttttgatacaattccactatgactgtatatagtcctgggctattttatagttgggagtcttcatatcaatgctccagtcttattgttggctatagatctctttaaattacttcatcttggtttaattttggtaaaccatatgtatgtaaaaattcaatttccaatttagtataatccaggtttttatagtcgatccttatggtttctgagttgcattggtgtgtatggtagtgtctccctttcgtgtctggttttcttgcttgtgtgtattctttctctcttagttaagttgactgtcaatcttgtttgtctttataaagaactgacttttcatttcattggttcctcgtaatgtttcttgtttacttgtatttcattaatttctgcccttatcttaattatttcctcccatctcctgcattgggtagttcttgtttttccaggacccaaaggtacctcattagtctgcttatttgcttaaaattcctgatgtaggcaccgagggctggaaatcacagccgcctccattgtgtcccatagatttggtcttcatacatattttagaggttttgttttttttaattttagaggatttttttatttcttcagtgagccattcattatccaatagtgtattgtttggtgcccatgagtttgtgtgttttctgtggtttctcttactgtggatatcttgctttattctatcatggcgagatgcaatatataatgttattccaatatccctataactgttaaggattgctttgtgtcctaaaacatggcttctttgggagaaatgtgtgtgtgctgctaagaaaactgaactatttagtgtttgagtggagtcttgtatgtgtcttcctagtgtcctttcacttatgccttcatgtaaccccaatgtttcttttttgtctggatggcctttattggtgacaatagcatattgaattccctcatggttacagtactggggttaatctgtgactctacacatcgccgtgtttgttttatgaaattgagtgtacctgttaagtgctgttctctaatgagacctggacatctgggaccaggtcactagctgtgtcttccatggtgtggtttcagcccccgagccagtatctgtgagagggcagtggacagggtagcttgagagaggctggagtgggacagaggcaggctggggcggaggatctgttccacgccagtgtggtaagtcagcaggcagagcttcctgggtcatctctacttggctcgggcatcattcccaagttcttgtttctgatgctgtcttcagagcttgcaattccctcccctgttaaaatgatggttttctggttggtgtggaaaccttccagaagccacagtgtcactgaggtgtgacctgagtagttctgggttgggattttacccagcagatggctgagaggagtttccatgggctcacatgactgaaagtctgaaggcagagacagcaggcacggctgctaccttctcctgacttcctgctgagcaactttctcctggaatacacaatcaaaggctcttagatcacatggccagggcttgaactgggatgtagtggcaagctctgaccttactgatttccacagagtctcacctgggcagctcatggcaggaccatcacttcctcgggtggaaccactgtgtctctttgccgtctctcagctctggtcctggtggttcccgtagggtctcacctgggcagggtctcacctgggcagctctttgcccactctaacattgctttccttatcatttatttctaaggaacaatttttgtcctttcctttttaaactttaccaaaacagaaacaaattgaaagcataaaagagtccccgttttacctcaggattcatcctcaagcaatctccaccagctcttatgtctccccactctgcaagcgtctccctccatgacacaaacttaagaagtctacacaagaaccatcgtacaaagcagggttttaggtttgagttcaatttctcaaattttagtcacacctcttgcaggacaggatctttataagtgatacaatcttactgttaataagcataaggcactgtattaaacagtgtatttcaagttgaaggagtaaatagcatggctagatccatgctagcaattagcacatggttcttcaccctttcatttcatgttccccctccctccctctctgtctctcccaatctctctctctctctccacctattctccctccccacctctccccctcnnnnnnnnnnnnnnnnnnnncctccctctctccccctctctccccctctctccctctctttcagtatatagctgttttaaggctgtggtacattgcccattgtgtaggtctgcggttatgtgtgtgatatataacacatgcctactgtaggactctgtagattgagaagaggaggaaggaagcaattattcaaatatggcagagacataactaaatggctcgtctgcagcttcatttctgttccttccatggatatgtactctgtgtccatgtgtacatttatcttatctagaactgttcgtttagatttagattggcttgtgttatgtgtatgagtgttttgcctgcatgtatatgtgtaccacaggcaggactggtgctcatgaaggtcataagagggcatctgattgcctggcactgacgctaaggagaggcgtgagtcactggcacccgtgtccaaggtcagaactgaactcaggtcttctgcaagaacaagtgcccatcaccacaagtctgtcgactatgggcaggcatttcaagttttgtctttaggactcctttctctgtagtactaaaatgctacagcttacgcttactgatcaatttcctcctttactgcagaacttttaataagtaaaggagaaggtaataactcttttcattcttttagttttagtccaataagaaatttaaaactatgttcctcttattcctttctagaacacactgggttcttctctgatttccacagtggagcacaacttcaaagctgggagttggtgagttcaggatatttattcatctaagtcaccatctttaatattggtcattcaagcttgctactaaggtaactctgtatctagccaccctgcatgtacagatgcacagctccagccaggtgtgagctagcctgcactcacagatacacagctccagccaggtgtgagctagcctgcacccacagatacacagctccagccaggtgtgagctagttccaccttagatgtcacaccatgaccactgtgccacaagggtaacttgtctgttttatgttgctctaacaaaacctgatagaaacggcaggagatgtgtgtttggggtcacagtggggtcagaagcatcatcacttagtgaggcggattgaagggcatggtgggacaagctgctccctcctagcagtgaggaagcagagagccagggaggaagtgtgtaaggacaagatacagcctttcgaggcatcgccagcagcccacttcctctgagccccgcctctgctctcataactctgctctgctctgaactcataactgctgaatccattgatggaattcagccctaataagtcaatcacccctcaaaagctccacccagtgtccaccaggcgctgacacatgggatatttcctatcaagagacaagagaccaagacaccaacaggcacagttcctatgccatgggacttcaagcagtgtctggctcagtcctcattctgcttcttggtgcctccatggagggccagtgctacctcatctcagtctctttcctcattctgagatgagaatactaattgcacagactctttttttttcttttttttataaggtatttatttcatttgcatttccaatgctatcccaaaagtcccccacacccactcccccacccactcactcccacttcttggccctggagttcccctgtattgaggcatataaagtttgcaagatcaatgggcctctctttccactgatggccgactaggccatcttctgattcatatgcagttagagacacgagctccggggtactggttagttcatattgttgttccacctatagggttgcagatccccccagctccttgggtactttctctagctcctccattgggggccttgtgatccatccaatagctgactgtgagcttccacttctgtgttaattgcacagactcttgagctctgtgaaggatgaccagtatacacagctctccccaccactaccatcatcgggaccatgaggctgtgtttactgtgaccatgatcagtactaataccagttacatcggaaacccctgagtgatctgggcttggacagaatcaaaatccagcgtgaaatcctcgagcctaagcaaacgacaagtcaacgcaaagaccttcacactaggtttagcaattgcattactacaggttatcactttttaaaatgaatcctggaccttgaagtgtcattttcaccccatttaaaagatttagaaatctcaagtgtcctggcctccctgacctgctcccattacagaccatcattctgggcctctcnnnnnnnnnnnnnnnnnnnnnnnnnnnnnnnnnnnnnnnnnnnnnnnnnnnnnnnnnnnnnnnnnnnnnnnnnnnnnnnnnnnnnnnnnnnnnnnnnnnnnnnnnnnnnnnnnnnnnnnnnnnnnnnnnnnnnnnnnnnnnnnnnnnnnnnnnnnnnnnnnnnnnnnnnnnnnnnnnnnnnnnnnnnnnnnnnnnnnnnnnnnnnnnnnnnnnnnnnnnnnnnnnnnnnnnnnnnnnnnnnctcctcctgctcctcctcctccttctcctcctcctcctcctcctcctcctcctcctcctcctgctaactaaggctaaagaatatgtgcttaacagctttgattatctgtgctccataaatgccttcctctgatctcccaacatttgacaagaatctcaattcagggattaaatactttttctacagcactgtttcctctagagtaactcgccttacacatatagtgttgacctaaagtgcaggacgttctccagtcagggatcattcagctttaacagggaaccatgcattttggaatagacttcagatgcatctctacactcaaggcccccagtgtctgcagagcactgtctgctccctttctgcccatggcctgactcttatgcttttcagtgaagatagttttctgtttgtcatttgtttttctttctaaattaatgtgaatttgcagtttgttctctgttggatgagattcctgtccccaatcctctgataacccctatttgagtgtctcaggcagctccccaaatgacagggaaactgcctcccccacctggctctcttcccttctgctagcagctgattgcttttactggaatcaatactccaattaatggcatccctgttgacccagtactcaagccaggaatctctgccctggcctggcttctccccgttcagtccataccagattctggatttaagattatgcaaaagtttcaggatattggtgcttagagggtcacataattgctgttactagtattcattgtgtctttctgaccttccttttctctgctgccgctggtcagtgctttgttcctggccttcacacatgcacatgtgcacatctgtgcagatcaggtctgaaatcaacttctgtagcttctttcagagtggctctccctgactgaggaccctgctcacgattcccacacctctgtgcctttgtcacctcaactgacccagacacctggctgtgcggccctgtggcccagtcctgggtacccctccagcatgctttaccctgctccatggggctggatttccttggtttagttttttcaaggcagggtttctctgtgtatcctggctgacctagaactccctctgtagactaggctgacctcaaactcagaaatctgcctgcctcagccttcgggtgctgggattaaaggggtgagccaccatcgcccagttccagggctggatttcttgaagtgttctagaatgtcatgtctcttaagacaaacatgcgcaagcaagactcagtgcacacagttctcatttctgagaatgttctgcccaccaccaccaccatttcttctcaattctgaagcatccttcaagacccacctcattctccatctcctctgagaagctctccttgatcctctaggtaccacaggatccagacagttcattagctgcatctcagaccacactgtgttcttgttagccacctgtatatagccttcctatggatgctgagctgcaaggcaagattctaatcctatctttgtacctacaacatctagttactgtctggaccattcaggtttctatggatgaagcatctccaacacgaataaagagaaggcatacatgagaagaaattgacctcaagctgttcttttcctctgacctcccacaagctccttctcaacgatgtagctttgttttctccttttgattttcatatccgtgtttgaaggaagtaccaccaaaacgtatccaaggcctttcactcctctgctgatatcagagctaaagtattggctacattcttcctaaacttgaaatccggtactgttttctcatgggaaaagaaggctcagcctgtgtctctagcaccctgttgatgatggtggcctattctgtgatgtttaatttgggagcaaacccatttgcaggcttccattgtgcctgtgcttgagatatgtgtcccatgtgttcagtgtttcctgttccccggctctgagaagacagaaattacttcccagggaggcgtgggctctaagttcaaaacaacactgcatttcatgaggagccacagttaacacagtggtgagctgcttagttggggatcgagttttaattcattccaattgtaggcaagagcctagatgccctgaagtggccttacagtcaaaggttactgcagggcaccgcagaacgtcccacaactgttcccactgctttgctgtgcagcgctggccaggtgaaggcagcgtgaggaaatgactgctctctccagcttctctctgaagcttggcactttggctcagaaacttgaggctaatatcagcatgcactgttagctttacttttgagagcagttcatttgaatagcaacctgcctgtgtcttgaaaagcatccaaaagcagcaaggaaggttcggccaggaatctgaaacagtaaattagctagctctgagctagcagtcaacagaatactttgcagtcggtctcattaattttttatttttgcctctcttttcccatattatattctaaatcataagaaaatatgtctgttcacttcagatagttgggattttttttttaagtttcttggttcacacattacccagagaataccactattgccaagcagctaatagtctcctgacagtttcccctaagcccttacagactttgaatactgctgcggggaggggggggacggggggggggnnnnnnnnnnnnnnnnnnnnnnnnnnnnnnnnnnnnnnnnnnnnnnnnnnnnnnnnnnnnnnnnnnnnnnnnnnnnnnnnnnnnnnnnnnnnnnnnnnnnnnnnnnnnnnngggacggggctttataaacataggagaatcgcagagcagctccctagatactcagaaggcagagtcgcagtagtcaaagcttcctcactctgcctgcacccgtcctgcactcttccaaatttcctcttttagagacatcagctactactctttaaggagaaaagagaaaatgcagtgctcgaggccactgggaagctgttactcgctgtagagacatgcactacatgtcactgttgcagggagcacgtatggtcttccactcggggcgcattggactggaaaggacgtgtaaagctcaggtctgggtgctattggttttcctcttacatcagtgtttccctggagcacagatttatttattcataaagctgagatgatgtcagacaggagttacggcaatgtcaattcatgctgcagcctgcataggaagaacttttataagattcaaaatcaatgtgctgatgccggctctggaggcatgtgccactacacttctgtgtgtgaggggacagcacgtaattaaactccgctcctgctttctgaactactttgcatatgactgcaatatagctgaaatatgactgaagcctgcctttgccagatagacagattagcaccccaagctggccaggagcagcaccagccctgatcctttactgacactaagtctgtcagctcacatgcctgtggcatgtaagtgtgcctctcagtgcagatgacaagcgtggtcatgacatactttacgtattggttggcttgttaaaatacatacagggtgtctgtgtgactaaaccgtatacatcttacagaactgtggtggtttgaatgggatgcccctcatagtctcaggcatttgaatgtgtggttcagttgctgacactgtctggggaagcctggcgggtgtggccttgctccactttgctccctctgtctccgggctatggtttgagatgtgagccctcagcttctgctccaggcagtaaactgctgctggctgccatgccttcccatccagtgatggtgactgactcctacttcctgaccccttccttctgtaagccccgaataaagcctttttttgataggttgtcttagttatggggttttgtcatagcaatacaaaagtagtaagacattaatgctacaagtgtttaccccttgcttgtaaagagggtttggggagccaggcttccctcctcattcctgtttgttccttggcgtgtgatctaagaagtcttgctcacatgcgtgctacgatgtgttaccttgccacaggctcaaagcgactgggttacttggtcatgagctgcacttccaacaatatgagctaaaattatcctttcctctttaacaattaattttatgagtttgttgttgttgttgttgttgtggcaatgaaaaactaacatagtggtcagaggtagcttttagagttatctgagcaagactggcaactagctgtggatcagtttgtgtcttccaaaatagtctatggaatcctaaatctctgttgccatagtgatagtaaggagggtccttggaaggcaactaagtaatgaggagggaagctgtcattgtaggtttagtgatgacgacaaaaagaactgtttactggaacccaaacatgctggcaccctggtccatcctgatcatggatttcagctcctaaagctacaagaagcaatacactgtttagacattgtaccgataagtcttgatactgtagtagcagccaaggtgattaggaagcgctcgatgtgtacctacaaagcatgaacacacatctgcctgtggagtcgtaggcagattggaagcatgaagctagcatctttaagtcttagactatctggtactatcatatacatcaaaagcttaataaaaacctgttaactggggaaaaaaaaaacatgtttaccctttgtggataaaagtatctaacaaatggaaatttgctatttaatatttggcttttgaatttatttttaaaactacatgtcaaattttccctaaactggttgtttttctattggctgaaaagctcatctagtgacagtatcaggacatagaattctagggacacaggtgacgtctggccttatctgcttcttgccctgtgtgacctaaggcaagcgcctggattctctgggacgaaggttcctgatttaaaacccagtaagcagcagcctgtaaactggcaagcactcacatcttggtttccacagtctttcacacatctagctcatctctccacttcaacgtagctcattggtgtttaaagaggaaatgaatgagacagaaggggtagagagatgagaattattccctctggaagaattcagtttgttccaatttcaacgatctggaaactcagcttctagcagccccatctcccttagaaactgtaccaggaagacacccggtggggtggagactatgaaccttacaccctgtgctgacagcatccagatgtccttggcctagggctcaaaccctttgcctgaggttagggtggtctgagttactgttcccttgaatctcagttcatgacggtagctggtctctgccttagcttgagcctcactcagccttggacactgtgtaaattgcacatattgcagatgtttctaggtccacccaagctaatgcaggacagagctttatcctggcttccctggctggggactccatggttctaggcactgtgcattctgctgctagtcagcagctactttctgttttgctggcatgggaacccctggaggtcagtgtgccccagaaagcttccagctccaagaaaaaggctttggacaagagcctcattacccatccttgaggtactacagtggtgctggctcgacaggccagctggacgcatgccttgttctgctgacagacagagagcctgagggcttcctgtcctggtactattgatatactcctgtgagaaactttaccctcttctcactgcctagctccaacacagtggcctgagtctgatcttgttctgtctgggaatataattaccacattgtctgctaatggctgtattttacataataatgaatccaacttcttctaccaaatctacttcatttatgcaaaatagatataatttggaatgtgtatgaatcatgctattcttttggggatcagagaagctgttggagagtctgtaaaatacaattttctgggctctcttaaggttaacaaaagaaaatgttggttttgtgtttaccagagacagtgtttattgcctttggatccttgtggtctttgtgactcccactttgaaggagaaagatggtctctgcctaccttttacctctgcagtaatgcccttgatacaccagtgatctggaagcactaggaggcttgctcactgatttccagtagtatagaatagctactccaaatcaaacctgactattaacaaggaaaaggaagaaaattaaattagcagagagatacagcaaagtcctttgaaagtgcgtgacatgtctttatatgtgatccccatgagaaactaattttatcctggaaagaaaacatttgtctcctgaaagatgacaaaatactttgctttattaaagacaatggattattggtcataaatggaaaactgggaattcttgtttatttaattttgtcatcaacttgtggttcattgtcaaaaaaataaaaataagagtaacctgcaagactaccatccctgcctggtgtgcagtttggttttcgggtatagttaattgtacatattaatttaaatgtcaggcatatgaatgatagctgaacattgtagaagttcttgatcttggggcttttagtgatcgttgtcttctatgtgaacttgaagcacagatgcctatatccttgaaaacacacatctaaaaggccatactcggggtacgctcccctggagagcaatagaaaggaacttttcgatcatacacgggtcttctttttttatagattttttttaatatagtatattccgtttacagtctctcttccccagatcctacttacccctctccccaaatctgcattttttctttctctctctaattggaatagaaacacacacccaaaaaagtaataaaataaaataaaaacaaaccaaaatcggacaaattaaatgggtgaaaaagaagagccaaagaagaagcctaagaaacacatttagatggggacacatatccacacacagatgggagcacatatccacacacaaatgggagcacatatccacacacagatgggagcacatatccacacacagatgggaacacatatccacacacagatgggaacacatatccacacacagatgggagcacatatccacacacagatgggagcacatatccacacacacaaatggggaacatatatccacacacaggaaaacccattaaaacaaattggaaaccatgaactataaggaaaatatctgtagagggggaaaaaacattgttaaacaaaaacaaaaaaccaaaaaaaaccaaaccctccaaaagtaccattggccatcatctaatgctgatcgtgggacctgtccttaagtgtggtttgtatatccagcgagactccactggagaaaacaaattttgctttctaaggagttaccaattcaagattaggagctcttttcaacttcccctctcagtaatgagactcagtctctgttagagctatgcaagctctgtgtgtactgccaccgtctctgtgaggtcatgtgtcacaaaatcttaagccaggacctaatgccaattatctagcacagaaacaaacatttgctcatttgaaactaataatctactaatctgtattcttttcaaaagcaagagctcaaaacagtgtgtgcatgtgtgcacatgcatttgtgtgtgtgtgtgtgtgtgtgtgtgtgtgtgcgcgcacatgcatttgaaggccagagtttataagaaaccttcctccaatgctctcgaccttatgttttgagaacgggtttctcactgccaccgtaagcttcagcccggactctgacctttaaagccacacgaatgtgttgaaggcctagttgccaagcttgactttgctttggaaggcagtggactaaggatgatggtagcttcagaccattttctgaagaacggggtgcacaaagcaagttttacatataattgtaggtgctttgtggctcctcctgggcctggccatttatataggacccatcctatatagggcccaatctatataggaccctgtctcctatcttccaaccagtagctagacttaatttttgtgctgaaaaatcttcatgctgcaacatctgacattagtatagcactcatagattgtataccacactgcagtattctcagccagccagaaggacttatcaagtcctctcaccatggtgctgacagttacagaggaaacagccatcgagtttagggaaatactcatggacaaaagaagatttttacacatactgtttgccctttaaaaactttgttttcttgagctgtaatgcccttggtggcttaagacacaaatatttaatccattttctgagtatagctaattcatgctagcatttggattcttttagaagaatgagaccctggctttagttccatttagcagtgactgatggatttaaataataggtgtatttcatgtgattgttaaacttttcaaccctggtgagagcattgcttttacttcaacttagatcctttattcttctgtagtcaatgattgtcttgtgtgttcttccacatggaaagtaaaaaagtaaaaatgtccagtcccagcagccaagtgggagttctctcacagaaggagcagtagaagtgaatattgttgacagtaaatgtggagcaaaaaaatatgtgagaagtggggctgtggaaccagaaaggccgagacaagctctgcacgggaggggtggctcaccctggacctcagtgcatacatagcactcccttacagcgataacaacagaagtgcctttgcagagcctcgcttctttgcagagttctttttattttctgaattctgccacaactaaatgcttgttaaaacataacttaccacagtccccaaacctagccagagcacacagagaggagcccagagctggccagcatgtggacagccactgctttctcctttctttcttcttcaggggaaaggcagcctagaagaaaccagtggcgttagtctgggcccttttaaagctctgttgcaaatccagcagggaggatgtcttggacaagaccagcccatttttccagatgctgtaacagagccacacacagcagtgaaagctgcttttctcgaatctagcatatttggggtgtgagtgtgacatttggggtgtgagagtggtcgctagtgagaggtttaggaccaattggccaggctataagatgtccactccaccgactagccgtgtcacttgaccatgcttcttagcaccctctgtgtctctgcatcctagttcataaaaggaagagataataatagcacctacttatgaggcttgctgttaatatattctttggcccactcttagctgtaatcatcattactgtcatttgaagtcaaagcagttgcactcagaggttaattaacttgccccatttcacacacagtgtgacccagagcctggggctttgcatgtgtcccactgtaaaccctgcacagaggatgcactcatgctgccctgaatagaatttcagaattgtgtgatcaagcttcattgcagaccaacctgttttatgtatgttctctgcagaccaccctctccatcccagattttcacttgtcaaataatcccaggttgacagcaatgcatttggaaacttactatctataaataaagttttattgggacagcataccctcctccttcagctgtgtgtctaccttgggcctgcgctgaccaaggtaaagttgtaaaggaatgactggattctaatacctgaagtatttatgccctagcattttacagaaaagtgacgagtttcctgatctcactgagtattttaatctttcctgaggtggtgatgcttaaattatagatacctatcaaattcctctacctccacacccgtgtcctcctaagactggcagctaccaaatgctttgtgtttactttccactgggagtcaactcatcctgggtttcctagccccattaagaacactatcatgtgtcagtgtgccaccttgactaccatgtattagcatgacactctcctcttctctgcttgcagccaatctattaggaatgcccgtctgttgattatcctaaatgcataatctgcctcaggacattggacatgggcctggacctctactgagccaatgctccccattccaatgtattcagagacagtccagaaattactcttgtgaaggtgtatcagataatagttagtcattgatacatctctgcccagagagaaaggtccattgctgagttgtaggcatggtttctgaaggaagaatttggaaatggtagaaggttgaatatccatgtctataatttccttacttgaacatatagggggaaatgtggctatctgattgatcaaggtcatactttaaaacgctttgtttaatgctttgaaatggaatttgataccaggcctccttgactgagggtaaggagttaaaacccttaacagacagttttttttttttcttgttgctccaaagagcacagtcagataacaaatgcattttgatcctcatcagtattatgtgaatattattgtaaagctcatgatattattagctctgcttactcttttatgaatttaaattatcctctgataactggtaaagagcacagaggagtatcctacaactaagatggaagcacaggggattagtggctaattaaaacccactcagtgccttagcagctttgatcttggcatttgtttcatccagcaaacattttcatagtgccttaatttctgtctctatttgaatcttgggcaggagttgtctttgtttcccaagaacagcagatatgttgacatcacttacatgtagagctgagaccataaattaattctaattcttccagcaaagatattagtctttgtgtaacaatatgctctcaacaataacaggtccaatgccaagcagtgatcataaagattaacttttcctttggttagggataatataatacatctataagtgtccccaaatatttcccaaactcttaattatctgtagactgtcaaagatatattttgataagacgtataaagaaaaagtatagctcaataactgtcaaattaaggataattttacattccaatgtagagaaagatgtcacgcaccctcagatgtcaaaattgctgaaatacttaaagaagctagcaggtgtttgcaagtgttaagataatgcatagattcaatgcccttttcccagatgccccctgtagtgttcaccagctgtcaccttgtcactatttatagacaggagaccatggaggcctcctatctaagctgccagccatttgggcatctgggacaggttgttgtttgttttgttttgttttgttttgttttgttttgttttgtttgaaacagagtctatctgtgtagccctggctgtcctagaacttcctaaatagaccaggctggccccagactcacagaaatccttctgcctgcctctccagtactaggattaaacgtgtgcaccactgcaactaggttgtttttttttttttttttcgttttttttattagatattttctttatttacatttcaaatgttatcccctttcctagtttcctctcagaaaatcccctatccactccccctccccctgctccccaacccacccactcccacttcctggtcttggtattcccctgtactccggcatagaaccttcccaagaccaaggtctgtcctcccattgatggccgattaggccatcctctgctacatatgcagctagagacacgagtcccaccatgtgttttctttggttagtggtttagtcccagggagctctaggggtactgattagttcatattgttgttccttctatagggctgcagaccccttcagctccttgggtactttctctagctcctccattggggactctctgctctgtccaatagatgactgtgagcatccacgtctgtatttgccaggcactggcagagactcacaggagacctgacagcaaaattttattggcatctgcgatagtgtctgggtttggtggttgcatataggatggatccccaggtgggacagtctctggatggtcatttcttcagtctctgctccaaactttgtctctgtaactccttccatgggtattttgtttccccttctaagaaggatctaagtatccacactttggtcttccttcttcttgaggttcatgtggtttgcaaattgtatcttgggtattctaaatttctgggctaatatccacttattagtaagtgcataccatgtgtgttcttttgtgattgggttacctcactcaggatgatatcctccagatccatccatttgcctaagaatttcataaattcattgtttttaatagctgagtagtacttcattgtgtatatgtacaacattttctgtatccattcctctgttgagggacatctgggttctttccagcttctggctattataaataaggctgctgtgaacatagtagagcatgtgtccttcttaccagttggaacatgttctggatatatgcccaggagaggtattgatggatcttccggtagtactatgcccaattttctgaagaactgccagactgatttccagagtggttgtacctgcttgtaataccagcagcaatggaggagtgttcctctttctccacatcctcgccagcatctggtgtcacctgactttttgatcttagccattctgactggtgtgaggtgaaatcttaaggttgttttgatttgcatttctctgatgattaaggatgttgaacatgtctttaggtgcttctcagccattcagtattcctcagttgagaattctttgtttagctctgagccccatttttaatagggttatttggttttctggagtccaacttcttgagtgggaagtaatgcttattttataaaaggtgtggtgtggaaagtgggaggattccttcaagaggcctgccacatggcaggctctgggaacaaggcagcattggtgactgctgaaattgtcatcatgtcggaggcttattatcataattatacaacacctctgtcacctgcagagggtccagtgagtgacaggtagacgagtcatctcagtcttgattggtaaatatgtttctctgagatattaaatgttctacatatgagatcatgatttggtgtcatggagaaaaatgtgtgaaaagctctcacagaagtttatttttcaaaaattgggaactgcctgcttcagcacatagaaatgactagggatataaaagtgcacaatagtttataatttttatagtgatatgcaggaactctttttgaaacatggtgaagaacttttgacgtacgtcctagttagttttttgtcaacttgatacaagcttgagtcctctgggaacagggaatgtcagctgagagaatgctgacagacagacagacagcctgtaagcaagtctgtgagacattatcttgattaatgatgatattggaggacctaacccactgtgagttgtgccacccctgggaaggtggctttggattgtatcaaaaatcaggctgagcaagccatggggagcaaacctgtaagcatcggcctccaggggctctgcatcagtgcctgcctccaggttcctgctttgagaccctgctctgactttcctcaatgctgggctgtgacagagcaaacataagccaaatgaaccctttcctccccaagttgcttgtggtgagagtgttttgtcacataagtatcatgcctgaaataagaggaggcagtgtagactgtatagtggcagacacttctatacaagatcaaatgcagtgttcaacttcacaggagtcttttgtctgctactctctctgtttcctggaaagctgtgtaactttatagactggtaggatttgtctcaaggtgtactgtgtctgctcgtctctaatgaggaagggctctgctgctcctcatggcagacttgaaaatgctccctttactgttcttctcacttttttttttgaagtttttttttttcgtattgttgccaaaatcttatatatgtaaatagcagaggactgtgggagccttgcgcgtaagatttagagttctaattaacccagcagcagcagcagcaaatgcagccggtgcatcctctgtagtaattcatgtaccagtttaggactcagtgtcttctaaagcttaaatgctttgcagcggatggtgatttatataaaccagaccctttgaggtctcatttttctatttcctcttactgcatctaacagggactccactgaggtaaatgcttctttctcctgtgctcatgaactacaaggtcgccccagcacatcagcagggagggatacaatcttgctggctgactcggacacctacttttgccttttcttgggtttatgggtttctcagtaagatgcctccttcctgttgtttggttcccacctgaaggggaagcctgccttacattcaatgtatttactgtattgtaaatagcatgtgaacaaagacagaaaaagggcaatgtgggagagcatcttcttgatacacactgcaatcccagtgctcacgagcctgaggctgaagcaaggtgagtctgacggcagcctgggctgtggggcttcttcctgtggctttgactgagcattgacctctcactacgaggtttggcacttagagaggctacacctgtaaaagagtgaactcaaattagacctgagggctgcagtgaggtgccgggccttagattgttataaccttagatacgtaaagcttacactgtgatttcggagcaccttcccagagttccctagctctaccatgggtatttaaaacctaagtttgtttcatccaataaattatgaaatttggggacttgaagtaagctaatttctgtgattaaatactcattcatttgctagaagattaaatgctatatgcagaatgccaaaggacatgtttaatatggaatctcagttctaattgcagcaccatcattctgttttgagcattgaggaaggacaatgaactatgtgaataaattttaaagtaaaagattaaacctcattaactttaagacagcttttcttaggttttcttaggagctaatttacagtttatttttcatacacaaataaaatttaaaatggatatagactattgtttgcatgctggtgacacggttccacgttaagtagggtcagtcgtgaccttctgtatcccacgttccaacatgtggcttgttacactggcggtgctcgatcacaacaccaatctccagatgagtagctagctgctgaaagctattgtgtttaagtgtgtgactatgtttgccttgactatgtgtgactacgtttgttacctatttgtatgtaagtgtgtggctgtgtttgctttgataatcaagaggaatacttgtccattccaagcattggatggtgctgatctgggagtccttcccagtgctgttactgtggtcactgcacagcagtgctgtgctagtactgacgtccagctgcccttcaacaaatgggtacttttcagaattttcagagctaggatgctacagttgaagcaagaggtttgtctgacttacaaacactagttaaactactcacagtgcctttttgtttttccatggtgaattattcaaaattatatacactctttacattaaaagcttttatacatagatgaaggagaataaaattattatgaagatctaagagatgggtaaatgaaaacttggcatttaatggatcgctatagtatattagatcaggacatgtgtcccataaaattaacttttagatatgctgtctttttaataatggtatcttcttgaaatgcaatcttgtaggttttgatgaagaaaattagagtgtgccttatcttttactctctcctccagctcagtgtgcaattagatttactacacaagatcggtgtggcatatattaattttatcctcagccaccctgctgaaagtaacacaagaaatgtacgaatgaagtcatagccattagccagaatgacaacagttaacagttgtattttgctttactttcactcttgtctatatatgcttagctgctatgttactgattgagcccatctgagtttacattcattttgtcaaagactgtcaacatacaacccaacacgtaatccgggcagggacataagtcacagcctcacaacactttttaaaactgtctagtcagtatgcatgttcatatagtgagaactaatagtggagtcttaattaaacatataataaggcactcctaggactcttccctacactctgagaaccattaagaaatagaataaaatcactggcaggggagagtcaaacattgccctttaaaccagttctactatggaaccccagtctgaagcacgtgccacagtggcttgcacaggccgctcctgatcccaggagagcaactcagatatgacccagagaatagaaaagatgtgttcccagaggggagcccactctggaaaaagaagctcctcccccaggcagttccttggagcacatcacctaatgaagagatgtatttatatgcttgaaatgggcaggggggcagacagaataattcactccctttgcagaacaggtaataggacattttgcttcacatgaaactacatagaacttaaagacagaggaaaagagtgtaacttactgacaaagatagaggcatgtttgaagagaaatagtccaggcacagttgtattatcagggatatatgcaggggagtgactttgcgtttaaaaaaaaaacagcctaggctgtcagagcatgtgacctggggagtggtccccttatccagagctgccagctatagcacaagtgagtgtttctttgagcagggtttgttgctgttgtgttattgaatgctagcatgctgatctctgagaatatctttgtatatttgcatagttttctctgtaatttatcttggcgaatgatatggagctagaagcattccaattatacattgaactcagtgactaatcgtgagatttcaatagcaaagagcccataattcttggagtgtatcatcattctaaagccatgttgcagagtgggattgctttctccttttccctgatgaaaatgatgtttgttatgacgttgggaaagagagttagctacgaggtagatgtcagcattgcatttgtggtgtacgtcggtgcaggcagactgaggggcgtgttttgatgatgcagggcacagctcaggcacattcccaaggcaagacctactgatgttaaggcactgcttccgcttaaatgagggctgcgttgcatttgctcaagatggagccctttgacaaggaacttcagagagagaacggtgagtcatgacataacctacagactttgtcatccctcccaagtgaatcatacccaaagatgtcaccaaaagcaacaaaacaaaggcagtctgcaatactgtgagactgtaagataagtccatccggtataaagcaataggtaactctttgctgaatgcttcagtatgggctactgtgtctgatagtgacgcgtggggtgataagaaagttgtgagcaaacaaaatatgtcagccaccagctgaaaatctcactgggaagctgtgaccagaagtcacatggtatgtggtaaatacaagatacttaatgaatagggccaggttatctattctagacttgcattgcctggtttatttagaaggtttcatgcagaattctatatcatgggatcctgagagatgtgactgtcttggtttagccagagatcattagacttgctgtctatagaaatgacagggtcgctgggtagtggtggcgcacacctttagtcccagcactcgggaggcagaggcaggtggatttctgagttcgaggccagcctggtctacagagtgagttccaggacagccagggctacacagagaaaccctgtctcgaaaaaccaaaccaaaacaaaacaaaaaaaggaagacagggagactgtctaggttgtaggggttcccttcttggctctcttgaacaaaatgggttttttagttctttactagatctcagcgggctgactccagggtctctacaatgacagagaacgaagaaagaatagggctattgtaaaccaaggaaatgagtgttgtctactttctctgttctacctgggcagggtgagtaagcctgacatatcagcttttctttaggatgctacaagcatgacaaataatgtttatggtattttgggtttctactatgagcagtctattttctttgcccatgtccatatgtgcttatgaaaaacattgttttaacaacagttttgtgaactggggagaacttaataaaccacttgtgctggatggttttatgtcaacttgacacaagctaaagtcatctgagaggagggaacatcgatgaagaaaatgcctccataaggtcaggttggagccatgcctgtatggcattttcttatctagtgactaagaggggaagaccaccccattgtgggtagtgccatctctggactggtactataagaaagcaagctgagcaagccataaggagaaagtcagttctctgcatcagctcctgtctccaggttcctgccctgtttgagtttctgtccagacctcctttgatgatgagcagtgacacagaagtgtgagtcagattaatccttccctcctcaagtagcttttggtcatggtgtttcatcacctcagtagaaacacaccaagacacctttctttcttaattaaaaatagattctcttatcatacactatatcctgagtatacttccctcctttattcctctcagttcctcccctcccttccagatcccctccatttgtttctctccttagagaagaacagacttctaagagataacaaccaaacatgaaaaaataaaataataagattaagcaaagactttcatactgaagttggacacaacaacccaagaggaagaagggtcccaagagtaggccatagagtaagagatccactcattctcatagttaggagtcccataaaaatgctaagctaatagctatactacatacacaatggacctggagcagacacagtggacctggagcagacccatgcttgctgcttcagtctctgtgagctcttatacacctggctcagtcggttcagggagccaggttcccctggtgtcagctgtcagtgtagctgagtcatgcaccatctcagtcagttttagagcattctcaggaacagaaaagtagccttcactgccctgccatccacacccacaagcaagtatcccctcccccccccccccgcctttagcaccctttgattactttctgtctcagtagaacaagcgaggcagccccttctgagcacctcgtgtctgatggttcacatggcgtgctgaatctcatagtaaagtctgaagtttccctatgtggctggctaaaacatcataaaccacaaagtcagtgtgtaggaaaggacttttcagccagcaccagttctatgccccagtcatttgtaccacctctttgcatgaagtgcttttaacataatgaaatctgcaataaatggcttatagattttatatttttaatcccctggggacatgctgtgtataaaatttgaaagagtaactcccccttctgagaggttacagcacaatagggtagggatgtgtgtgcataatcaagtggagcatagaataacttcagaatgctcttacagcacggtgcctagaaaggcatagtgacttaaatctgagactgtgggcagcactacagaaacagctcccacacagagtaacaccagagaccaccgaagcattaggagggcttgaagaaggggagaagggccagagtgctcacgcgtatgaccataggacacatcataggccttgggatgtgagcagatgccatagccaagggatggtgggacaggaaggtactaaggggaatcctttggactaaatcaggatctagaaatttctgtgtagggtaccaagagtccaggctttatataccacgttcctttcttggattgctatggcaaagaaccaaaaagcctggtggtctagaacaatacctaccttcccatagctctggaggccacagtctgcagtcaaggtgctacacagccgtggccctcctgtaacctctaggggaggaatctttcttcgtcctgcaaatgcttatagcctcggatacttcttagtttctggcagcagaattctgtatgtgctcttatcatcacgtaacggtctcccacatctcttccaccatctcccctctgtgcacactgctctcttgaccttctttccttctgcctgtccatcatcacatccttttctatacatatacccccactatgctcgataaaaatcttccagcctgaaaatagaaagttaaagggacctcacagaagaaaaggacatccagatcagagaagcggctccaaataaagaagagaggcatttcgccaaagtcatcatgggaaacataccatacctgcttattatgaaaagcgtgagccaggtactgttggcagcgtgagctgttacatgcctaccgcttgacagttggtaaaaaacactttacgtgctcgcttggaaacagtttgggaaatgatgtgggccactccctggaggcttgtgtgaaggctgcatccacaaaacagccctgctcagacgggctttgggggagtgattggaccacagggctctctggcttcatcaatagcctgtctgtggattcatagcttgatggctgtagtggctattcctggttgtcaacttgactatatttggaatgaactacaatccagaattggaaggctcaccagtgacccttatctggaggcttggagatccttatctggatcttggtatggagatcttgagccatagtggctatggattccagaagattgaatctccgagtttaaggaacacacctttaatctgggctacaccttctgctggagacagtataaggacattggaagaagggagtctagctcttgctcttgctccttcgcctgcttgctgtgtgagactgagtaactgctagatccttggacttccattcacagctgcgactgaacaattgttgggaattgggctgccgactgtaaatcatcaataaattcctttactatctagagactatccataagttctgtgactctagagaaccctgactaatacaatggcattattacgaggtattgaagcataggagttgaggccaaccttgaggaagtaggctgtggggaatgtaccctagatagatgctttgtccttggccccatgctgactagctctctctgctcagcctcctcttccatactctctcactgccatgaagttctgcctcacctcagaccagagggatggagcctgctagccatggacatctgaaaccagacacaaaatctgcctttcctactttcagttgttcctcttgggtgttggtcacagacaactgacaaacgcacactttatctgcatgtgggcttcacaccaacccattggaggaataatactctgtctccttaggaaaggaaagcaacgcccaggactcagagcctgcaatgccttcgctgccatcctgacgcctgtgtggactcagatgaacatccttggtaccacacaaacttttgcctagcttatagctttcatattaaccccaaaatgttctgtcagctgtcttacctctgaatcacagaacttagctagtgttctcacgtatgttactgatctaccgagatgatggccatttgtttaacaagctgataaatgatagggatggaatatgtccattgagtaggcaccagcatatgcttataaattattatttattttcaggagtagtaattcttttttcattcatgatgctaaatttggtggatattgtcataaacaacagagaaagttccaaagaaataaagtttggttcttagccagaattcaagaaattttctggtgctaatctgaaatgttagtacctggactagaaatattgtccatacttcctaaagaatagttggtgacagctgggaaggtggctggctgggtgaaacaggagggtctgaatttggatcctcagcacccatggtaagagctgggcagtagcactggagacaggatggagagaggagacaggaagagcctgagattgctggctagcaaggctagcctctctgtgagctccaggtccaaggagaacttgtctcaaaaattagggtagaatgcacagaaaaggagcaccctctggcctctcacgctgtaaggaggaaggtggtgcccatcaccctctggcctctcaccatcacatacatgggtacacactggcacatatgatcacatagattcacttgaccacataccatgcacacatacacaaacacacaaatagccattgtttttctaattattgcctacccatagtggcatcacccctttcaaacaacataaaaggcctgatgaaaatggcacctcaagtcctcagcgctctgggtctgagagccattttgctacaatgtacctttctgtagtggttttatttagtttttcttacttttgctgcttcttaactacaacagttgccatagtaacacctgttgaccaaaggaaaactgaatgccatttgcagaagaaaaatgctgctgtgttcttgctttttactcataccaagggatgctttcattcctttcaaatcctgtgtgacacctttctacatgttggcaggtggttggacccccactatttacattttacatgctaaactgcagctatgtcatcctctagagtccaaacaatttcaaagcttttataaaaagtgtaattttgttagtttttttttctttctgtaaatgacctgttcaggtctttagtccacttacttattgggctaattttttttaaaaagaataaatccaatttatttcccattaacagtttatagaggtaaaagtaacatactatttacttccctttttcggtgactagaatcaactagatttcagtatctgtatgtccctctcacattattacgattagtggacagtctgtccactggacagtgaagaatagttagtggaaagagaagtggtaggaaccgagactccatttccacacgagactgggcagatgagggcagctccaaagcatgttgtcctaatagggtatagggaacgaggatttttaaatagttgtcatattcccagtgtatttgaaagtaatacatatgtatcagagaaatggagtaatactctttgtctgaggccaaaatggacttcctaaatgtcctgtaagagcatattgctcgcagccgtcagcagccatgtctttggatcactttttgaatcaaattctctacagcacttttttaaatttttttattttttgtgtgtgtgttttttttttttttttgagactaggtttcactatatagccctgacagtcctggaattcactatataggctaaggcatcctcaaactcacagagatccacctgtctctgcctcctgattgctgggattaaaggtgtgtgccactatgccaagctacaacctgtttttaatgtcccccttctttatttcctctgtcccttttcatttcccctcttgcatggccaattgggtggatgaagactccatagttgatggaatagctaagcaaagaactgtacatggtagcacaatttcatttgtcttttaaaatatcaccaaaaaagtaaggaaataaagctaggcttatatatgatggtcattatccctacagatatatcagaagaaataggttttagatgttaattttacaatatattaaaggggcgacacatcattagtgccatcctcctgaagtaagccatcttggaaccacaccccattgaagttggcatttgggcccagctggtctggatgcagcattttagcagactttgggtgagggtttcatgtgactacagaacaagtcctcatcaccaccagaggtcataaaacgtggagatctgatcctagagcattgtatgctcctagctgggcctcggtttccttattgcatttccttattccatccagaattgagctgagtttgctctcagctccaagattatctaaagcgtactctgaaatgggcacagtcttgaagactagaacacaaataccatcacaccctgaagatgaagaaaatgtcagaaacccaggtagccactaaagcatggaccctatgtgacttttctgaaaggagacagaacatgaactaacagaaaggaagcaaagaaaggaagtgagcactcacctaccacatgttcagtcctggtgccaaagcgaacggtgagccaatgtggccatcttaataccgtgtcttctagtgaagcaaaagcaattctcaaagattccagccagcctttcacaactaccgcatagttacaattatggagttttctctttcattctgctaaggtggttagttagtcctgcaagctattcctgaaaattatatttttaaaaaaatgcaagctctagggattggaaagatggttcagcagttaagaatactggctgctcttccagagaacccaggttcaattcccaacactgacatggcagctaacaacaggctgtaactcctgtaccagaggatccaacacccccatacagacatacatggaggccaaacaccaatgcacagaaaataaaaagaaatcttatttttaaaaaagtgcaagctctgtctttgaaatggtgcagtgaccagtgtgagcctgcctgtaacgcctgtgttcctttgaatttctgtaagaaacagcagtggctaggctgctctgtccacactgcccgtggctagagctgagtgccctgagcaccgcctgtcttaccctcctctttgcctcggaggcaggatgaggtagtaggagatgtagctgcttttcccatgcgctgattctgatggtttcccagggctgccataacaaagtggcaccgattgtgtagcttgaatggcagcaatagctgtgtcacctctcgttgctggcgctaaggtccagggtccaggagtcagcaaggcatgctgctgcagtggctccaagaaatggtgtcaggcctcacccttgatttaaggcaacaaaacctcagtgctgggattgggttcttccagggtatgtgcatgtgtgtgtgtgtgcgtgtgtgtgtgtacactcagcttatacagttcagcaacgcgagcgttccaccctgcagagatgcaacttcctctttagttcttctaaacatatcatgtcatgacacaaccaatatggtcagagctctctctgtttactgcatggttctattgggtgctggggcacatgttaggtcatgctctgtttaccttcggatgaatttccttttcttcctcagagatagccaagttcaacttaggtcatcttagtgttctgtggaagaaagagagaatgtgtgtgtgtgtgcgtgcgtgtgggagagagacagagagacagagacagagacagatagagagagacagagacagggacagaggtggtggtggttgttgttaaacaatgtatcctaagaagtcttgggtttccacaggtgccttctgtgggcctaacagactgggactgtggggttttatgagagtaactgaacttaagcagtttgagatagataggtcctgtagccagttcatggattagtttgtaaacaactagcggttaacaggtaactaacttatcaattaagctataacttaactggctgtgctgagcggtccctatgcttacgtctacagaatcagtgtctgatgagatcagcactcaaggttcccagaacctccaggaagctgttcccactcgaaattgggctgttgctttattttgccagaaaaacaaacaaacaaacaaacaaacaaacactcaatttgaggattgacctggggctgttatcacggtctatcgaagatggcctttctgtaatatgcccatcacagtgagacagtcaggccaaagctagagaggcctgtaaatggcagcagaatcctccgtgcagagagctgtatctataatgtgtgaagtgggaggcactgagcagtgagggatttttgtatttgtaagaaatgtaataacattgacagatggtagaagtggatgagtgacagtgagtttgccgttgctgctgttctgattgcatgtgtgtttgcagtatctaacagagtagccttttaagttggggtcaccggtgaagcctcacaatgtagcccaactggccttgaactctatcctcctgcctcagcctcctgtaaactggtatgcaccatcatgctcaccttgaaaatgttcttaaataccttttttgcttccaaaggaccagcttttacaaactggtcatgcgcagagtcattttatgtattgcctgttctctgaagcagcgcataagctctgaaagcaggctgtcatgtctagaccgctcgtcgtctgtcccggtgccctgggtgtgctgtggaatgtcctaactgctcactttccgtggactatgggacagctcacgtgttataacctgggctgtccttccgagccgcgaagcctgtcttcctgttgtgcacactgtcactccattacttctcttccagtattgaaactgttcatccacaagccctgtctgcgatccatgcttattcagagggttcgtattcattgtaacattgtaacattgtaagcctctctgcaagtgacgtgcttataaacagaaagcttttgctcataaaattccaattgtttctcactcgacattgctattagattgttagctgtcctccctaggttctggaaactgtagatggtatgagaatatgtacttaagaactccctaaaattcgtaacagcatatcattcttggagagatttatttttaagccaggtcctttattgggatttccagagggaggtactttgctagtgttatctttataatctttttgataattaaaaaaagaaaaaatctgacatccctaaggcatgtccagtcatggcagcctctgcactgcctctttcagccatcctttctcgcctcttccatttcttcatttgcagcaaggaaaataaaccataggaaccctgctcttgatggcctgccactctgcatacctcacggatctcagctgttggagtgcaggaacaatgaccccgacatcagctgatggagtgagagtaactgccagggacacggagctggtggctcagggctgggggaggggagagaaacgtgggagaagctggtgagaggtgagacccagaacaggaagagcttagtgagggagatgccagcaggctacaaggagagtcctgggacacaggagcagggcactagtgtctccacactgcagtccttggcagcccgttactttatctgtagctgatgctgtactgctgagccactgaacacagctagggttgattgctgagaagaactgaatgttctaatttaatggacagaagtatctattctgggtgggggatccctgttttattgttaatttgttaaacccatcactaaatgctagtgaactaatgagaagtattatgcaatagtttatgaccttttttttttaaccaaaaatctatcaaattgctgacatttatcattttgacaaattggggatgtgtataattaactggattaatggctgacttagtaggcatatctcaggggagctgactattaaattgctatcttcttggcaaaaggctcttggggttttatcctaatccttagtcaacactaggcctcatctgggtgaaacaccataaggaaagatggctacataacaaatggcagacagagcaggaatggggagcaccctgacctttaactgagtaccccaaggcagaactgtcacggaaactgtgtaagcagtataataatgcaaatggctcaggaaagagagctggggcttagtccaggcctactggaaggaaacgcacacttcgtttcagctacaagctgatatggcaggatactgggactgattaaaatgctgctgtgactgataaaaagctttctgtataaaggatggtatgcaagacaacacaagtcagggtctgcaccacctttggccagccacatgcagtggagaactgcctttgaactacccaagggggggccacaggggtggggggcagaaaactcaactgtcacctcaggaagtctcctcttgtcttcctaactcaccactttttctcacatacatcctcttgccttccccgaaactggatcggttgtaaccaaagcaaatgtgccccactaacacccacctgttcccatcgacagcggaggtttgctcagtactggtggaatttgattgttcaattgtagtctcccaggctgagatgctactgtctgggcctgaccattgggatgacttcctgcagagccaggcagatctcacaccacaggtgccactcccactgctctgagtggctttagatggagcaagctttcaggtgagttttaggcatatcataagctctttcttatttggaccttcctgggagcatcactcaccaatgttcagaacttattgccagtcccgaggaaaccttcagtaaagcaggtgcctcgtgttccactggctcagtagtcacagacgcagaaggatggatagacagctcgtttcaggagccccaaagtcccacaggatagaaggagatattaagttgaaaggtttggattagtttaagtcagtcttcgtttgcagtgtacacatgtacagatagtcacacagagaaaggagccccaaagaacgactaagacctcacgtgaggattctgctgaggacagatcatgacaatgttctgtcctgaagcccagtgttctagtgatgtagctagagttacactggggtttgccacctttttttgagagtgatttggaaaatagtagaatatctgcatcttttggaatattcttttttctttagtaagagctttactgagctatcatttgcttgacatacaatccatccacttaaatgatgcagttggtgggcttaccatagagcgggacacacatgcttcatagaccacttccatcacccttcaccacagtttctacctcccatcttccccagctctcagcagtcactccttctctatgcagccagctttctttatttgaccatttgtggacgtttcttgtgaatgggatcccctaatatatagagtcaccggcttctttccattaccgtgtgttcaaagtacatccatgttgaccctgtgtcaatgacatcccactctgggtgtgactaatatactctgtatgcgtttgacagtttagtttctgttcaccagttgatggacgcctaggttatttctgggttttagctatttaaatcatggttctatgaacctctgtgcttctggggagtttctgtggtcgcttctctttgtatatatttaggagtagatagtgacagttctgtggttagcacttcctgagaacatctagactatttgcaaagtggatggtcgtcttgcactcttagcagagggtctgcgcgtttggacttcttcccttcccgccagcacacattactgttttagctggaggatatgaagcagcatctcacggtggttgacacttgcacttctttgatgatggcattggccacatgtggacttactggctagtttataagttcctttggagagatgcctattcagactctttgctcctttggggtttggatatcttactgtgttttaagaggtgtttatatattcaggctacaacttctttatcaggtggtttgcacctatttctcttctttgggatgtcatctttaatatgtatagtgttctctaaaactcacgtctttttatgttatattttattgattgtgtacttggcatcatatcagtagcttctttggccagatctgagctcatggagacttaccgtttccctttttagtagtttctgtggtttcatctcttatgtttcaacttaactttagtatggtgtgagttcagggttcactctctccttttgtatgtgactactacatatccagccctgtttcctaacgtgactattctttctccattgaattatattcacacttctgttaaaaggcaattgacagtgtaaataaagggatataaacatatgggtttgctagcgtggatagtaagttttgcccgatttaatcagtatgtctgtctacatttgcaatagcagcactgtctcaatcaccgctgcccctggacgactcttccctcctgcccaagctgttctgacagggcagttatacactgctcctactgctcagctttaagtcgggctctttactcatcaggagtagaagaaaatggaggttgattttatttgactgtatgtgtgatacgaggactaaacttagaccctgagcatgtcatacatgtgttctaccacaaactgtggccccagccctgaaatactttttctaatacgtaatgagagaattttacattaaaacaaacaatgcaaagccattggccttgggtgactaaacctagctcatctttctgactaattcaagagtcttctgaacttgggcattgacagagaagccaagaggtttgtgattagaacttccatgtaaatagaagtgaatgtgagagcctgggaggaggcctgacttgaaagggagtgaaagctggaacaaaggaagtcacttacccaggaagcctggccctcccactttgtgtgattgacacagaagacctggagttgggttagaggaagataacccatgactgtgtgcctcctgatatttttagatttgtttttaaaataagaaaataacaatgtagctgcatggattgcaagcaaaggcagcctttctctcacgacaactggcagggaaagaatagttgtatcttaatatgatgtcatgtctgattctgcaccagaagaaagaaacactcagaaactatgatatccaaagagcaaccataaatatgcatctaggtggcccatgttctgctcacaattgaacgttaaaaaacaaaacataatagaatttgtacctcagtctgctaaaataattgagaagtcctggtcttagtcagcagctataattcactattcatattcactagaatatgaataaactcatcgctcactccattcctcttcccccatcaccgcctccatcatggtgtaagtccacctgcctctgcctcccaggtgctgggattaaatgccaccaccacccggagaggcagggtctcactaagagtgcttgttgctcttctagaggactgagtctggtgcctcaaacttcctgtaacttcagctccagaggctctgagacggctcccagcctccactggcacccacacagatgacctgtggacgcacatgcacacacgcactcacacacatataaatcatttttaagtacactaaatattcagtatagatgacatttgttgtagaatgtaaactggggtggagaggaatcatgcaagatgggagaagggttgggccagtggccggatgtgggagctgatgagtcggcaatgaggggcttgccttcctacagttgcctctctcatttccacagtggggtgaagatggaacgagcacaggctatatccgcatgcccgtggctcctgacagtcacacagcctcctttctatgggaaagagtcaactgagtcatggcttaccacgccaaaagcaggaatgttcttttcatataaattctgagtttttatctcaaatgtaggtagcacttacttgattttaattgtaatatggtaatttacagatttatctgtcacaaactagaaagactttgaggaaaaaaaagtcaattgctttatatttgatccaatgataacatggctgttacttcagggggaaaagccttgtatgttttgagtaccgccagcactttcactggtttagaagttaaaactacggcctctttgaagaggaatgtggagctcagggtctgatccgcaggccagcgttttctacagcaagctggcaggcgtctttcacagcctgtccacatgccttccctgccccccagacattctttctttctttttggttacaggccaagaaggaagagagaaccccagcatactgacacgtgaacgaaaccctcttctggacaaccgtttctccaaggtaattgtggccgtcataggaagaagggagggaacacatgccttgcagtttcagacgacagtgggagcatggagagttgatggtctgtctgctgcagactagggctgagtgaaagggggagagagaagaaagggaggctggtgcttccgtctgcagcctcactaaaagtatcagcagaagaagaccatcccgccctgggaggtcatgggactgggcagcaagtgtgtgggaaaagagggagcggggagagtcctagtgtttagactgaaaattgcattcattcctttatgatgaaatagtggagggattctaactagaggtcaaataaagtatccattctgtatgtgtcatgcaggtgatcctggaccaatgctttgtaccaactaagacttaacaaataagaaaagaatttaagaaatctctgcgtgggggggggggtccctgaaaatgcacaccaagttagcctttcagtggttcatacaaaatgctttataaatgtctcattttagaagataatgtccttaataccacttctaaagaggagctgagggggagacacaggcagacctcagatcctagtggagtgggccaccctcaccttgcacatccacaggaatagctccaggctctccctttgtgaatcatattcttagtaggcaccaaggcttacaggcagcagtagagcccattgtcagcttcagcactcgtgactcgcctcctaggccctgaacacaaactgctctatcatttctatgaaattcctcttttgctgtttagtttttagcatagggctattttcactaggctgagatttttatctgataaagcgcttcctttttccttacaaagtgtctgtgtactcacatccgcagggatgaaacaatacacaactagatttgaaatcttcttgtctgctttctctgattagaagatcatatatggctggcattattccacccttggtgttgtggaaagcagtttcagatggaaggggagagccagcttctggcctccccctccctggcagttctcagaagggttgggggaagtgtaggctgtaagttggaagagaattttgtgatactattcattctcggctctgacagagaggacattgtttgctcactgtaatagtcttggcagggatctctgctgtgcatacagaatgcgagcagagcagtgggaaccgctgaattctaagaaacacatcagcttggggattttttttaaatacattttaatagcttctcattaccaagatgcaagttataatttaggaaaacattttccttggttcctttcttcacactgcattatgcatgtattacataaaaggtccttatgagagtagggtgcccatctaagctgtggcatcaagcatttcaatcctagaaattcagaaagacatcctgcgcgctgcagacagcctcgaggcttgctccttgtacatcagcactcctatcagtgccagcagtgttagcttggagctcctgggaacaattatgtgcagacagtaatcagtgtatggcagggacacggtgagagtaccacccgcggtgtgacacacagagaacgtgcataacttttaaagaccccaacttcagaaggagtttctgcaatctggattgtgtgaaaggaggacaggagctagagctcagcggcagcaatgtgcctggtgtgctgagagtctgcattgcatcctgactattacaaaccacggtaataatgatggtgatgggtgagcataggcaggacatagaggagtacattgatatgacagtgtttgggactgaataacagataccaataaaaataactaagctcttcaaccttctccacctcctttttttattccaatggatgcattttagataacctgtttttaatataaaatttttatataaatatacaggattgctgagggtgtggggtagaatatggcattgtatggaggcatacgagagacgcagggccagccactcctgcctgtgtctggcggtctgtggaggtgttgcttgtgtggcaaggataccttcagaggacctgctggcctatcattgtttctcttgaggctcctagaaccactgagactccaggcctgagcagtgtcactgtccttggctcctggcttttcacacctgtgagcacagctcatcataaaagggacagggataggaaggagctcacaggcagctagatccttttagctgcagctgacctgaagggaagagaagaagggtgttgtgtgaacattggggcaaggcatccttacccactgtgaagagaaatggttatgacagaaaccaccccaaaggctgcatggtgttttcttgtttgacagataatttatggctcctgggaagggcgggataatctgcatagctaccctggtgtgatggtgaggatgcccatttaactggggattcagcagttcagagtccataaggacctgagaggcaagagcagagtcagcgctggcgtccagcagctgtgggatctggcttagtgtgtgtgtaactgaccatcatcggggcccctggaccggaccagagcccgctgagcgggatctgtgaacaacctgtaaacagtcacctccacggaggcgtacaccgtatggtccatcatcgtgtttggaagcatggcctttgtctgattgtgcttacgtctgtagaaaaataatttatagtcttcttctgtctacagtgggcacatgatcattaaaaaacaaaattccaacatttccgtcacgaccctcatggtacactgtaccacaggtgactgcacaggattcccaacaggcccagtgccctcactgggagactgggctccttactacattgtgacttaccaccttcaagagcaccgcagctgacactgatgtgtcagccgataacatgtggccatttccgttcctcacctgattcctggggtctcatcttaacccagaccctcccaaggtgtgttcaaaggagtcttttttttctccttaaaatgttttattatttgaattttctattgtatattaaatatcctaatcatattaagtattttaagaattgaataatgcatcaagatatttcattcaacttttcatattctttagtaccctaaaaatatcgttaaatcatattgaataatgcccatactctggatcctacttctaatgcttgatactaaattatgtttcagaacatttaaaataacctttggaaattaaacatagtagaagaacataaaatgttagagaatcattaagtaatatattaaaaaccattatacaataccacctaacatagagtgagagtattcaaaatgtgttatatgtctgtataaattgtctaatagcttactttaaaagattatccatgtttctatgagagaatttatgtaatcagtaagaaaattttaaaaatatcaaaataggaaaaaccctttgaaatcaaatattacaaaaatgttcattttgttattattaatgtccagccttagtaaaaagagcaaacatgggctggtcagtggtcaccagaacaaatttagcacaggactgccctgtgtgacctctgcgagaggatgcccataaccctgtagagacttgatagtccagagaggagggatgccgggggcgggaaggaggtgtagagtctgtagagatgcgggtggggatgagacagtgagagtatgggagagcacactctcagaggacaaatagggggggtatgcggtgagggactctggggtgggggaccagaaaggcgacaatatttggattgtaaataaataaaataattaattattttaaatgctaattcatacacaataagaaaatctttcaataattatatttccatgatgtttgtagactgtttataatattttcaagtgttaatgtttctcaaacacaataataattttgagataccttttcattaaattgatgtatccatttcaaagtataaaaaataatacaatattccatataatcagagtattatacttttggctcctttacacatcaatttaatgttaccttttagtgtgagtgttgctgtgtcattttactaaaacagccatcagatttctcttaaaacctcagtcttcctaattctttaccagacttaaattgatgtctgagcactgagatgttttcttttttttttccttttccttttaattggatattttatttatttacatttcaaatattataccctttcccagtttctgctccagaaaccccctatcccatcccccttcccctgcttctataagggtgttctgcccacatactcccagctcccggccctgccattcccctatactgggcatggagccttcacaggaccaatggcctctcttcccactgatgtcccacaaggccatcctctgagacatatgtgtagctggagccatgggtccctccgtgtgtactcgttggttggtggtttaggccctgggagctttgtggggatctggttgttgctattgttcttcctaggatattgctatgaagcaatcccttcagctccttcagtcctttctctaactcctcgattggggaccccatgctcagtacagtggttggctgctagtttcctcctgtatttgtcaggctctggcagagcctctcaggagacagctatatcaggctcctgtcagcaagctcttgttggaatccacaatagtgtctgggtttggtgactgtatatgggatggatccccaggtggggcagtctctggatggcctttccttcagtctctgcttcacactttgtatttcctcccttgagtattttgttcccctttctaaaaaggacagaaacattcactttttggtcttccttcttcttgagcttcatgtggtctgtgaattgtatcctgggtattcagaacttttgggctaaaatccacttatcagtgagtgcatatctgtgtgttcttttgtgtctaggttacttcactcaagatggtattttctaattctgtccatttgtctcagaatttcataaattcattgtttttaatatctgagtagtactccactgtgtaaatgtaccacattttctgtatccattcctctgttgagggacatcttggttgtttctagcttctggctattataaataataataaataataggctgctatgaacatagtagagcatgtgtccttattatatgttggagcaccttttgggtatatacccaggaatgttatagctgggtcctcaggtagtactatgtccagttttttgaagaaccgccaatctgatttccaaagtggttgtaaaagcttgtgatcccaccaacaatggaggagtgttcctctttctccacatccttaccagcatctactgtcacctgacttttttatctttgctattctgactagtttgaagtggaatctcagggttgttttgatttgcatttccctgatgactaagactattgaacatttcttaggtgcttctcagctgtttaatattcctgttgagaattctctgtttagctctgtaccccatttttaaatagagttatttggttctctgaagtccagcttgagttttttgtgtagattggatattagccctcttatcagatgtaggattggcaaagatctttcccaatctgttggttactgttttgtcctgttgacaatgtcctttgccttacagaagctttgcaattttatgaggtcccatttgtcgattgattcttgatcttacagcaaaaggcattggtattctattcaggaaattttcccctgtgcgcatatgttcgaggctcttccctactttcttttctattagattcagtatatctatttttttatggaggtccctgatccacttagacttgagctttgtacaaggagataagaatggatcattgctgactgacagttgagccagcaccatttgttgaaaatactgactttttcccacagaatggttttagctccttcgtcaaagatcaagtgaccataggtgtgtgggttaatttctgggtcttcaattctattccattgatctacctgtctgttgctgtaccagtaccatgcagtttttaatcacaatatctctgtagtacaacttgaggtcagggatggtgagtcccccaattcttttacagttgagaatagtttttgctatcctggattttttttttttttttgttattccaaatgaatttgcaaattgctttctcaaactctgtgaagaattgagttggaatttttatagggattgcattgaatttgcttttggcaggatgaccatttttactatattaatcctgccaatccaagagcataggagatctttccatcatctgagatcttcaatttctgtcttcagagacttaaagttcttgtcatacagatctttcacatgcttggttagaatcacaccaaggtattttatattatttatgactattgtaaaggatgtcatttccctaatttctttctcagcctgtttatcctttgagtagagcaaggccactgatttgtttgagttaattttatatccagccactttgctgaagttgtttatcaggtttaggagttccctggtggagtatttggggtcaattcagtatactatcatatcatctacaaatagtgatattttgacttcttcctttccaatttgtatccccttgatctccttttgttgtttaattgctctggctaggacttcaagtactatattgaataggtagggagagagtgggcagtcttgtctagtccctgattttagtgggattgcttcaagtttctctccatttagtttgatgttggctactagtctgctgtatattgtttttactgtgtttagggatgggccttgaattactgatctctctgatgcttttatcatgaaggggtgatgaattttgtcaaatgctttctcagcatctaatgaaatgatcatgtgatattttctttgagtttatttatatagtggattacattgatggatttccgtatattgaaccatccctgcatccctgagatgatgcctacttgatcatgatgggtagtcgttttgatgtgttcttggattcggtttgctagaattttattgagtatttttacattgatattcacaaatgaaattgttctgaagttctctttctttgttgggtctttgtgtgacttaggtatgagtgtaattgtggcttcatacaacaaactgggtagtgttccttctgttcctattttgtgaaatagtttgaagaatattggtattaagtcttttttgaaggtctgatagaattctgcactaaacccatctggtcctggacattttttggttgggagatttttttttaatattttttattacatattttcctcagttacatttccaatgnnnnnnnnnnnnnnnnnnnncctacccacccattcccatttttttggccctggcgttcccctgtactggggcatatacagtttgcgtgtccaatgggcttctctttccagtgatgaccgactaggccatcttttgatacatatgcagctagagtcaagagctccggggtactggttagttcatattgttgttccacctatagggttgcagatggttgggagatttttaataactgcttctatttctttaggagatatgggactgtttagatggtttatctgatgctgatttaactttggttcctggtatctatctagaaaattgtccatttcatccagactttccagttttgttgaatataggcttttgtagtaggagctaatgattttttttaaatttcctcagttcctattgttatatctcccttttcacttttgattttattaatttggatactgtctctgtgtcctctagttagtctggctaagggtttatctatgcttttctcgaagaaccagctcctagttttgttgattctttgtatgattctttttgcttgtacttgggtgatttcagccctgagtttgattatttcctgctgtctgttcctcttgggtatattcagttcttattgttctagagtgttcagatgtgctatcaatttactgtgctctctccagtttctttttggaggcactcagagctatgagttttcctctttagcgttgctttccttgtgtcctatatattggggtatgttgtgccttcattttcattaaattctaaaaagcctttactttctttatttcttccttggcaaagttaccattgagtagtgcattgtttagcttccatgtgtatgcgggctctctgttgtttttgttgttattgaagaccagccttagtctgtggtgatctgataggatgcatgggattatttcaatcatcttgtatctgttgaggcctgttttgtgaccgattttatggtcagttttggagaatgtatgatgaggtgctttaaagaaggtgtattcttttgttttaggataaaatgttctatagatatctgttaaatgcatttggttcataatttctgttagtttcaatgtgtctctgtttagtttctgtttccatgatctgttcattaatgagagtgggggttaaagactcccattattattgtatggggtgtaatgtgtgctttgagctttaataaagtttcatttacgaatgtgggttaccttgcatttggagcatgttcagaattgagagttcatcttggtagatttttcctttgaccagtatgaagtgtccttccttatcttttttgataacttttggttgaaagtcaattttattctatattagaatggatactccagcttgctttttgggaccatttggttagaaaattgttttccagccttttactctgaggtagtctgtctttgtcactaaggtgcatttcctgtatgcagcaaaatgctgggtcctgtttacaaatccagtctgttaatctatgtctttttattggggaattgaattttaagagatattaaggagctgggcgtggtggagcatgcctttaatcctagcacttgggaggcagaggcaggaggatttctgagtacaaggccagccttgtctacacagtgagttccaggacagccagggctacacagagaaaccctgtcttgaaaaaaaaacaaaacaaaacaaacaaacaaacaaaaaacaaaacaaaaaaaacaacaacaaaatattacggaaaagtaattgttacttctgttacttcctgttatttttgttgttagaggtggaattatgtttgtgtgcctatcttcttttgggtttgttgaaagattactttcttgctttttctagggtgtagcttccctccttgtgttggagtttactatctcttgtccttcgtagggctggattgtggaaagatactatgtaaatttggttttgtcatggaatatcttggtttctccaactatgttgagagttttgctgggtatagtagcctgggctgccttttgtgttctcttaggttcggtatggcatatgctcaggaacttctggcttttatagtttctggtgagaagcctggtaggtcttccttcatatgttacttggccttcttcccgtactgctttcaatatactttcctttgttttgtgcatttggtgttttgattattatgtgacagaagtagtttcttttctgctggtccagtctatttggagttctgtaggcttcttacatgttcatgggcatctctttctttaggttaggaaagttttcttctatagttttgttgaagatatttgctggccctttaaatttggaatcctcgctatcttctatacctattatccttaggtttggtcttctcattgtgtcctaggtttcctggatgttttgggttggagctttttgcattttgcaatttttttgactgtcatgtcaatgttttctatggtatcttctgcacctgagattctttcttctatctcttgtattctgttggtgatgttttcatctatgatttctgatctctttcctaggtttctccagggttgtgtccctttgtgatttctttattgtttctatttccagttttaggtcctggatggttttcttcaattctttcacctgtttggtagtgttttcctttaactctttaagggatttttgtgtttcctctttaagggcttctagccgtttacctgtattttcctgtatttccttctagtgtgtgtgtgtgtgtgtgtgtgtgtgtgcgtgcgtgccaaaaactttttgccagtttactttgtcttattattaaccacaaaaagaattgtaagtttagtgttttcacccaaacttaagatatcacaatgttagttattattatcatgtatctgtcttagtaccatgctatatcaaatatagcttttaaattacataattagttcccaaaccaggaatatattgcataattacaatttcaaaaatggatggtgggttggagagatggcttagtggttaagaacacttgtaggtcttgcagagaaagaacaatgcaggtactgggtcttgtccctcatggcggctcaccatcatccataactctaaatccagaaagcccaaagccctcctctgacctcctcaggcaccaggcctgtgtgtaatacacagtcgtatgcacaggcaaagcagtcatacagataaaataaatcttttctaaatattttacagttttggtaaggcatgcatttcattacaaaataaacatagaataaattaaaagtacattactgccaggcggtgggggtgcacacctttaatcccagcacttgggaggcagaggcaggcggatttctgagttctgagttcgaggccggtctggtctacagagtaagttccaggacagccaggactacacagaaaaaccctgtctcaaaaaatccaaaaaaaaaaaaaagtacattactttttaagtagaaaaaccacaaaatataatacctaaagtttatttttaaacaaatttgactgtaattaataaaaatataccaaaaaaaaattttacatgatgtgtcttgtatattataaaccatttaaatatgtgccatgaaggcttataaaactttaaccctgaaagtcaaagtccaggaaagctgtgaaatcatgtttatatctgttggaatcagaatcttgccattctttatttcagatttatttttattttctgtatatgagtgttttgcttgcatgtatatctgcacggcatttgtgtctggttttcagggaggccaaatgagggtgccacatgccctagaactggagttatagttggttccattccccccaactaggtgctgggattgaacctgggtcctctgaaagagcagcaagtgttcttaaccactgagccatctctccagcccgcaaatcacaggcgtgtgcttgtttgttgtttgcaacatcagggattgaacccagggtttcacacaggtgaggcaagtgctcttccactgaactatggtggcccaggtccaatcttgccagtcttataatccataagtacagttactttattactgtacacatatgactgaccacagacaggcaggctcataagcattgtaattgactatgaggcctgatcagttgcagaagaaaccctgaagtctactgggagggtcattgtactagaagagaatgtcctaaagcagggctcacaccactcccccacccatgccaggcctcctggagtttgctggccttggggattaccccttgagatgaatgccagccttaaatgtccctgcctatccctgcctatccctgcctatccctgcatatccctatcctgtttgtgttccctttccgtactgcatgctagagagccacaccattcccaagccatcagtcagaaaccagtgatgttgctccgttgattgttcttttatacaaaaggagatttttcaagaatttctactttctattaaatactgtattttccttcctttgtccccctgggtgttgctgagatcttcttcagcaaacttatcagtttaaaagttctgcctttatccatttcttccatcatagtcgatcaaagtttcatcgactgttccattcaaacatcactaacaacattcagaattatttagaatgaactcagtgttttccaggattggttggctctaatcaatggtttggtttggttttcgttttgttcttttggctgtctctcctcaatgttaatttaaaaacccacctctcctcagagcactgttaacaaagcctttaataaacatctaaagaagtattcattggacaggacagcaccagacaaacccactcagagaagcagctgttgccttgcattaactgaataaacgacagtatctcttggggtcgtcactagctgttattttcagacgttagaagagcaattcgcctgtactagacaaagctgtggatacactgtgcttggtgcccgggacaaccttgttggcctttagagttcccatttacagtgcagcttcaatcagagttaagtgctgggcatctctgtaagggacacaaatgcttgagcattctctgctgtgattaatgattctcctcggagtaacgagaatcagcctcgtttaggagatgtcacatagaccttgagaggaaaatgatcagagaatcgctgtgggctttaaaacaatgaaccaacccagtgatgacaaatcatacaatgctctcatcgttgttggtgaaatgctcgttattcctagcactctgtcctgtcctttgctttttaggattaataaatccatgggggaaaaaatcagagaccatgtgccagacccttccaaatgtcacattcttttgaacttaacctttctcctttgcacagcatatttctcataactaaaacctgagatgatttcattgccatgtgccctctttcttcatactagagaacaggagagcagtaactgtaggagtatgccttctgaatcctggtgtccattcctcccccttccctgttgctggcctcctaagaatgtgtgcctcccattccctggccagtctctctctcctcatcatctctcaaagaaagaaaataaagcacagaaactaaatggaacacagcatcctgggctggatcctggggtgaaaagccagtcatcagaacccttggctgctgactcacacctcccagcatttgtgaggtggaagcagaaagatggcttccagtctaaggccaaccagggctacagaatgatactcttgtcttcagaaaaacaggtaaaggctaagaaaatatgaattaaatgataactgtatagtagaatatagctaacataagatgctaatgatggactagaaaaactagggcagatacattttacatggacatagtaaatgcctgaggttgacttaagcccctctgtaagacgagctgctatagacaacgagcatttctccccttactaaaatcctccactgaacagaatggcagaggtcagcaaaacataggccttcggcaaagtctcaggagcagctccagccctgcagcctgagtttgtgcaatagcgtacatttgcccttgccctccagatgccccagagcaatagcgtacatttgcccttgccctccagatgccccagagcaatagcgtacatttgcccttgccctccagatgccccagagaggtgatataggctcagggactctagggcaggtgcccagacattcggggtgggagcactagctggcatcatctacagctcacatcttgttttcctatctacaaagtcaggtcccaccaggtctttcttttggggaaacctatgatttagagtattatcttaaaagtgcatttgtaaatatagtcacaaaatctatcaaggatgaaatgttggcattaaagtgatttgtatatattatatactctaacaagattatttacaattttggcacttttgaactcttgactgaaaataatcacaattttgaaactaacagtagtgccatgtgagagttacttgcacactaggaaaataagaccatgttctttggcagcccatgttgaatctgaaactaaaattaaaccacactgaaataacaccttgtagcttagtttgtgataaaatgattttattcacacaataatgtaaatttttggaggaagagtttagattaatgctcttaaacgcgttctcacgaccggccaggaagaacacaacaaaccagaatcttctgcggcaaaactttattgcttacatcttcaggagcaggagcgcaagccccaagccccaaaaacgaaaggcccccaaaaacgaaagcgaaaccccgtccctatttaggagagttatccttcgcctaggacgcatcactccctgattggctgcagcccatggccgagttgacgtcatgggaaaggcagagtacatgtagtggaaaaatacccttggcacgtgcgcagattatttgtttaccacttagaacacagctgtcagcgccatcttgtgacggcgaatgtgggggcggctcccaacatctccccctttccttttaataagagcaataggccacccatattaatgagagtggagatagaggtcaaatccccagtgtgcaggtaaaggagtcatgtacaggattagctcttaggctcacaggcttttacccagagcaaccctaacctgctcccgtgtcgttttgcctggagagaaggacacttggacactcaaccttcttgaaagatgacatgtctccctagaataggctcatatatgccgcagagcccttctactgcagtgcttagccgtgtaactctctcgggctgctgaagcacactcactctatcccgtgcaatgagactagcctcgtgggatgcaagagctgagtggccagcgacctattgcctaagcatagatatatcaggggaagcaccatgttctagagctgcaagtgcctgggcaataaccaccttgtctctcttagtttgggccttaagcttacagaccaaccaaagaagcaacactaatccacagcaaagtgtatctccaaataatatcaatcccacccattctttaaagaagggaaatgctgaggagatccaattgggtaatcctttggtcagggacaggtccaagcgcgtggagttgacctgaagtctcaattcccgaaggatctgttcaaatccagccgtccaattctgtaacatatactgaaaaagactttttgacaaattagctgccctagtaaatttctcatactgaatggaagtaacacacaatcccggaaacttttgttcacatcccagctgagctatttgccataatacatctagttgtttctggacaagatctatgagttgattaaccagcatgagaccaccctgtatcttgacattagctgaggcctgtttatctatgactgtagtcactgaggctgacaaagtgttaatggtgtcagtcgtctggacctgtccagacagagccaaggctgtctgaatcaaggccaaacccagttcctagttagtggtaaaaaagcaggggaatacttgagcattatacatcaccgtcattaggagtggaaatgtcgacattatcccccaacgctgctctctttttattattgacgccctggacatcaccaagacgagggacatcagtattcccttggtcagtctggatttttcgggtgagtctttctggtatccaaaatgggttgtcttcattctgtgggaaaacacagatagctcccctggatcttatcaaaataggatccgggccatacaatttattatcaaggacatttttccatttaaccatctcattgggcctatctggctctgaacaatgacgttcagccgcagtatggccatgaacatcaatatttaaaaaaatgagtgtaaagagtgtcatagacacagacactcttggtactcggggtagagtctcctcaattcccctcttctgttttataagataggctttgagggtgcgatgcgcacgctcaacaataccctgtccttgagggttgtatggaagtccagtcaggtgggtcacgtccatttgacggcagaactgctggaatttttgagatgtataagctggtccattatcagtcttaaggagtttgggttttccccaagtactccatgcctcaagacaatgttgaatcacatgtgaggccttttctccggttaacggagaagcaaacatgatgtcagaacatgtgtcaatggacacatggagatattgaagttttccaaaggaagaaacatgtgtaacatccatttgccagacctgtagaggtcgaataccgcgtgggttaattcccacatgaggaactggcaagaactcacagcagctttgacattgagtaacaatgtcacgggcttcttttcttgtcaaggagaaacgactgcgtaatgtttcagccgtcacatgaaaattgttatgaaaatttcttgtagcctctaccggggatgatagggcagcagccaccactttagtggccttatctgccaaatcatttttcagagccatggggccaggtaggcctgaatgggctctaacatgagtaatataaacaggaaatcttctggataacaaaactaattgtatctgctgaaaaatattggcaactctactggaaggcttaatcactccagccacttctaaaagatttactgcattaaccacataacaggaatctgacacaatattaaggggttctaaaaaggtttttaaaacttctaaaaccactaaacattctaccacttgaggtgaattttcattatattgtttggataccactttaccattagccacataggcacctatgccagtttttgatccatcagtatataccacaatcccatttttaagtgggtttcttactgttatttgtggaaacacaacagattgattttgggcaaactgtaaaattggatgttttggataatggttatctatttgtcctgaaaaggaggtaactaaaactgcccaatcattagatgtggctgccaaggtttgaacctgtgcagcggtataaggtacaattaaaagatatggacttcgcccaaagtgggtgattgctgcttttaggcctttaagggcaagctgtgcaattgcatcaggataccaatctattattttagctggggatacgtttggatggatccacaacaatggcccattttgccacaaaactgcggttggcaattgtgctgtcttaaagacacacaaactgaaaggctgcgaatcctcaatacgttgtaattgtgcattctgtaaggctttttctaccttttgtaaggcctggttagcagctagagtaagagccctaggggaggagatatgaggatctccttctaaaataccaaacaaaggccttaactcagcggaaggaatctttaaaaaaggtatgagccaattaatatctcccaacagcttttgaaaatcatttaaggtatggaggtgatctcttattatctataccttttggggcacaatcttatctggggacaccacagagcccaagaattgtcctgtatcagaaatttggactttttttgtggctatctgtaaaccccactgacttaaagttttaagtagaaaaggatatgccttctgtagcatggtaaggtttttatggcacaggaggatgtcatccatgtaaaggagcaaaattaaagaggggaattgttccctcactggcaaaagagcttcttgcacataaagttggcacatagtaggactattggacattccctgtggtaagaccttccattgatacctcttatcaggttccatgtgattaatagaggggatggtaaaggcaaatctgggcctatctcttggacacaaaggtatagaaaagaaacaatctttaatatctataataattaaattccagccacgtggtaaggcggaaagtacagggagacccctctgtactgggccaaataagttcatttgctcattaatggctctgaggtcatggagcagtctccactttcctgactttttcttaattacaaaaattggagtattccaaggtgaggtagagggttcaatatggcctagttttaattgttcctctaccagttgaatcacagcttccagtttttcagaggataggggccattgaggaacccacactggatcccctgttttccatggtatgggtcgtgttgccccaatggccactaaggaaaacccagaccctgtctgtcttggtttccattaggtgagatgggctctatctttccctgttcttgatgtcctaacccttttccttctttataacccatctttgccatgatattttttgctttagctgaataccctcccgatggggcgttttcattggacaaaataaggcccaaatgctgcataatatcccttccccagaggttaaccgggagtgggagcacataaggtatgaacttcccttgctgcccttcagaggattcccacgtcaaggcaatggagcttatagtgggacatgattgataacctaggccctgtaatgaatgagatgactctgtggtgggccatgctttgggccaccaatgtgtagaaattatacttttatctgctccggtatcaaggatgccttcaaactcttttccgttgatcttaaggcggagcttaggtctatcattcaaagatacaaccaaataggcagaatcatttcctgaggagcccattttctttctctcaggtcctgcaaatttctccctggtattatcagggaggagcagcagctgagctatcctatctcctttactaatagaaaaaacgcccttagggcttgagcacaggacctgtatttcaggggaatgttgacaatccataactccagggtggactactaagccctgcaaggtgagtgaaccccggccgagaataaggcccatggttcccgggggcaaggatggtataggctccactggcaccggctgaatactcatttgaggcattaataggaagtcggaggcggcacgcaggtccacccttgtgggtcttcctgggtcgcctctctgactgcttcctgggtcctgacaaaccggttcccatatctttgagggccctgggaccgagggcccgatgacccgttttttggcacataagctgattgactatcaggtggggggaggattctgccctttatatccctcacagagcgacactggtcggctctatgataacccttgccacacttagagcaaagagtgagagtccctccctgtttatctggagctctgcaatctttcttaagatgcccaggctttccgcagttaaaacatgtcctctgatcatttctgcccatggagcggttttgggattgaaggatggcagccgctaaacctgcattgctgagaggtcccccaagctctcgacaaactctgagccagtcttgtaagcctttgttctttcttggggctatggccgcttggcactcctttgtggcttgctcataaatgagctgttctaccagaggtgcggcttgctctgagtctccaaaaatacgctctgctgcctctgtcattctggccacaaaatctgagaaggactcctgaggtccctggacgatctttgttaattgtccagtggcttcacctgctcgggagagcgccttccaggccctaatagccgtggaggaaatttgggcataagctccccaatggtagtttgtttgatcagcagaataagctccctgacccgttaacaagtcaaaagtccaatctctctgctctggagtcaaagcagctgcgtttgttcgggcctgcgcttgtgcagcttcatgccaaagagctctccattccatatatttgcccatactagggagagcggcttttacaatcgtttgccagtcggcaggagttagtgccatgccggcaagcctgtctaactgcaccaaggtaaaattagcattggttccgtatttacggaccgactcggcaagttctttaatctgcacatattctaccggagcgtggacacgcccaccctcggctccttcaaagaccggaaatgcctgttgtattttcctttgttcctctctgggaatgaatgagtctgcgcattgcctctctgcgcattgtctctctgcgcattgtctctctgcgcattgtctctctgcgcagggctgacgcactacgcagggcgggggctccgcatagggcggaccttgaagccgactgcccggaggctgaacagcatgctggccttcgccagccgcttttggcttttttcttgaccgattagctagcactttatctggctggtaatgagctgcttcttcctcccagtctgtttcttcagaggagaattcttcatctgcttcagagctactaagagctggcttcctgagctcatctagtgacgagtatctcttagagacctccgctaattgatcttttttcttttcttttttcttttccttccttctaatctctccccaggtattcttacctgacctaaacttttccttgggttcaagacccttggaaaggcctgtatacttagtttgtgtaccatattttctctttgctcctactctctctccccgctttacttctgatagattgtcctgaatttcatccagaattttcagccctatcttaatcacttgataacatgtgaaaaagaacaaaagggctcctaacactagaaaaagttcaaggccaaacataccttgtaaagctatttcccactttacttctgatagactgtcttgactttccttagaaagttcaagaccagacttaccttgtaaagctgtactcactggtactcctgttccccagctgaagagttctgaattcacgcagttgaatccttctcaacagtctgttttacgggaaccttcgttaccatgacccgcagttctggttccggaatgagggatcttccttgcgccggtgatggttaactcccgtcccgagttttcttgtattttctcgtcccgggtttcagcaccaactcttaaacgcgttctcacgaccggccaggaagaacacaacaaaccagaatcttctgcggcaaaactttattgcttacatcttcaggagcaggagcgcaagccccaagccccaaaaacgaaaggcccccaaaaacgaaagcgaaaccccgtccctatttaggagagttatccttcgcctaggacgcatcactccctgattggctgcagcccatggccgagttgacgtcatgggaaaggcagagtacatgtagtggaaaaatacccttggcacatgcgcagattatttgtttaccacttagaacacagctgtcagcgccatcttgtgacggcgaatgtgggggcggctcccaacaaatgtgcctttagactatacacttaagtgccaactagctgtggtggttatttaatacagtctgtaatgtttatgttggaggctttcaggccattttcaggactcacattatgcttagagttaatcatagggacattcctcatctaggaattactttttagttcctgttaagccagtcattgctagtccaagaaagtatttcctagctgcagcacatcagcactgggttttgattacaagcacattaaaaaggttttgttctaattaccttgaaagttaaatcccataatgactatgagggaggggagctgtctgtgcaaggctgagtactagttcccaattactcctcagtaagatcacccacaggttcttagtgtccctacatgcaagctgtaccccaaaactaattaatccaatctctatgggcacgtgtttctaatgtgcagctgaaattgaagattgctgccttggaaagcaacaggcctcccaggtggctctccatcacaggatgcttctgctggctgtgactggctggcttgagctagggagaaacaggaacaaacagcagcttgtggcttaccccgactctccatccaacaggcatagaccgtgaaaactcttacaggcatgtcaggcatggcttctgggtgatgctggcattgcctcgtcctgcttggcaccttacttccccacataggatcaatagcagctgacagttaaacagcgcctgcatagtaccaggtcccatatgtacaaatgatcttactcgaagccaggaaggatgaattaaaaggccagagttcttggcttttctgtcaggaggacctgaggtcaatccccagagccctcattatagggagaagtctgaagttctgttttgtaagaaaaaaagtcttattgaatattttgttattccatcatttgttcattttcttaataaacaaactcaatcagaagtaaggcttaaaattgccacaaaactacaaatgatctcttataccaaaagtaaaatagtaaccccatctttatctcctccaggcaagcctagggcaaccgcttgtccagctctgtatcctgtggagaggttcgatggcctctctgtgacacaggtcagtgtggcttagctcatcttagctgggctccgctcccatgtctgggcttcagctaggacacactggctgacagagctctgctctgtggttccctcccagggtgttgtagtcttgatgaaaagggcatcaggtttcctcaagaatacaaggtgtctcagactccccagaactgagattttgccatttttgctgtttcttggctaaagcaagtcaaccagtcagtctatattcagatggtggaaaggcagatctcctctcctgataaaagatgctgggatctcacattgtgaagggcaagggtaaaggaaagagtgggcagttgtattccttttaccatcacccagaggacagaaaacagtcaggagagattcctgagacatagctgcatttgagcagatttcaaagatacagaattcatttcagctgctaagaatagcaagaccaagagcaccaaatcacagtctccttagacaaacgacccaggaggtacagctaacctgtcacttagggcaccgcctgaatgctctgggatcaggacagcgaggtgacctaagagcccctgtgcagatgtgaagacctgagagagcttcaccatgtaccagctggtggagcatgtacaagtgacagtgcctttgtttagtacagaaaggtcaataccatatcgctaacttttactgtgtgaccagccaccccacaacttgacagtttgcaaacagccatttccttagcttgcggttccaagtctttcatacggggtaagaatccatttcaaaacttgagctcttgataaaccttatggatttatttcactagtgtaagtattttcatcaaaccacttaagccccacatagtccagattgatccgtaaattgcacacacatcctatgcattgcattgagtggaggtcattcgtctggaggctaaaatgtctaattagtgatgtgggtgaaaaatacctgtttcgaaatgaataaaacatcaaaggttatccaaagtgatcggagggccaggagtgtgtctcagtgggtagagcatttcagagggtcagaggcgtgtctcaatgggtagagcatttgctcttccactgtagtctggattccacagcaccacgtaaatagcatggtgtaactacgtgtacacctgtgaccacagtgctggaggtggggttagagacagatcactgctgtttgctggccttctgtacagccaaactagcaaactcctagtccagtgagaaaccttgcctcaaaagaatgaggcagagagacagaagacctgacattcattatcttctggcctttgcagaggtaggtgctcctacacaggtacatacacaccactctacataccacacatggatgcacactgtagaattatggcaaattcactaagggatccaccttttataacaatggacattttaagcccctaaaacagatgtcatatgtgggatctctgccactgactccagccgagttcacccaagccactacttccagaagtgccaagatgtctggagagcccaagtcttcctcttgtgggcaacactatcaagctctgagcattgagtcccctttggcaatttgtagtggccctgtgacagggtatttaaacaatttagtgtgtacctctccaggccccggggtgactgaagctgtagacctgacctcagctcctccttaggcaacagccccttgtagcatcatccatgcttataactatttcattgcattgatggtaagtatatggtcatcaagtacacaggtagtgagtcccagaaactcaggatatcagaaagaaacggggtttggagttaggtgttcaaagtgacccagcccagagatttactgagggattcaaatctgcctttaaagatgcttgtcccatttgcctctcctgccttttctcagtggaacaggaggcatgcaggtcagtctgccatgccttggtgatattgtcgtctgttctcaacatccagtgtttgtttttaaaacaatgttttatggaccgtggaatgaagcacctcacagtactgctttgtctgctctgcaggcagacagagattctcaggtttgtaaagtccatgttggcagggaaagtgcttttgttgatgctggtgggccatctggacttcgtagtctaaactcggtgaatctatttatatatccttatggggaattccataatttttacatgtgtttacaaaactagaagttgcatatagatggatgagccgaagataagagaattttaccctggtaagccctgcaaacatttccaaataccacagtaattgtcagtaggttctttatgcaagtatctgggactagacctccagagtccctaaatggcatgagattttcagtgttggcctttgtactaagtgtgagtgttgaaagctgttgggaactacagagatgagaaccctccatgagcttagtgagtgtttgactcctacactttagacagctaagacataagtgcacacatctcacagtgagacattaacactctacagacgagaaccctccgtgagcttagtgagtgtttgactcctacactttagacagctaagacagaagtgctagttctttctcacacagccagtgttcatacatctcacagtgagacattaaccactgttctccttcagaaacttaaagagttttgtcatgtgtggagatctctccccttctccctctttccctcttccccactccctttctcccgcccttcctctttgtctgtttcttccctcactcccacttggagacagagctcatagagtccagattggcctgaccatgaattcatgatcctcctacatgcaactctcctgtatgagaattccagacatgcccccaccacactacgcacttagcatccagtacccagtatgggtggtgctgagaaacagcttgcctcagcctcctccaagtcttactccctaacaatcaaagttgaatcttcatcaaactcttattttttcttttctttttttctcttcctccacaccatgtttttttagtgttaaaaatactatatataatgagttttgtctttaaacaaaagtgagaatcatggctaactattcactgactgcatcattgttgctattgcctgctgggcactggagtttatgttgttcaatctgtgagccctgtctcattaataagggcttcacttcgtagacacacatgttttctaatctaaacacaaaaggaggaggaagtatagacttcagagattgtcacgagcagagagatagcccttcacctcggtagaattctctgccacttcatctctctgtcatattgatccattttataaaacacccaagatagttttaagacaaaaattaactaagttttcaaattttgaattactaagaaaggaaagtttatgaaaatgtttaataatgctgacagtctgcaaaactaaggtcatctcactacatgacttgatggatgagggatgcaaagttggctctttagtgagcgagtgtgtaagtgcgtgactgagtgagtatgtgactaagtatgtgagtgcataactgagtgtgtgagtgtgtgaagaagtgtgagtgtatatgtaagtgtgtgggtatgtgaagaactgtgtgagtatgtgtgagtgagtctgagtgtgtgtgaatgagtgtgtgagtgagtgagctagtgaatgcattagtgcatgagtgagtacatgagtgagagggtgtaagtgcatgcatgaagagtatctgcgggtgtgagtggctcaggacgcttggcttgcatccagttctcacatccacctgtagcccccttgagccctgtcacacactgttctgtgagtgatgtggtgactgtcactgtctccttacaatctgctataaaatgaaggaagtgaggcagaaagacaactcggtgggtacagcacttgctgtacgaacatgaaaacctgagttcagatcccagcacccacatgaaaaagccatgcatgggcatagatacctgtaagcccagcactacaaagagaagaggcaggggattgctgagttttgctggcctccagccttgctctaggttcaaaggcagactctgccttaagggagtaaagcagagagcagtggggcagaacctctgggcttcacataggcacacacttgcatacactgcacacgcagatgagtggaatgtaggattaactgaactgttctgtgacatttgtacattcaggttcagagaatgattaagtgtctcttgcacaataatcttttgaggaaatggaccctatcctaactccctactttccaagcaattatgcaagcagaaactaaaactaaacccagacataggctccagagtcaacaagatggaccacatatgacagaaggtgaaaccgctgctgaccattgatgaggctgcagggtctcctgactcctgacttgggtttgatctcctggtaggggtgccacacagtctgtctgtgtcccacacatatgtgggcatagaaaagcatggtgttgtgaaagagggaaacatagaagctattggcagtgaccttaaatgtagattccttctgttctgatgcaatgtggacctgaactggggaaagccagtgtgggctgctgaagtcccagagatgcaggcagtgtcgggagtggctggcaatgagtgagcaggatgatgtaagggcggtgtgcggaaaggagaagctttcgggaagtagcaggctgcttacgatttcctttgctttatctcttgaacagtgggaaaacgttaaaggccctaagctgtggtgtgatcaaacttcccatttaaagatagctgtctgactgaggttgaggtcagcagtatgaaggcagggaccaataaataggttcctttcatgctaagatgatggttgggagaacaagggaatacagccctggaaatgaagagaccagggtaagctgaagagaatgactttaaagtagtgtacaaaatagcgacattgaggagctcgaagatggagtagataggagagtaagccgagagaggcagagctaggctaacctcggattcaatctagtataactagctgaaggctggtggaggtctcagcctggaagacaccaggaagagcggctcaggtgcaaactggatacagagccccacaagtaggtgtctatactcagcaccaaggcaaaatgatgggaattaagccatgcttgtaaactcacagagaagaaggtagtagagaggaggagagagcaaagtaagggaaagagccagggttggctctgaagagcttccgtgctccctcactgggggaggactcaaactgcaaagggatccattcattatgtggttgctatgagagtattggctacttttcttgttgctgctacaaagtgtcccacgaaaagaaacttgaaggacacagtttgagaagataacattctgtcctgtccagtggcttgactgaggaatatcatttgctcgtctgagaaatactgaagcagtagcaacagggctgggttagagctgagcttaggtcaggtcagatcccagtacactcgcacacctaaccccgtgccttcacaatgcagcgcctgcctgtgcctcttcaccacgacagactactcactggcttcagagtgagcccctgccctcaaaagctcggtgtggagagggctagcaaggttgctcagtggttaagaccaatgctgtacctgacccctggaacccacgggtggaaatagggaaccaattcctacaagtttacttccacatacatgcgaggtcacaaaataagtattattttttaaaattacattaaagaatctacatgtgcaggaatctgatgatttctcatattctctgttcatttcaaatgataaattgtaaattgttatcagaatagaaggctgtattaaatcagcacgggaagttgcaggaagtagtgtacttactggggatccattctgggcaaaggcactgaattatgcaaacttataaggtacaaccgtggctgattttgataatactgttaaataccactcatttttctatgtttgatagaaaaataaaacagcagaaatcctgattagagtctcagtggcgctcagccttcctaactgcaaccctttagtacagttcctcatattatagtgaccccccaaccagaaagttatttttattgctgcttcataactgtgattttgctactgatctgggagtataggtttgtcaaaaggtttgaaaccagtggattagagagacgtgcggacagccgtacatgtgtgggtggttggaagctgtgttatccatgtgaatgaacgtgtgagtctagaccagatagaatctcctcagaagagtggctgcacccaactttctgtgccatggccacaggatttgtattcaagactctagctggcttcctggatgggacccgcagtgtcatgttggtaataagggtacaagtgcagacgcaaatccagggctggagccttctaacaaaaccaggcatgcatgggaatgaacaagacacctgagaactgtaccgtaccataaggtccttagccaaatatgcatcctgtactcacaatccactactctagagaaataccaacagagcatgggaagcagagtttgagccctgctttttgctgagaattgaaagaaatggccaagatagcaagttatgcgtgatggaagagctcatcctggcagaagccagagccagctagacatcagggaggcatgggatgcaaatgggcttctctgcagacagagctggcacagtggtgctaattaaaatcccaatgggtgtatactgcatggagaactataagttaaaatagcaactaagcacactcatttattatcagccatcagtcgttctggctcacagaactcaggactgtgtgtggtactactcttggtgaagctgcagagataggcgtctactcgcggtcagtccttaccgctgctggtggtagaactggagctgcagagaagcaagaaaaggaggtggtgttttctaaaatacatatgcagtggtaaacaagagcaaatcatatatatatatatatatatatatatatatatatatatatacgcatacatatatacatatatatacatacatatatacatatatacatatatatacatacatatatatacacacatatgtgtgtaactatatatgtgtatgtatatgtatgtatgtatatatatatacatatatatatatatatatattgctttcagatggagataacagaggaaaacagtgagtacagctgagttgcacggtcagcaggctggtcagaaaagtcatctctggaaaccatgtctaagcagggtagaaaaatgaagaggaaccagctgtatgataccttaaagggtgatcattacagaaaacagttatgtcatgctcgctatcgtcaaaatctaaaaagagaggctcatggaagacatggacaaagagcaggaaccagctgaggacagacagccttccccacctgtccagccgtgagttcccaatgagagtttatcaaactgagctgaacaatgtgtggtgtccagcaatggtgatcaatagaatagctaagatggcctgaagcataaagaaaagttctttattatcaagataatttattgatttctagcacactctttccatctaaggactatagatcattttgcaactgaataaataagtaatgtgttctagtcagctttgacacagccgaaaaacagcagcatccagcttcaaagtcataaaaagctgcaagatttaatatatttttcttgctgaaaatttttatcttacaaaatactttatggtttatctagcacattatgagcagctttgagattaggatttcagaagatgtaaaaacatgtggaaataaaaaatatgtagcaatgatagcaatgaatcttggctcaagaggactggagagatgggtcaggatgaagagcactggatagtcttccagaggatacaggttcgattcccagcacctgcatgtcggctcacgaccatctgactccagttccaggggctctgtcaccctcttctggccccagccagcaccaggcacatacatggtacatgtgcatgcaaacaaaaaaacacccatacatgtaaaattaaaataaatttggggggaagtggctcaaaatccctatgtcgagattctaagtctgtgccatgagccagccgccacgttctgagccaggcctgatgctgagcatttggcactggacgttaagcgtttgaacactctctgcttacagtggctcggctaaggaccgttcagtgtgatactgctgtgaaagttgtatgcactcagcaggatcagtgcttcaggtcatgggtttggattatttcccaggctagcgctaagcagtgcagccctctctcaatggtgggcagcatcatggagcctaggcaaccggtcaggcactcgatgacgtcggaaccaagcaccactgtgtggagcaatgtgtgacagatcagaagtgtcaggtgctctctccgcttaagatatgtctgttttgtgggttttactgagcaacaccccattgtgaatcttggctcaggggaacagactgacatttaagctccctgtgtagctcaggatataaacctgcagagcttctcctgcgtccgcctccagagtgttgggattacaggtgtgtgccactataactggctaaaacggattagttcttggtcactttagcatttatgtgtcagatgtagactcattatttcctcaggtggcaccgcttatgttcccaagggttaatttgatagaactttttcggtccctctttcccttcctctttcttccttttgttctttgttgcttttaaatcgtatctttcttacttaacctgtacactgagaattttttaaatatataaagcaatatatgttttatataaatatatatacacacatatatatcacatatatatttgaatatatgtattgggtatatatacatatatacctagtgcaattgtttaaagctttagccaaacctagtggtgcaggcctgtagtcccatctacttcagaagccaaaacagaaggatcaaaaattcaaagctagaatgaattcaagccaatgggcacaatgacagtttagtgagaccttgtctcaaaggcagtaagggacccagctcagggtcagagcactcctctgtgcctgtggccctgcgttccaatgccaggactgaaggaattttttgaaaagcttccactgaatcccgtgagtcacactgtgattctagctatctggaaggctgaggcaggaggctcccagctcaaggctggttgagaccacagcagcttcgaggctcagtcttcacaccacccccaggagactgaggttcattcgccgtctggagactacgagctgactcagaaaagtgaagttataataaagacacatgaaagttgcttcaagcggcgtgaaataaaatacttgtaattggagttgctgcagagagaaggagaaagaggcagactaaggtaattgttataattgaagataattatacactttgcactcacagccagccatgtgagggaaaagaaaaaaggaaatagaggcaatatgcttttgtatgtagtgtttagtttttaaaaagagaagcaagcaattcataagatagaaaaccttccagctctaagaagcatttattatgccggggcggaaagctttctggactccacaaacaacacagtgccactcactaatagttttaccaaaagtgcagataaacaaaccatgccagcttcctctttaaatatgctacacaaagtcaccttttatggcatgaaatgctcatgtcataaattcatagattcagctgccacctcgtagagcatccagctcatgacaataggaatgtcctagacaccatactgaaggattgttggtgtcctgcttaacagcagcaggacggtgcccttcagctcccccgaaagccaccccaagaagtggtaagccaggtgtcagatgacgtgcacggttaagaaacatcagagtgtgagcattgatcctgccctcacctttttaattctgacagcaaagcactctgacatggtctttgagggagtgtcaatcatttgggaactgtactaagatcatataccttggcatcccagatgagtcccagccacagaagcacatcttgcattatgcttacacatgctctcagcaagaggaagcagaacacaccggtgatagtggagtgagtgtggcgtctgcttgctcctgacagagtctagtctgccaacttagcagggagcaaaatgaccagaacttaaagagtttggtgcaaggcctcaggaatggagtgtggaaacgccagactcgtacttgtttgtggtataataatgtgcttgctgtgcgataatcataaaatattttgtagatactttacaaacaagagaaggatacagtgtcttaggtttaacctacttaacccagtgggtcaaagcgataaataagactcctctcccagtaggactcactaagtatccatgataccttgctttcctaggtgagagtgttggttttggagtgagattgggttttgagaggagtctcattgtgctgttcagacttgttataaaaccctggagtccagcaattctctcatagcctcagcctcatgccagcgagcaggaggttggagcgtccgccacacctggctcatagggacgtttcatttgttcctgaaaacatgccttcttgtaaaagactcatgagacaaaggtgagagccctccactgtatttcccaccgccaccagtgtggctaagcagagtgtgtgtctcacctccagatggcacaccactccccctgcagccagagccatgcaaagcttcaatggtagaaaagggtgagtcttaattacgcaagcaggatctctccgagttctgatgtggtctcgtttgtttttcttttgttgggtggttttagttttgatttgttttgttttgtgttttagttttggggctcaggagcttgggagattcttggactttgctgttgttactttgaaacatctttctaggtagccctggctattgtggaatttgccatggaaaataagttggcctcaaactttatttgtttaattatgtgtgtgcacatgggtgcactggtatgaatctagattctctcaaaagccataagtatctgatgccctggagctggagtaacaggtggggggaagccaccacgtgtgggtgtgagccaccaagtgtgggtgctgggaaccaaacctgcaaagagcaacaacttctcttaaccactgtgtcagcctctgacttacagttcttaataataacttacgttccaataatacccatttctttattgtgaaattaatagagctacctcagacactccagaaaggcgtggtcctctccattctccttagcttacttagcatatcttagaatgtgcctttgccagtcggagtgttccacttcaccatctgtcgctcctggcttctcagtgtgatacaataacattccccttccagaaagaaagagcagtgagggccaggggtgtcagagctgtccttcatactcgctttcattgtacaagactagaagatgtttctgcccttccctttccaaagacagcgggcattgtgggtagcagccatattgagtatctgggtacaaagtactttaaacttaatgaagggaaagagctctccctaacttttcaggtcagtgcatccgttctaagttcctttgcaaatcagccctaacactgtgacaccgacatttcaaactcaatccctgcatttgggaacaactgtgacattcaaccataaaaatgtccgtataacagtcttaagacttcctaagcacagtcttaaggcctccattttattcttcattgacagaaaagatggaagctcttgggggggaacgatgtgattttcattagctgtgaggtgttcacaattggatttgttttcagttcattaggtattataatcacattagttatgtggttttatgaggagcacagttggccctgtggacttcctagagcttcccacgggacacacagcggaattatacttttcctttttcaggataagccaagaaaaagaatactatatgtagaaaccatgcccccacaaacccgttctcacccttgatgacagtggttctcaacgttcctaatgctgcgaccctttattacagtttctcgtgttacagtgactcacaaccataaaattatttttattgctacctcatgactgtaattttctactgttatgaatcataatataaatatctgttttccaataatcttaagcaaccttgtgaaagggttattcaccccaaaaggggtcacgacctacaggttatgaactgctgctgtatagtaagctctctgcctaatgctgtgtcgatcttaaggaactgtgaacttctaaaagtttgaagagtgactgccatctcctggagtccccattggggagataaacaagtatcccatggcgtgcattcagagtctgagggtgtacgttgtgatactgtgtccctgggatggaagcaatcatgtcaacttaccaagaggatgcagctgtctgtcaggtgcgccacatagcaagacagtgggaggaagctgtttggtacgcaggagcagtgacagtgaggacacatcagccgctcagtgtggatgggacaggctctggaagactcacgtgctctaggctttattgccgacttccatattcagtcagcttggacctcagcagaagacctgagggttgggtctggcgtctagtttcacgaatgcctcgggtgttccaaagcaggcttggaacaggtaaaggaaagattctggagggtagcctcaggtgcattgtccctgctctgttcctgtatcccacagctggcaaaggaaaatagggaaatcaaggtactgaagtgtgtagacacatagctgcgtgcatatgtgcactgttcttccctggccatgggcagcgtgctagagcaggagaaactgccctaagaagtccctagttcagtgaatgtccagcacccacgtaaacagccaggcgtggcagagtgtgtctgcaatcccagggctctccctagagcccctaaccagccagccagccaaatcagttagctccagcttcagtgaaagactgtttcaaaagataaggcagaaaacagataagatatctgatgttgagagtgggcctccacatatttacacattcgtgtacacacacacacacacacacacacacacacacacgcatgggctcacacacacacacacacacacacacacacacgcatgcgcacacacgcgcgcacacacactcatggatacagcgcacacactccctcccctcaacaagtccattcttccatgtctcgcctttcccaatcacagcatgttccatgctgcagccttagagacagccctcttaccctcccccaccccaccccaccccaccccaccctggcctccattttcttccccaggtgatgtgactggcgaccagtaacacatgcttccctgagatcttcagaactcctgccacccccacttaagatgctgttacatttttaatctctggtcttaaatataaaacagaagcacgttttcttcccatctatgctgacacctcctgtccttggaagctagcccatccccagagggcagctgaccctgctgggaggctgcacacacgtgggcggtgggcctttccaccctgtgaacatgcaaagactgcctttggaattcactcgacacattgaggacagttctcagcttgagaccacagcagtccaaggcagtgcagctgtgtgaattctgtggagcctctgcagccatgctacacagagccaagctgcggggactgtggcagactgcgggctcagatggaacacagtgagggacctcacagtcttttgctctcatcttgcatgcttgaaatataacgctaagctgttttcctacttgtggccaaaaatatatctctggttgagaaagtttcctcttacaaagttgacctatttctcagctcaagattggatgtgtcctgcttagcacacagttgacagttagggaatgagaatataaaagaattagaagtgtccagaggtatgagtcaagaagccagtaggaccaagccaaggagctacttcctgaccagtaggggcaggctctggaatgtcataacttcaggacatcccaggctgagcacacactgaaatggctcccgctcaagcctgccatctgtagggtttccaaagaacaagcaaagagcttcggaccccatccggcaggagtgtctgcgttggtttacaggaatccctggtttacattgaatccctgggctttgccctgttctggcgtgtttcttagaggctgttggatagctcatgaatacgtgcctaggctaaggatgggctttctttttctttgtttcatgatttctggagagacacgtttttcactacgtagcccaagctgaaccctaattgccagttttcctgcttcagcctactaggctagaattacaagtatgtgcctgtaatgagtcataaagtataatgccatggagcactgaggacaagtcagcatacaccatagatcatggcctgatgctctggaaggagtgtggggttgcttcctgccactacatgctggccacaaagactgcctgtgatttgttttttcccttacggcatctgtttaactggttgggctcactaatacttcccatgacactttctgagacactcagacagtccttaagaaccaccagtgcagcttttgtgcctatatacacagttctgaattgttggctctgactctgagaaacacagccatactcataagacaggagaagctagaagctgggaaggactctaaaatgacaacatttctcaaaaggggaaactgaggaaggcctggggagcagctcagtgggagtgcatagagcagaggctgcacacagcacagagtgtctactccctgaacgtctctcagtcattggacagacacaacagccttgtagttaagtgctgtgggaagagtgaacgcttagacttctggtcacatgctcttcaagcaaggtgatggccaggtttcagcaccagggaactggccacaaatcctccagctctctatcttgtgtattgtatggatgcatcatctgtcaatttaaaggcctatggcctataggaaagggtagaatagaaggagagacatctgggaggcagaaagagttctaggaaagaaccaggcatgagagattcacctggaaagctgtgacaagatgaatgtgtgggacctgagcacaggtaagcagccaattggcagagtgttgattaaaataaatgggatgttttaacttatatctagccagaaaagactccagctatatggtcaaggtctctgtagatatatttggagtctgagtcttatttctgggagcatgggaatgggtgggagaacaggacccaactaatacagatgacaaaggttctactgacaaaactcaagtatcttatgacatgagctgaggtgaaggtcatgggttaccctccagacagcaccttgaaatgcagcccctgcacaatggctgaactagacccttcaagtcatcagtgagtagctaagattacaggcctgtgcaagcaagccaggccagaagggtgcgggtgcgttttcaacacactccctggaagtgatgttcaggactgctgtgtcagacactgtgctgcacaagccatgctccatccttcgtctcctgcaccgtggggatggattgctgtggcacagagaggctattacagacagtctgctgccatctctggtcttaagttttgcttctccagtcctgagggttgagcatttttggatatacagtggtatcagtgatgcaacagagggcactaagaattacccctgtcctcatgcatgtgtgctgcatgtgcctgtagctgcagaggctccaggtcaacagcagatgttatcctcttacagcccaccttacttctgaggcagggtctctcgctgaggttggagcttaccatttgtgctatacccactggcggcagagcgaactctcatgtcgttttactcccagcactgatcaaggctggattttgtgtccatgccaggggtccaaacccagttctcacgcttgtgcatcaagcactttactgactgagccatctcttagccacagatctgagctttggaagtactgtgagctataagaggaggatttggctgggagacatttatgaggaagagttcacttttcaaataaagaagcagaagtttgtttttgttgtcttgttattactctgaaaacaaaggctgagtcagcgaacctcagaagccaaataaagtgggtgtgaagcaatgctcagttgagtgtgacgggagctagcactgggctcaggaagcgtctgcaggtgaataccacatgcatcacagccgagctgctgcaaagtgccctgactcccacagacgacagccagggatcgatgccccaggagaatgagcggtggacaaactgggcgtcatcccagaggatgatggctgtagctccctcaccttcacagtctgccatcctgcatgggggatatgaggccagctctggatggcctctgagagtactgagggctggtggagtaggaagcccttctctgacaaggccattaacacaaaggcccacaggattaaataaaacataaactagatgggctggaaaggtggctctgtggctaagagtacacagtgcctcagagttcagccatgcacctataccaggtgtcccacaacttcctgcaatgccagtctaggatgtctgacacccctggcctccatgacacaaacccacacatagacgcattattaaatataaatctgctattaatcacaaggtaagaggctgatgatattgactcatctatggttctggtggatttctctgaagactggagtcccagctggtgtatagcctcctcctcgggttctgggagcctgggtaaaggaaggtgattggtgctgtctgtgcacagagagacacagaggatcagtttgctgtgtcccagtggcctggcaagcaaacctgtatcactcctgctcctcatagaaagccagcctgaaagctgagaaaagcaacttcttgctcgaggcctcctcagaaatcctgacgctctgccaccttggaacacttccttctgaagatgcattctgaatgcccactgtgggacacacagagagacccatggaagagacactgaagtgctcaattttgagtaatggtagacagaaaaattccttctaagatggggccgtaactaaatttggagggagaaagggttgtaagaagaggggacctgttccagaagcctggaagctgagcgctaaaggacaggacagtgtcagaggagacggtagatgaggctgtcagtgtgtagaactctcaagggagggggacagggagtggtcgtgtgtgagagttaacggggagactgctggctctgagactcatgctcaagtggtagtggtatggctgtccccagaacgatccactttgctggttccagagtgagggtctggccccaggacaccctgggctccttcggcttctctcccttgccatgtaagccacccctgcatctgagagtgcccttgctagtcttcccggaagcatcctgaccagaacctagttttcagattatgaagatgctgaggtttttaagggaaaagagatgacttcatccctgccctcagagtccttttccgccaggtcaaataagcaagcatgcagcaaaaaaggaaggatccccaaatccaattgcatgcttgctgagatgtccctcatggcctgaggcaagcaaagcctcttcctctgccaccctctgatcacaggctacgtcaccttgacccagatgctcagtgaatcccagctctgtctggagtatgtgcagcacaggctgctagaaataacaaaccttctctcttctcttgtcctcctcttctcctcaccccccccccgccacccccaaatccacactaaatcaaaatgaggaaaagcacttaaagaagacgttcccctccctgcctagcactagctggtgctggtgctggtgctagtgccggtgccggtgcgggtgtgggtgccagtgcaggtgccggtgccagtgcgggtgcgggtgcaggtgctggtggtcatagtcatcgtcatcatcatcgtgatatcttaccacagtgacagaagtgaagttaggacagagggcatgaaagggctgtcctggggttcatcccctggcccacacatccatcattttacatagggcagggatttaccagagaattttgctcctcctgactgttaacttgtctggttggttcatttgtaacccatacacagtttgcatacctggtactgacagcaggagccattcccatggggctggcaactctgccctccctggtcccttaggagaggggtcataaaccaagatggtttctgtcatccttaattacaggtccacaggacagctgtgaagccataataactatcattactgacctgaacctgcttcaaaggggctgcaagtgttcgcctccctagataatctaatctgcgggccaccccagccctgtgaagtgttattatagggcaggctgtgatctgagcacctacctgcttagagcgtctgctagaaaagtgaacagctgccctgctctgccccttttgttcttcttgctggtatttgctttccgtcctcttggaattgatttgggtggctgatagtccaagctaatgaagaattaaacaccaaacatgaccaaccacaattattcaggacctctccatgctgctcaggcctgttcactgggactgaaactagggttaggctgccaccttgtggcttaaaatacctgctttaaagataaaaggccaatagtttttactaatgattgaaatcatttactgatcagtgaaatcatcaaatctgtatatttgacaggatgataatagattgtggagttttcagcacaaaatatctatctatcttgctaatcccaacactctgcaggcaggggtggtagaaacaggagttcaaggccctccttggctatttagccaattcaagaccagcacatggtacataaaaaaagtaagtagcagaatgaatttcagcacaagtttataacctgaagtacccacctgagtcaaggagttgtgtgcccgagtcatcagaattgccatgcttaagaggggcgggaaactccactgccccttttcaggactgcaatgtatttttattcatgactgtctgcaacttgattggaatcagccagtgtatccaataatgaagcacactataaagcaaaaagaccttgtgcacaactgttcactgctctctagctgtgttaacactaccaccttctggagctcagcttggtgtgatccacaggtgtcatagtgtcacttgaggtcagtaacggtcagcgggactcctttgccctgagtcagatcatctcaggggtgagctagaaacccaggacaatggaagcgcccaggaatctacaagaacaaccctagtaaagactcctagtagtgggagagatggcctggaacaatagtctcctataaccagacaagacaagtggagggattgagacataacccagccacaaagccttcgacttacaatttgtcctgcctacaagatgcgctggagtggcacagagaaattgtggaagtgtccaacctgtgactggtccagcctgagatccatgcaatgacaggaagcctaaccctggcactgcccagagggccaggaaccagaagctagatagccagagacttaggatagaaccaaacattacaggtcccctcacaaaaatcaagtcagtgaaatgattcctgaatctcatagacaggagcccggcataatcgccatcagaaaggcttcggcagcagctggtggaagcatgcagagacccacagtcaaacactaggtggggctctagaaatcctgtggaagggggtacggaaggattgtgggagccagaggagtcatgggcatcataagaaaatccacagaattgattaacctggactcatcagggctcacagagcatgaactgacaatcagaaagcctgcatgggtctgacctaggccctctgcatttatgttatggttgtgtagcttgatgttcttgtgggactccttgcagtgggggcaggggctgcctctgatcttttacctccttgtggggccctttcctcctgctgggtcaactcatccagccttgataggagggtttatcatagtatgactgcgactttcatatggatgtttagttcataccagattgcaggcctgaccttgtctgaagggaaaaggaggagtggatggggagggggagggaagggagaagagctaggaggacaggaaggagaggaaagtggtcaaggtggagagaggaataaatttttaaagattttttattaaaaaaatatttatatatgcagtcccaaaatcggctgctctttgtttttagtaaggttgtttgtttgtttgtttgtttgtttgtttgtttgtgacaggatctatctttgtagtcctagctgtcatgggactcactctgtagaccaggctggcctcaaactcacagagatccatagattacctatgccatagattacctatgcctcccaagtgctgagactaaaggcatgtgccaccatgactgacctacaaaatcagttattcacgacgagtcttttccagaaatgtaacatgcaccctacgtaaggaccacactcccatccctgccaagaaggcgaagagcacaaaagtcacaccatacacatgaatgggagtgcgttcacacagggagggtacattgcatcgccacctactgggcaagcagtgtatctacacaagtgggcaggaagttgtaaagaagctgggttgtaaaggagcctgggaaaattcaaggcagtatccacgtgaggtgttggtggcagaattatggaggcagatccagaaagaggtggagaaaaaagagtgtaagatctctagaacaggaatagtccactctggaggtgagaggtgtgactgtacacataccctgatgccacgctcctctggagaccgttttgtctcctgtctctcctccgcccctgctgtagcctcagtcctccagtcaagtagcagtggggcactggggtggaagccgtctgtggctgagcctgaggttttaccctggctccccgaagtgaaccagacaattactcttctcattatgagatttttgtacagggcaagagctggggaggatttctttcagtggcttttcatgaagttctaattgaagggggtaagctgtaagttccatcttttattcagtagctctgagtgtccccctttcatcctccctccctggactgtcatgctaggctggtaccccccacacttcacctattccagcagccgcctcctgttaagagaacaagaaagaggaaagatgagacgcgttcagaagtggagggagccctggagagccctgcgtgcaggctcctggtgcacccgctgctctgccccgagcaattccacagcagctatcatctacaaagtttgctctttataaatcacattgattaatcagggtgtggatgaagaaacaaaactgtgtgtgtacaagagatggatcctttgtctgtgtttctgaaagtgtttcatgatttgcagctacacaaaattatatcagaggtcactgtgacttaaatgctctcccatgtgtattttagaaacctgtcactgcgggcacggtttaaagtgaattgttctttgtctcctgaaatgtggtggttacttacccatgcagaagcaatttgtctgtgtgtcacactgaccctgttgtgtttgcagacataatatataaccaggggaagttccatattacccaagaaaccccaaagcattatagcgttagaggggtatccatgcgcactggcagacagggcggtcgggtctcctcggctgtactctacctcggctatgggcttccttgaatttgcaggtagatgtttaatagagcattctgcctctgttgcagtggcttcgacttaccctctttggttacatctggtttgtcgctgagatgccctacaggtgccagcacgtgcgcactctcagacggccacgttactacagtaatatcactgaaccaagtgaaaatgtaaaaattcgtggtctttctgcaagaaaaatttagttatgattcattagcctaacacagaagtcatgttttcttccttttctgcttgcttgagcataaacttcaggctgttcctcttaattagaatgttctggagctaaccaaatgggtgtagtttaaataaggcctctcttaccacagctaatgttagcctggtatgctcctctattctccgtatgtctctaatatggaaatatttgacagtgtttacaaattacaaaataacaaataaggagcactagcctgagcactgtcagcagcatgatggcgggaacagagggatggtccacgtggaggagaacatggctgcgtggagaccgggtccaagtggaggtggtcagtgcttcccctggagcggggagcagtaactgcgagagcagtcagtggcggctgggaactaagtgcgggtcttatgcctgctctgtggttccttacacattggtcttgccctctgctaaggtcgtgtcctcagcacaagcctttcctctgaaggtgaatttgctgggtacccaatatcagctcagtgaaagctcctccttgaaagtgaagccacactctaagtgggcagcagtctgtgggcgtgtagacagacagacagatagacactggttaatctctagctctaaggaaaagggcttgaggagctacggggataaacagaggcacgggaaggaaattgctattttgcaaaatatgtgtctaggaaaccagtgagatggctgagatgtaaagatgctcaccaccacgcctgacagcctccacagttgtcccatggggcacatacatatgtatgcgcgcgcacacacaaacgcctatataaataaaaatgaatttaaaattgaaagttaggaattacgtacgcacatacacatgtgtagcaaacatttcatactgccttggctaaggcgtattaacgcaaacaagcatattttgcttgctttggggtgctggaagtctttattgactcctcatactaagatgataaactacccactgctttggatgctctgctacacactggtgcatccccagtcaaatcccatgtgaggaaatcaaacatcacagcacagacttgaagagagccagccaggttccaggcacgcctaccttctgtgaacatcgccctggcggctgtgaggccttgctcctgacagggaggctctgtgtttcttatgtgaagtgctgctagagacctttcagattctgaaatagaggtagctaacctggagagaagacacaggtgtgagcgtggcattcctgtggctgtcggagtctcctcgtacacaaccgtaattttacatggtttcagcacacatgcatttcaagcttctgacagcaccacagcagcactcagcaatcaggtcagggttctttctggtttgggatcttgatatcgggactgctcagcctttcccgggaagggattctgaacgtgtagtgtcgttctctctgcaggaggatgaagccttctagacccatgtgatctcctatgaagaactgaccccacctgctggtcaccccagctcccaccatgggccctgcaggaagcgtactgagcagtgggcagatgcagatgcagatggtcctgtggggaagtctggctgccgtggccatgttcttcctcatcaccttcctcgtcctcctgtgttccacttgcgacaggttagaacaaacatgcatgttctagagcctaaacctgctgttttccctgtgtcccacggagcctctttattaagagcctccctggcccacattcatgggttggtcacaaagggcattcttcattcgtcaattgaaaatgcttattgatcttcctggagggcaaagcaaagagcccttcctatctaaatgtctggaatgaattctgcaattctttgagcacagtctttgtgtgctgtctttggccatgggcatactgaaatctaagtgtgaggtactacatcctgttgccacagtgggaagtcactgagggtgctcactattgcgtggcctggagagctcacatattagtaaaactgtgtgtgataaactgccctttaggaagacataggcttgtatttcctacaagagaggctcactgaaaatggaagccttttttctctttttttcagcattatacttgtctcccttggctcagggagaagtgaagttctttgtaaccaagacggatgcccagaactgtcagagatgatgcagggtgcagccttctggtctagctgggagccagtgggaaccagcttagccagctccatactcaactctctcgatttggatcccattctaaaatctgtcaaaaagagaaacccatgccctctggcctctgcagcctctcctagtccctgccaagcaaggactcaggtcttgaaggacaggacaagcctagagacactagacttggctccccaaaacttcaagaatctgctactgtaatgactcactctcccgctaggtgtcaccctcttctcgccacagatagaaatgtggtctttacaaccaatggctttctttagcctgttctgtgtaaaacacattctgtttttactaggcagacttttccgtagactggaagtacctatgactcatcctgagagaatgtcacctccctgatgtgccaaagtagtatctcccatattttctctcatcccttacggcacgtgacttcacagactcttaagggagaagatgaggtcattgttaggatttgctaaagaataaaggcagtgtctgtcatctgagtgttccaggcacagacagatcctgcttgcagcccgctgtctcccgtagtgaacttgaccctctgggaaggggtgtgccagaagcgggctcagcctttgctgtaggtcaggactttttctgatctagttttattaacctggttaataaaaccagagaggcggagctgataaatgttaggctagggaagtatggtgtccacttcactttaagggacacatttgacatcagaatggtattttcttctccctttcagagagaagaagccacggcagcatagcggggaccatgagaacctgatgaatgtggtaagcctcggtgtggctgtctgtctgtccgagtacacctctccaggcatggcgctactggctttcgacacaactgaagctggcatggggacgtaaatggatattagctgtggctttctgtatactgtatgtacggctgggagcctggcttgaccagtgttcagggtagcttctgcagagatgtcttcatgcccctcctggtctgggagggctgtcacaaggaacaactagacaattcatctaagatttcttgtctctctgctctggagagcagagtccagcattcagtgttgtcacacgagccccttccagagctagatctgttcccaaactcagctccttagtgcacacccacctagtccttgctgtcaccttccctctctgaatgtatgtcttgaagccaagatagcaactgtacctctctgacttcagtcctaactagtgccatctgaaatagccctgctttcagatgaggttaggctgtggcactagggactgagattttggcatgcatttgggtggcgctgcagccattcatcggggcctggagcccacagcatagcttggccttggtgcgttatcggatcgtcagcatttgatgggatcctgagagacccagcagtctcaaggagagagctgtccacctgggtggtgaccttttgttgtgcccttaagtggcagcagcctcagcagctgtgtctgcagggctgggttgagctcccgctgggccccagggcaggtctaggagagagggcgcttcctgctcccagccaggaagcacatatgcatttaaactctggggggcctgggctgtttgcacccagcaagcatgttcagagcacatgcgtgaggtaccaggctgcctgaacccccacttcccagtgtgcctgtagcccaagcagacaggaagctcctcctggaccccagccagggctctcttcctttgtctgagaccacccatcacagccaccccggacctcagcatctctcctgccctgactgatgttctcctgctattttcacctcttatcttgtctcactccttgttcccagtgtctctatgctccccagtgcttgcacagggtaggggaggaatggggggtggacagataggccctgtctttcttcagagcccaccttcctcagtcaggtggacaggaggttgtggctgaactcaactcgagcctcacttcctcctagtgctctcaggaatggcgagacctggcagctcaacctgagtactgtatgaagccagtgttcaggggtgggaccaagctttgccggtcactctgatatgggcatccacatgaacgccggtcattctcgatctttcatccccgttattctgcctgaggacagcagcctttgcgggcagggagagtgccgcctcttcattctcttccccacataggatctcctccacacacctccaggacagactgtatccacaggatgcctgctgacagtgccagtgaggcctgcacacagctgcccactgagctcctgacttccctagaccactcccagtttgctgacttgtttctcatgggggctaagatgggaaagagcagttcagacagagattatagaagcttggcagtggcgtgctatgcaggaagccttcccttggtccccctctctgtcccctaaggacactgtttctccaatatgagcatctcagggtcctggcaaagcacaaacacttcaagtcactttatagcagcagatgcgagcagtattggcccaaagagcagacttcccggacactggcgcactgctgcacttcaagggctacttattatctgttattatttgatttcccatcagagtcagtaagattgtgaagccagcgacccaagactcctgtacaggttgcatcagaatttccctgtgatatcctgagacctgggctgtgtcttgggcagcagaagccattaacatgaagagggtagggtccgacatgttagacagaacacatccagaagcagctgctgtcttctgccctgtgaggactctgcctgccatgttgttccaggcagtccacacagcaccatcagcccagaggaacaaaatcagttctcccaagtgtctgtgcatctctgaaagtaggaaaggtttgcaaagcaattattcagtagatgatcgtttcaataaagctcggaaataggctcgggaatgtatagcattaaatgctgtgttgaccatgtttaaatctcttcctgtcgggacactttgctgtttgtttgtcaccacctgtgttttagggatggcattgatccctgctgggctctgttctgacccacacaataatctgtggtctccattccccttgagctaggaaaacacagtgtacccgtagcccatctgtaaccacctggtgagatgcgctgcctgcagtcctgggagacccccagtgcctgagagaccagaaccatacttaggaaataagttcagccattctccattggagaaagtggtccccactctcaacacttgagtttatctagttatccatggtgttcagtctaaccgttcttgttttacctaactttgtcaatggactctggcatttctttggctgctttgatttttggagtatccgctggtgcccagcagattcttaatagaagatgtgtttggatttttcagccttccgacaaggacatgttcagccattcggcaaccagcctgacaacagatgcactggctagcagcgaacagaacggggtgctcaccaatggcgacagtaagttctgcagaggaagcactggggagccttaggctttgagcaaggtgctcgggggcggtggtgatgactctgccccagggttcccagcacccacgtggcagctcacaactctccctgactgtagttgtaggggagcctccgcacgcaccaggcatgcaagcgatgcagatgaccagtagggaatgtactctatcccagtcattgttactaccagctagaggcctcatttgcatagtggctgctggtgccgggtaccctcttggagtgcgtgctgtcattcctttcactgtgcccacacacaggtggcactgtccccagtctaagtgagagcacagggctactggattaagttaccacagtctaatgctgcagtggctggagtgactgacagctggccaggtcatgagtatgaggtgtctgcctgcaccctgctgggggctgatggagtcacctgcctgcatcccttcctgggttgcttctcccgaatcatcaggtctttcgctagcctttactctttcactgtttaggactatgcagtctcttgtctaggtaaccaaggtttctctacccagcccaatgttggctgactacacatggggagtgggcaggggagggacagcacactcacggagttgctgtgtcattcagcatgtggttgccagagactaggacatggacatctgtgagaaaccaaatccttgtcacagagtcattaataacctgactgatgttgttatcccagattttgagaatctgtaacttgaagcagggagcccagctctaaggcagacacttagtctagggcaggcatgttgttccacacagtgtgcactgactggcaggtggagtcgcaatgatttcttcccgctttgctgtcacccaaggcaaggaagggaccttgaaggtcatcagcagtggtacccaaggctgcaggtgccagtgcccctgtgttctgagaccagatagctagagccccagcaggagccactcctgcaggagaggctaggactctaagcctggctgctaaaccctgcggctaagggtttcttttcctctccctaacagatggctggtctactcttccatacaagtatacaatgtggtttgctcccgctcaccctcactcccctctcacctccacgcatcctgctaaccccgtcctcttcccagatgccccctcctccggttttggctcacttgggttgttgttgttgttgttctatgggggggggggggggagctgggcgccatgagcagctcccagctgacacgatgctgctaatttctctctgctgtacagtgagatccagttcctaatgaacttgggttgatataagcaccctaagagcaaattccattccacttgcgtatggtcgaacagtctctggcacctagccaacactcaaaagccagatacgactgaccgacaggtgtcatggtcaccactttagaggcaattcaaggatgtcctggctggactccttctaagaggaggcaaggatgtgaggctgcagtgatgtggaaagagggcacagagtttccgggctcttttaatgatggcctaagggtccatcatggtgtctcagcttctgctatgtctgccagatggaagagactggtgaactgggagtgggaagaggctgctccctcatctaggcagggaccaactccagtcaggggaagagaggacactcatgccccatggttttagagtcttgtagtctggtcccaggggttgtcaattttgtatgctacactaggggtaaaacccagagcccgtgtgtgaggcaagccctctgccgctgagttactgccacggcccgccctttacccagcctggtcttgaattcagccttcctgactcagcctctgtaagaagccccgcccccagccccacctggtgcctggcaagcctactgcctagtgggtttcagcaggagtggtacgtaatgaagtcaaagcatagcccacatcatttattcaattttgtactgggaatgctaccgtgaaccggttcctttcaatgtaatggaaataagacggtgcattggcactgaagtctgcaactgagcgtcaggtaaaaccaggtttgtagtggcgacatcgtggtccacgcactggttattcacaccttttccccttcagttctttcagaagacagcacgctgacctgcatgcagcactatgaggaagtccagacctcggcttccgatctcctggactcccaggacagcacaggaaaggccaagtgccaccagagccgggagctgcccaggatcccgcctgagaacgccgtggacgagattctcacagccagggctgcagacacggaactggggcccggagtggaggggccctacgaggtgctcaaggacagctcctcccaggagaacatggtggaggactgtctgtatgaaacagtgaaggagatcaaggaagtggcagacaaaggccagggtggcaagtccaagtccacttctgccttgaaggagcttcagggggctcccatggagggcaaggccgactttgctgaatatgcctctgtggacagaaacaaaaagtgccgccacagcgcgaacgcagagagcattctgggaacttgcagtgacctggacgaggaaagcccacctcctgtcccggttaagcttctggatgagaatgccaaccttccccaggagggaggaggacaggcagaggagcaagctgcagaagggaccggtggacacagcaaggtgggcttgggtcatgctgaggctaccgctctgagaaatacatatataaatactagcgtcagctgtgcctgcattttcaccctctgagccttactgagagattgatgtatataaaacctttctcagcatctcatttagatagtttcaagattgtatattatatatctacttagactgctattgctgccttcatattgaagactaggaaccaaataggcagactctttaccagacagcttccctcgtctctgcctcaggcagccaggtaaccttgagtctttgaggagagtcccacaactcagcgcagagcggcctttacagagagtccggatgtgcagggcccctgcttgcaacttactgtgtatattttcctgtacaccagctagcagctcttatttttcacaagttcctaaacaatattttaaagtcatttctaagatgttagcagagatctaaagtacatcagtagtccaccatagtcttcagtgcatgtgtcttacagagtctgcaccatggtgagcctctcacctggggaccggccagattgtcctcacagaataactaagctgcactgcgtcagtctgctaataccagactgctagcatcttccagccgcagcttcctctcgggcctttgcagggaggagcagcggaggcagcagtagcattgctgacgggcagccctcctgtggctgcactggttgtattatgaggtcgttctttgcactgttctgagtgagtttgtttcaacgttttacattatctatgaaatcagctgttgcaaacaccatcaaagtatctgtaagcattcccatgaagtgcagtagtttctacccttcatataaccaaagacagatgaagccaatataagtctgcactgcctaaactagctaaagctttttagtggcaagcacttggaagataaaaaggttagttgttagtaagcagttctcccggtttcacattaaaaactggaaatacacatctaaattatctcttcacattatacacgcaagtaatcttccatggaaacaatgccaattttatgtgaactaagaatttcaaaggtttaaatgtttatcaaaacaaagattttattgagcatctactgcatgccttctaggtgttagttaatacaccagtgaacaaacataaattaatgaaaaccccaggtcatgtggaacttcaactttaagcagagctttaatacagtttaaagggaaaaataaactaacggagattagaagtaagcaggggtggagtacaccttggacagagttgttgtgtgtgacggtaatcctaagcagagttacggagcaacgaagaaagctgtacatgtactctttgggacattgtacagcttgaccacttggaagcccctaagttatagcagtggctggtatacagagggagcacggggtaggaaatagcaatggacaaagataagggcagtttgcagacaggtacctggatatgaacttagagagcctaggctcctagtcaggacagaggcagtagaagtgatgagaagagctagctatagccaagagctcagctgggggtggggtgtcatgttccaagggctggcacagctggtgggcacaggaaaccagcaggaacccagctggagtatcacaggcaagcaggagctggggcagagctgagcctctgtgtgtgtagcatgccatacctttagagagcaggactggtcccaattttgacatagctcagggcagctgcagaatgactggtctaaaagggaaggctgggactagattcatatggtttaggaccagtagcagaaatgtggtatttaaacatatagggttagatgagtgtcttttagggccagaagagccccaggaacagggctctggggacggggaaatagcaggagagaccaaaatagggacaaaaaccaggaaagggagcagggttgctgaagaccaggtaaaggaagtgtagggaggaagggctgacctcaggtcacacaggacaagccacacatattgatgtggccatcttgagggaccaggatgaagagtttctcagacttgtgaaggtggaaactcagctggaatggctgcgaagaccatgtgaagaggagagttcatctgaggctttattgtaccacagtgagaagaggacagagctaaaagtccagttgagcttgtttgagcgcagtgtatggcaagaagttcgtttgtagtaaccaagaagggactgagggacagtggggacagggtagagtccaaagaaatgtatttgcctcttcaagttttctcagagaatccagaaacaaggctgtgagcttgtgtgcaccaagtagatgggctggggaggaaacgcaggtagagtatgccttagagaagtggcctgagtcagggagccgctctcggggcccacccactgggaagacagcagaagaggaaatgaagggggaaaggaagaagtagctacattcacagcagtgttgggattacagagaggagctgaataaggaaagctggcatggcgaagacagagagggacgaagaggaagttaaggcctgggccagtgaaggactctgggagacagagaagcagctgccagtgtgggagagacatggtttgcatagatatggcttggttggaatgaagaattaaggtcataaatacgttagagatagttaataaaccaaggtccaaatcacagaagaaccaggaaccaaagtcaaggagaaacagatcaaggggagactatgagctgtggggttcttcctggtgatgccgcaggctgtcggatctaactgctggcgtgccttgcagaactgcagatcagcccttcctcggcgactaacatatcagaagacctctgtacaccgtgaagccgccaggcagccacgcgcaggcacggtcatggggtgctgatgcaggcgacgcagagctgcctgtatcctgtagaaataccgtgaaagcatttgcataggcatggacataagtgctaggctaaactattggcttcagactgttttactctgttttgttttattttatttttttgacagagatttagttccttgtcatacaagtctcgggaagaagacccgactcttacagaagaggaggtaaatttcaattcttttcaaataaacaaaaaagtctgaaatgtagatcttgtgggctggagaggtggtttagcagttaagggtatgcgctgcgcctgcacagggattaagtggctagaccctagctgggctgggcagcctacaaccagctgtctgaccggctccaaaggattccatgcagtgcttctgcagtccacaggcatctgcgctcacatgcacaagcaactttaaaaataagagttaaaaaaatggaagctaagtctgtaatcccagttgccataaatccaatctagtggcaaacaacaacccctgtcacgcaggaggatcaagagtctaaggctagccctggctatattaggctagcccaattatctacataaaccttaaaactcccattactgaggtatgtcagggcaggagcttaaaggcaagaagtgaagcagaggccatgaagtcctgctataaggaagcctgttttcttatataagccactgtcgcctgcctaagggtggcaccatccacagtgggctaggctctcacacaccaatcactcggtttagaaatggcctctaggcttgtctacaggccaatcgtacagaggcccttttcaattgaggctctttctcccagatgattctacttacaccaagttgaaacaaaacacaacaacccagcctacagtcatggtttctctcaaacgtaatctcagggcctacttgcgggctggagaatgtttatttcgttcaatgaagcctacactgcttggcaaaaccctgccaccacccctccccccacaaaacttagtgcttcttccaaggataaatgtcctgtgattgttgcctgggtctgaaaggcatgacaagccctcaggcctgtgcttggatgtcaaggctaagatgggaaggtatgtgatagactgtgaaccacaagaatggcagggtgtgtaaggaaccaagtgaagggcactaggctgcaggaagggccggcccacatgaacaggaggaagaacgagggtaagaaaacaaggagaaggagttctagtcaacagctgggtggccgccatagaagaaaatcagcggtaagctgaaaaattccaaaagtcagggtggttgggagacgggaaatgtctccctgaggaatgctggatactggtcacctcagaaaagatgaacccagataaggctaacatcacttgaggaaaccagtgagaagagatgaggaggagtatccaagagccagagtaaaaacttaggagacttagtgatgccttctaaacgctgaagccgtgattatggcatgcagcgtgctaggttcggacacagtaccagacaccttccctgctcttgctgcacatggctggagtggaaggccccgtgtgggccctgtgtgcctgtggagccacacacacaaagcaggagcgttgccttgtacagagaactcttgagtgcagtgcaggaagatgaagcatctcggagctcaaggcataattcccacagaggatacttcctagtccccggcatgctcctgttctcagggataggaactttcacctacctatttctctgactacgtagggcaaaacctgggagtcatgggtgaggcctctgttacttcactatgccagggacagccaattgcggaggcccttcagaagccttccaacctctactcccttgcttgcatgtctggagcgccttcactggctcaggcactgctttctactgagtcctctgtgattctttgacctcccactagtcagtgttctccatccacaagagctacatctggtcccatgagatctccacgaaactgggtttatagagagttaatcgaataagtctcatctacagaaaggaagatattgtttaattattctctagtaacatacagctcttacaggcagtaggccaagtgtatagcttgtcaccaagaagcggaggagggagtcacagcttgcaggtggcttgttcatgtctctctgttccctagatctcagcaatgtattcctcagtgaataagcctggccagtcggcacacaaacctggaccatgtatgaaagggccagaatctgcctgccactccatgaagggcctccctcagaggtcgtcatcttcctgcaatgacctctatgccactgtgaaagactttgagaaaactcccaacagcatcagcacactgcccccggcaaggagacccagtgaggagccagagcctgactatgaagccatacagactctaaacagagaggatgagaaggtccctctggagaccaatggccaccatgtccccaaggagagtgactacgagagcattggggacttgcagcaatgcagagatgtcaccaggctctagcaactaaaagaggctgtgatcagcagctctgctgtggaaaggaggtggctgcagtttctcgctgctttggttgactgaaatcttcaagtgcagtctcccagttgtctcccagtttccaaaacagtaaggtacggacctgcctgccagggcagccaccctccagtgctcccaagaaacccctgggacccctcacctccacattccacagaggaaggccagctgtgggtgctggcggggaagccccacccaccaatgccaaaatcccactgcctgctgaagaagagccaggtttccatccttgctctctttccctctgctcctcatgctaaaacactggcacttcacccctggagacctcccatgtgtgcttcatcccaaggatggtctcccactggcctgcactggccttcagtaaatgttagcatggagagaaactggttgccgttaacccaccctcttcccagacctgcctcttagtccctgggaaggaacctggatgtgcaggctgtgaggtatggggtgggccgtccctggagtctctggggttcttgctcctcgttggacactgcatctgcagtcttcagaggttcatgaggtcagttgagatgttttttaatgttctatgttgaaaaccttcccaacagtgtttggattttcataactactgtggtacttctgtagctgttcacacccagtgctcttccttccaaacagagccttaatgtttctgtgaggatggcagccatggtgtctatccccaaagggctgcggacataaatgtgttcccggtggtctttgctgcccacatgtgactttcctataatctgatggtaatctgagtaaaatgtaaacatttattttattatataaatttataagatgttttatgtttaatgcctaatttctagaaagtgccagaaaatatatattaactatttggattttatgtacaacgatttatactctcattttacaaacgataccataaagcacataagctagataattataagcagtttttattcttttctctaatgagtaatatagcattgaagacttgttaaggctcaactcctcagacagtactgggagttctagatccaaaacactgaggcactggtggcaaaatgcaatggacataaatgtgtcactgctgagacactcggtgttataaatagaacaaaatctgacttgggaatcctgaaagtaccagactttcactgatgtctagtgacccctctaaagacagcagtggcggtgcccccgttcagtctctgccgacgcaaattgcccggttgttcatcgcttcacaggaatcagtagctgaagcagctcacattgaaagttcagtcatcgctctagatcttcccaggccagcattggaaactctgttcacttttcattttaagaggagcctcgctgaagtgcaggacacagataaagagacagccttttctttcctactgccatgtggcatcttattctaatgacttaagaatcatgctattttccttccctgtgataaagagtgtgcgtgggaaggtgacatgaccagctctgtggcctgtctttccatccttgtactcaccgactggttgtggatcatgcctgtggagctgcaaactctcttggatgttgttggcattagcctaatcctccatgaagatggtgggcacatggataagcatcgcctctgctggccccgccacagcggtgggataccccagggaactgggagcagtaatgggcaaggctgtttgcaaccactgattttcgctgctgtgtattaatgagtttggcccaaccatctctcaggccacgagggtcccctcatcacatgccactccccgtgccacagggcgctcctggacatgtgcttgccaccatgcaattccttacaggcatcgtatagctcaggagtttgattatgttttataaaaagtcttagcaggaaagctggtatgatctctaaagtataaaactctttttttctatgaatgcacgctttattattcatgtaccgtccagagacatcaaacccatcagccccctgccccaagaaggaagttgaaaaacattaacagtaaagagcctttgcccaagagtcagagatcctatgacctgccttctctgctttggtgcccagaagagagtgtgagactcttcaaggctcccagagcttcggggaatccagggtcattttgagaggactctggggttctgcccggtagtccctcttgatgcacagtggcagcagcacagtttccaattcgtgagggccttagacaaccgcttgagcttcatctcacgccccttcttgaagaaatagtacctgatgtctccttttgtcagtttgagtttgtcagccatggccgccagagtcccctccttagtctttctcaaagtgcttttttacttcctggaactgctcataggtgaacccagagtatccatcccagtcggacagaccccgagttgtctccatctcagctacttctatctcttctgcagctcacttgagttctgttcttcaagattccataaaactctttcttcagagataagttcattatagataatcatgtcatcttgaattcctgttgtccaaatgtcccagagtttccaaacgtggtatgtagcatggtcatgaagtgtgcactgacatccctctcctggtccgagaagctcgcagtggtaagagaacatgtgacgggcgatctcacaggttctgtacaaggaacctggagaccctctccccaacataaatccaaaggaatacgcactagcttgtgaggatacagattttagccaagtgaaagagcaaaagctcacagcaaaacaaaagcctggacaatcaagccaaagatgccagcacagcaggaaatgtgtggtaaccatgtacctgacgctcggctgagcaaagcgagcccctcaccagtcagtttgagttacttacttggctaaaatccatgttcctgtctttgagctggacggagcctgtagtttggtttaaagtctaaatgttacagagtttaaatatgtgggaaaccatcatcaaaaggaggctggactgtacactaaacacctctgagtctacagcaggctggactgtacactaaacaccaccacagagtatacagcggtgactatagactcaccacagactatcttatgtgaaacatttccaatattctaaaagaaagtcatttttataaatgtgttggctgcatatttttgacttgtccttatctaaatcacatcactaagtctgcaaaacttctaaataataccaatactctttgtgggaaaagggttttttgcgtcttttattatttttacattgtacctctaaatatttatgttttcttgttcttcaggttcttttatttaactaaaagatgtttgttcggatttttactctcagatggaaattggaagcataattgtgcttaaaaggcagcactaaagatcattccatttactattcagatagcccagtacaggctcccccttggattggcactgctattctgtaggactgctttggtttgggttgggttggtttggtttggtttggtttggtttggtttggtttggtttggtttggtttggtttggtttggtttaagatctaggaactgggcactgcagcccatgcctgttatcctataatgagggagagtgggaaagaaggacggttttacattcaaggctaacttgggctacaaggccagagcctattctaaacaaaatgttctggttatctcaaatcaccttatatgtgttgtaaaggttggtgacagtccctcctcagacttctatgttaacctggcacctgttcaatgttgctgttgtatttacatgccttgtgatttgtgggggagtttgaaatacaagcagataaatacactgttacaagtagaggctgtagttctcattccaacaagttccctcataaggatggttggttgtagcatgtccctaaggttcccagccagtttgaaggtactcctcttattcaagtagggtacaaaatagtccaagacacaaagcagttactaattatctctgctgataattgtaactatctgatcatctagttcatgaaagagtaaagaggttttgttcgatgtgaaaatgcttgaaccttggctttctatgttcaaaaatattcgcattagcctcggaatcttagggttcttccctgactctgatgcccttcaagaggcagaaggactagggtgtgaagtcagtgtttccttcccctcacttgcctgctcctgcacagatgacctactgccccttcatccatttgccgttgacctcgtccccatcatgagtgtctacacagctgtcacctctgtgccatatctacagcatgtccagcttctcttcagtaccgctcaccagcctaggtgggaccactgactgtgagtctgcagtggccaccgcccagtctctgtgtctcaagctccaagagacggtcacacactaacctgcaagccaaggctggtgactttgaccatccctaacgcatgagttttccatggaaacctggtcggtgaacctgacacgaaattcccaattcccctttactctgtactgtgtggctggtgctcttgttttcgttctctctctctctctctctctctctctctctctctctctctctctctctctctctcaagttgattcctccatgttgctttacagagacctgccaactacccaggaatgtaaaagcattcatagtatttgtctagtagagatgctgtatgaaaaatgccaaaaccaaaaagagaaagaaggaaagagagatagatagatgacatagatgacggatggatgggtgggtgggtggatggatggatggatggatggatggatggatggatgggtgcctagagagttgagtctggaactccaatcattctatgtatttttagtacattttttaaagtatcaaatacacaattgactctgaaggaagacaaaaatagcaaaatttgaactaagtgttgtgagtagctcctgcctgtccccacttcccacctgcccgtaaggtcatgtttctcaaccttcccaatgctgtgacccccccccccaaacaccaccatgttttattgccatttcataactgtaactttgctactgttatgaatcataatgtaaatgtctggtctgcaggatagagaacccaaaaggggtcttcacccacaggttgagtgccagtcttaacatgtaaacagtaaatgtaaaggattcacccacaggttgagtgctagtcttaacatgtaaacaataaatgtaaaggaagactatgaactcaaaggttaaactttttatttagatattttctttgtaactcaagagtaagccaagtttgaggaaaatttagtgaggtcattaaagttgtaaatctgtaagccagaagaagtagccctcccagtatattttttctaaagactttaaactgttttctctaggaagatcaactcctggaataaaagaacaaagctcccatagcctttccagcagagcatatatctgtctgccactacccaggtgtctgttcttgtcatagtgtttcaataatttatactggggggagggggaagtgcattttaaattttcttggaaaagtgaattaatgtgttaaattgtccagttttgtctaaagagaacgattcgttttggagacaagagcacagggctgtggtccctgtcccaccatcaagtttactgtgtgacctcaagcaaatgattgaacttctctgtgcctcagtttctccatattacaagatggggataatgattaccaaccattgcctacctcatagggatattttgggaacaagtcagataatgtaagacaaaggttttgatctccttaaaaggtgctgtataaactgcggttgcattgctaatgatccagcattgtgtttaggattagatgatagcaatactttttgtcacgttttagtcgaggcattatttctactcttctgtggccagatcacaaattttcattcaataatggtacttaaggaactgacacgggtgtttgttttctgtctctaatgctaatatgtcaattctgaacagtcataaaagggtggagttgaacttgtgatggcttctagttcacatggaacaaatcttattcaagctgtatattaaaagtataattacttgtaaatagcaggtacattgtaattaaagacacttattaacttgtctttgttctttttaaattgtaataaaggccagttttatataaaaacttgttaaaatttgtttgatatttggaaaggccagaaatggttcattctatgcttccacatagaaggatgctcagatcaactgccaacaatgagggttatggttagagccagatttctgacggaaaagcatcagtgcctgaatctgctccaggtgacctgtctgtgatgttggagattgcagtaccacctactgagaagtttgtcttaaaatgaagggttgggcatcacacctgtgctttgcagttgctaatagacttcacaggagcctgagcaactcagactagctttacccacctttccaggcaagcctagaaatgtctgctcagggccaagaggaaaggccacctctctgaggtgggaggctgagaggcaagggcttcactcagtgtgtagccttgagtgcttcactatccttccctaagactggccctagaaccaaaaggtgaaccggtgagggtttctttagccaaggaagtccagggtcattctacctgtgtaaaagctcagagctagggaacacttgtttgaattcttaaatcccaaaacacacctagaccacccagggaactggagtgtgtcacagctcagcaatttggtctgtgtcctgtctcctagggtacagagcagcctgtaggtctactagaagtctcctgccaatccccacacagagcagacattcatcaaaggaaaagagaaatctggcacctaattaaagtcaatggaaaacattccactcatactgtcatatatagatacgtgtgtgtgtgtgtgtgtgtgtgtgtatttcactgatataagtaatatctgcacacgtgaccagctctgattctgtgtgtttatgcagacctcagtgtgcatgaggactataaatcagaatcatgaggctggacttcagattgtgtggcaccaactgtggacttgtcatcacatctgtccctaagacacctccatctgttatgtcccaatgtcatctcagaatttcattcaggagcagaattctctctcccagctgtcccatttgccctttagaaacattttgggttgaaatagaactcctataacatagactaattcaaatgctgctaaatagatgtttaatctggctcccatgctcccacgttcccgtccccagctcactgagcctggcttggactatggagcctcaggattttgtccttgggatgttcctctctctaaagctgcttgctgaccatcagtctctgaggaaatggcaggggaccacaacagaaatatcctccaagtcacaccagccctaaaagtgccagcgaagtagggatggcagagcacctgccatggaaacagacagtctagccacctgacagcacagtcaacagaggtgtggcccaaacagaaagcttttctatgctcagacgaaaagggaaaaaagaaataatccttgtaatatcaaagtgagggaggcaacagaaaccacaggaaagacacggaactctatgtctatgctacaggagccaactgaaggctagtgagtcaatggctagtctcacagcctttgaacctacttttaaatatttggcatgcacagtgtctcatccccatggtagataacagtctcagaagatctctgcgagtaggttagagctcgtgtgagagcacacagggaatccagcaaaagagcaagccaggtgtgaagcagtgtcaatgccagggctccacactaggccatctgtgactccaacagcagtcagtggcctccttgccaggtcccctgatgtctccctctctagtccagccccatcctattcagacagccttccacagtgtcaccagaattatcttccaagaagcaatcctgctgatgtcaggagaaagaggacagatttactcaataaggccaatgtgaaggccctactgttttccagatgtggttccagacaccaaggtcacagttccaccagaggtggcctctgtatgttgatacagtacatgttaagcaaagggaagtggactctgatactaagtaagagtggcagacacagtctacccatagtcagtttttaaggaaagatatccaaaatgtacctttctgcatcggcaaataaaatctgtatgcagacagacgacagttctgttcgacgctgctcatgtcctaagcatcattgaatgatgctgagtaaataaagaatgatttgtctagatcctaagtgagatacacaactcaggagaatgagggggaacgggaagaagaaatggggcttttcccgttgggtgggggggaggggctcatgagtcagtggaactcatattacaggcctcaaattacatgacacagttctgtgaacagaagaaaaagtctgaaagaaaataagatagaaatacaaaggagcctagaagaaagagactggtgtgcatgggctctcaaaggaactagatgatagagtttaaaaagaaaaatctagaaggaagcagagagcagagccatgatgaggagaaatgaaacagatgctgtgggaacatttacatcaggtctgcaacaactgtctttcaaaaaatgacatagactggatctgcagctaaatggaaacatttcagcgatgatcgcagcaactggggagatatagctcagtccgcaaagtgcttgcccaatcccaagatctagggtctcagtcagattgctgaacacagaatttttgaaggaggaagaaagctagttagggtagcacacactcgtcatttcagcaccgacggagaggagacagctctcagggtgccgtgcaccttactggaggcttccaggggagcgagaaatcttatctcaaaaaagggggtgaccctgcataaggaataacaccggagattaacatgtctcactactgcagtggtttaacaagaatggccactgtaggctcttgtgtttgaatgcttgctcatcagcggcactgcttaagaaggaatagggggtgtggcctgttggaggatgtatgtcaccacgggtgggctttgaggtttcaaaagcccaagccaagcccagtgtctcttacttttcctgctgcctgtggatcctgctgaatttacaggtatgagccaccatgcctggcttgtttgaactttggaactaactaactctctctctctctctctctctctctctctctcctgtgtgtgtgtgtgtgtgtgtgtgtgtgtgtgtgtgtgtgtgtgtgtgtatgtgtatataccaataccaaagcaactcttataaaggaagccatttcactgtggctggcttatagttcagagacttagtccattcttaggagggcagggagcatggcaacatgcaagcagatatggtgctggcaaaggatctgagagttctacatcttgatccacaggcagcagaagtgaattgacttgagcttctgagacctcaaaccccttaggcatgaacttcctcaatcaaagccacaccactccgagtgattggctcaatactgactgacaaatagctgaggaaggaaaatgaaggtaagacttccaggcagacatggggactgtggagagcagaatccgggcgggatgattcaccagcgagacagggaggatcagacattgacagcaagagagaggtaatgaggaacagatgtggactagaatacacgggtaagttagatgagctagctgggaggtagcttaagctaagacctgagttgtaataataataagttattgtgtctttatttggtggctgatgggtccaagaaggtcctgcaatagtgcctgttgtgactggtacctgtaatccccacatctaaggggctgatgttggaggatttcaagaccactgtgctacctggcaagtcaaataagcatgtacatgtgcaaaagtagccacatttctgaggacagtgagatgtgttctgttctctgtcgtgcatgcagcgggagctgggtatatggttgcagcaaatgatgtgtgaacaggacagcagtggacgtgtgtgctaacagtgcccccaggctgatggaatgtgcagacactagggcagatcccgggctgatggaatgtgctgtggacgtgtgtgctaacagccccctgggctgatgggatgtgcggacactagggcagatcccaggctgaggggatgtgcggacactagggcagatcccagactgatgggatgttcgggcactagggcagatcccgggctgatgggatgtgcggacactagggcagatcccgggctgatgggatgtgcggacactagggcagatcgtctggcaggtgcttcctgagctccagtggacaacatgggcgtttgcaaggaggtgaggggaccagagacaggggaaatacttaagatgatgaactaggcttgatctggtggtaggaataagaaagaaaaaagatgcaaaaattggtcttagaatagaagggatcctatacctgacacaatgccgatgatttgttttggttttgtttggggattgtttgtttgttggttcagacatgtgtgggctccttggtggtgttgcggtccaggaactcctcacaaatcacaggaacaccgatctcagtcggacaggagtagttcattgaggatgccccaggactgcagtgaagactcggggctgaacttccatcctctgtcaagatcctgtgcagctttttaaccctgaaatctacaaacacctggctcaagttattccacccgtcaggaattagggataggggatgtcttaggagcatgtcttttt

SEQ ID NO: 897 - DNA, 2771 bp, Mus musculus
agagggagacacgcacccggagctccgagcacagctctcaagggctggcggccacgacggcgtttgctcgggttcccggtgcagtccgagtctctgcggccgcccggtgcgcccgggagagcgcacctcccccggcacggcagaaccgaggcgacgaggatcaggagggtcctgcgcccgctaccactgcccaccgcgggccagcccggctgcgagcagcggagttgcagcgctttttagcgctctggagccccagaagacctctgcgaaccaaacacactgggttcttctctgatttccacagtggagcacaacttcaaagctgggagttggccaagaaggaagagagaaccccagcatactgacacgtgaacgaaaccctcttctggacaaccgtttctccaaggaggatgaagccttctagacccatgtgatctcctatgaagaactgaccccacctgctggtcaccccagctcccaccatgggccctgcaggaagcgtactgagcagtgggcagatgcagatgcagatggtcctgtggggaagtctggctgccgtggccatgttcttcctcatcaccttcctcgtcctcctgtgttccacttgcgacagagagaagaagccacggcagcatagcggggaccatgagaacctgatgaatgtgccttccgacaaggacatgttcagccattcggcaaccagcctgacaacagatgcactggctagcagcgaacagaacggggtgctcaccaatggcgacattctttcagaagacagcacgctgacctgcatgcagcactatgaggaagtccagacctcggcttccgatctcctggactcccaggacagcacaggaaaggccaagtgccaccagagccgggagctgcccaggatcccgcctgagaacgccgtggacgagattctcacagccagggctgcagacacggaactggggcccggagtggaggggccctacgaggtgctcaaggacagctcctcccaggagaacatggtggaggactgtctgtatgaaacagtgaaggagatcaaggaagtggcagacaaaggccagggtggcaagtccaagtccacttctgccttgaaggagcttcagggggctcccatggagggcaaggccgactttgctgaatatgcctctgtggacagaaacaaaaagtgccgccacagcgcgaacgcagagagcattctgggaacttgcagtgacctggacgaggaaagcccacctcctgtcccggttaagcttctggatgagaatgccaaccttccccaggagggaggaggacaggcagaggagcaagctgcagaagggaccggtggacacagcaagagatttagttccttgtcatacaagtctcgggaagaagacccgactcttacagaagaggagatctcagcaatgtattcctcagtgaataagcctggccagtcggcacacaaacctggaccatgtatgaaagggccagaatctgcctgccactccatgaagggcctccctcagaggtcgtcatcttcctgcaatgacctctatgccactgtgaaagactttgagaaaactcccaacagcatcagcacactgcccccggcaaggagacccagtgaggagccagagcctgactatgaagccatacagactctaaacagagaggatgagaaggtccctctggagaccaatggccaccatgtccccaaggagagtgactacgagagcattggggacttgcagcaatgcagagatgtcaccaggctctagcaactaaaagaggctgtgatcagcagctctgctgtggaaaggaggtggctgcagtttctcgctgctttggttgactgaaatcttcaagtgcagtctcccagttgtctcccagtttccaaaacagtaaggtacggacctgcctgccagggcagccaccctccagtgctcccaagaaacccctgggacccctcacctccacattccacagaggaaggccagctgtgggtgctggcggggaagccccacccaccaatgccaaaatcccactgcctgctgaagaagagccaggtttccatccttgctctctttccctctgctcctcatgctaaaacactggcacttcacccctggagacctcccatgtgtgcttcatcccaaggatggtctcccactggcctgcactggccttcagtaaatgttagcatggagagaaactggttgccgttaacccaccctcttcccagacctgcctcttagtccctgggaaggaacctggatgtgcaggctgtgaggtatggggtgggccgtccctggagtctctggggttcttgctcctcgttggacactgcatctgcagtcttcagaggttcatgaggtcagttgagatgttttttaatgttctatgttgaaaaccttcccaacagtgtttggattttcataactactgtggtacttctgtagctgttcacacccagtgctcttccttccaaacagagccttaatgtttctgtgaggatggcagccatggtgtctatccccaaagggctgcggacataaatgtgttcccggtggtctttgctgcccacatgtgactttcctataatctgatggtaatctgagtaaaatgtaaacatttattttattatataaatttataagatgttttatgtttaatgcctaatttctagaaagtgccagaaaatatatattaactatttggattttatgtacaacgatttatactctcattttacaaacgataccataaagcacataagc

SEQ ID NO: 898 - protein, 427 aa, Mus musculus
MGPAGSVLSSGQMQMQMVLWGSLAAVAMFFLITFLVLLCSTCDREKKPRQHSGDHENLMNVPSDKDMFSHSATSLTTDASSEQNGVLTNGDILSEDSTLTCMQHYEEVQTSASDLLDSQDSTGKAKCHQSRELPRIPPENAVDEILTARAADTELGPGVEGPYEVLKDSSSQENMVEDCLYETVKEIKEVADKGQGGKSKSTSALKELQGAPMEGKADFAEYASVDRNKKCRHSANAESILGTCSDLDEESPPPVPVKLLDENANLPQEGGGQAEEQAAEGTGGHSKRFSSLSYKSREEDPTLTEEEISAMYSSVNKPGQSAHKPGPCMKGPESACHSMKGLPQRSSSSCNDLYATVKDFEKTPNSISTLPPARRPSEEPEPDYEAIQTLNREDEKVPLETNGHHVPKESDYESIGDLQQCRDVTRL

SEQ ID NO: 899 - DNA, 42018 bp, Homo sapiens
gccagttagaaatgcagactcttgagccccgctccagacttgccaaatcagaatctgtaacaagatcccagatcaccatatatacatctagcagctcttctagaacagtgcttctcaaacttcagagtgcgtcacgatcacctgcagggcttgttaatacagaggttgccgggccccgccacccccgagtgtctgagtcataagtctgggggaaggttcagaattctgcatttcaacaagttcccaggtgctgctaactgggaccacccttggggaagttccattctacaagaaccatgaccctgtcccttcctctacaaggggcctaggagtcacaccccttgagtcatctgccttccctgccctctccaggcagaaagctgtgaggataagctctggacatatatttttaaatacaagttctgactttctctaatcaagctagtctctcttgaaacatttccccagccctaagtaattcacaataacaccagtaaataacttggagggatgtgtgttttgaggattttggttctatttttatgaatcaagaaatattttgcctggctattaatatttttaaaacttcataaagatagccattatttaagtactgcgtaatgatttcagccacatttttgccattgctgggtacaatattagcactgttaagccagcagtccttacgatggcagtacatctaatggtgtgggagagaccacaggacgcgttctctaatttggcactagctcacagtgaactggtgttacaaactcctctgttgacattcctttgacatatgaaatgaccatctgctcttaaattctacttctccagtcttgagggtttacttttcccagatcaagcatcttttactgtgcagtcccagtgaggtagtagctgtctgccgaaagggggcatttgtagttagcccaggctaaacaagtgctaaaaggaagtggatcttttcaatatcatgagccacgagtaggaaatttgattgagaggcatttgtgtcaagtggtacatttttgaacctcttggcaaagaaactgaagtttatttttttttaagtcttttattatgaaaaaaaaaaaggtggctgaattactgccctcagaagccaaataaaaacagtgcaaagcaatgcttaacagagcgtgactgcaaatagtgctggtctcagtaaactggcctgcctgtagacaccacatccatcacagcaaagctggtgggatgtttgtaaagccctccagataccttggaaggaggtttatgattaatgcatggctgggagtaagcagtgggtgtaccagatgggagtgaacattcttctctctggccctaaaacaagtcctgatagagtgaagttaagattgccagggagatgggtgtggctctcacatcctcacctgtctgctgctgtcccagacaggccagacgcctggaggttgtgaatacctggggctgagagcatgctgggcagtgtgttagaagaggaagtgctggggacagagcctgtagctgcatgaccctaaataaggcactgaactttgagcctcagtttcctcatccatagaatcgattcaataacatctaccgcaaagggtcatgaggacgaaataaaataacccacagtaaagtagctggcagacacacagtctgtgctcacttccatttttcggtgctttttatgtcaagcctatgagtcaaaactggtatgtagcgagcctcttgggggccctggagggaacttgggtaaagccacagtaatggattatatgcaagcaggagcaccatggagaccaacctaccctggccaggtggtcgggcaagcaggcttttgtaggttccttgtgcccccatcaagtttcagcatcacttgagaggacagagcaaaagggtttcttccaactcttaccacctttgaagatctgaccaatatgcacttcctcttgcctccttttcttcctcttaactattaattcatccaataaatattaagtgcctactgtgtgccacacactacggctacagttatgaaccagataggtcagtttgaagttcctccctcctggggcttagcccagcagaggagacacttgaattgcttcataatttcaattttgagtaaggaaggaaaaaacttgtaaaagatgggcctcagccacacctgagaggtgggagggttttggcatcaggaaagctgccccaaggaagtgagactcataggatgcttagatttgtcagatgaaaaatgttggaaagagagccaacaatgtttaaggctcctttttcctttagaaatggaaggtccagcccccttgaggcttgtgtgaggaacctaggagctggagaaggtgtgaaattgtcattgcagagaggggtcagaagaacactaagcttggggacatggtgagattactggagttgacaggcctgctgcgggggatgaagacactgatattacggtgctgtgacttttctcaggagatgttcagctgcttcagtgacaatacagagaagccagatggctgtgttcattccagagtgaaggatttgccttaaggccaggtgcggtggctcatgcctataatcccagcattttgggaggcctaggctggcagatcacttgagatcaggagttcaagaccagcctggccaacgtggtgaaaccccatctctactaaaattacaaaaaaattaccaggcgtggtggcacatacctgtagtcccagctactcaggaggctgaggcagggaatcacttaaacccaggagtccttacaatcgattcagtaacatctaccttaaagggtcatgagccgagatcacgccactgcactccagcctgggcgacagaggaagatgctgtctcaaaaaaaaaggatttgccttaagacactcttagcttattttttaattgtttgcttagtgcgctcatccctattactctccttcccttccttgtggtataaattatgaattaaacttgcattttgagaatctgcttgagaatctactcaccattcttcctacagaaacatgtattcaataaaaattcctgactggctcctatttcccaggtcatagaggtgctaggaatatggtgggaagtgaggtggagacatccctgccctcaaggaaattagattggatgagccaacatgcaaggcaggaagaaatagaacctaaagcccaaaatacacactgtctgaaacattccatgaagccttcttgtgcaaagtgaatccccattacccgtgctccttatgcagtcagtgtagaacgtaccgcattagcccaaatagaagcgcatctcagggttctgtcagagtgcatgtgatacgtacttctagaaagaccatgcccttgcactctgcctccctccctctctcgtgtctctctctgtctctctctcttcaccattaaaaatgaaccttgagaattggcttccaagtcagaatttgggggaaaccaaccttagaagtgattccttacccatcaaattcacttgccttttggcttgtctggggcaaaagtgtttataaacaataaactatattatttctgtgatgtaagtttaatgtattattgaagacaagtgacagccccacatacccctccaccaaaagggtcagctttcctgttttctgtgcagatcgataggtttggtgtgtacaaaaagtgaccaggttatgctgacagacagccatgaggatttataacttgcttttaggatgagtgccggtctctctcccatgagcagtgagtcctgatagcagggtcactgtggtctggtgatgttaaggcattccaggtttctttcatctacactcattcttaaactgctgcagaaagagatgtcaagatatcactgggtggggacattagaaaaggattcaggaatctataaacaagaaaagcttaccttccaccaccctctgtgctttgggtgtgttctgcccctgactcagtgcaggatcagaatagggcgatcttgataacaatcatgtgtaggcaaaagcctttgtaccttagcaggatggaatagtaaatatctgggtaggtgattccccatgtgtttccaacagacactcatccgtgcagagttcagtgtggcaggcttttctgtagcacagtccctgtaacctgaacggaagactacctgaatttgcacactttagcttaaaactctttctggggcttgaggattctgttcagagtttatttcatcttagcctgtgcagctgtcagtgtgctcacaggaccagggaacccaccaaagaatctgcttcctccgccatcattaaatctggttaatttagagcccataaagtgtcattttaccacatggttcccacgcctggtaatgaccaggaaggaagaattcccactgggattgggcccttgaccatatttcatccaacagtgaggggtcatgagtggaggtggtttctatcatgtttaattatgtgtcaactgcaacagctgtaaaaaggtaatgactatcattactgacctagacctgcttcaaaagaactctaaagtgtctgtttccatatctaatctcactggccatcccatctctaccaaattattatttatagaatttgctatgatcagagaacctacctgttaaggatgtttggccaaagaaataaatagctgccatttggtctgcacctttcattaatttgtgtggttttttttttctcctgttggaattgattttggtggctgatagtgcaggctaatgaagacaattcaaatgccaagcataaggcaccaacaataattgagcagctttccttaaagaaagtgctgcatagggctgagaacagaattatgctgccaccttgtggttaaaagtgacacctgctggccggtcatggtggttcacgcctgtaatcccagcactttgggaggccgaggcaggtggatcaccaagtcaagaggtggagaccatcctggccaacatggtgaaaccccgtctctactaaaaatacaaaaattagctgggcatggtggcgcgcgcctgaagtcccagctactcaggaggccgaggcaggagaattgcttgaacccaggaagcgaaggttgcagtgagctgagatagcaccactgcactccagcctagcgacagagcgagactttgtctcaaaaaaaaaaaaaaaaaaggacacctgctgttaaatttaaaggccagtggtttttctagtgattaaatcacttatgcattaaaacaaattagtggatataaaagggtaagagagtatggaccttttagtccaaaataattaatgagataaatctttgaaagaatccccaatgaaagtcctttaaccataagcactgacctttctcaaggctaaacaacaagttctcacagtagttcgaaattatacaaaattggggtggagattgaggtagtaccactgagtcttttacagcaatactatatgcttgtattatattacagtctccagccatgactttacatcaatgcagccaataatgaagcctattttatagcaaacagaattaatgtacaactattaatctaaatctgtgatcacattaatattaccatcttctgtggctcatcttagtacagcattcaggtgccaaaattaagtgttagtagagttaacaattaaaataaatggtccttctttgccctgtgttgaataactcaaagaatatttacacatgtggtctgataagagaaattttttaaactttgaagaaataggctgggtgtggtggctcatgcctgtaactccagcactttgggaggccgaggtgggaggagttcaataccggcctggcaacatagcaagacctcatctctactgaaaatcaaaaaagttatcctggtatggtggcgcatgcctgtgttcccagctactcaagaggcagcggtgggagcattgcttgattccaggaggtcgaggctgcagtaatcacagcactgcactccagcctaggtgacagagcaagaccctgtctcaaaaaaaagaagaaataatattctatgtaatattatatagttgaatgcaagtttattgagtcaagtaagaacaggattcggagaaatagacttaaatgtcttcatgaaaaaaacataggggatgctcctccaaatggctcagatatttctgctggaagagatcatccctgatagtcaagacataacttacttgatattgaatcagcctaaaataagatggtccttgtggaccataaccatgtcacaggacagcactgccttgggtggcacagtgtagagtctggaaatgccatgattgtcacaggacagcactgccttgggtggcacagtgtagagtctggaaatgccatgattgccacagggaccttcctgttcagggtagcttttactatccatacactatgcctcctatccgcttactgtctcccccatcactcatcctaagaaaagcctcgctggccatctgaaagggtactgatttccctccaccttcccctcactcaaaagaacagaacgaggacccccaagcactgcatttaagggcagttaaaccgacacatgagggtccagcctaggggcagagcactgggccctctgcatgaggcctctaccctcagctgctccaagaaggtgaaacacaaagtgatccatgtacatctgcacacatggggaggggccatccccatgcacaggggaggagccggtccaccgacacacatttaccaggaagtccatctagacctgtgagcaggagggtgagcgggaggcagtcttggctcagttgtagatgagctgccaaaatttaaggagatagccagagaaggcatgggcagcagaattttggaaacaaacatccagaaaaaagagagagagaccaggagagaagggtagcagtgcacagatcttctccaaaatgggaaccgtccaccaaggacgtctgctgtaaggatcaaagattatgttagtctagatcccctcagccaccactcctcccacctccccaccaccaacactcacacactctgccaggcccctaaagaagagtaggtggcagttgctggtgcagccactcaacccgccagcactgcccacgaccacggggactggtgtcccacagtcctcctgcagagcagcacttagagggtccaagaggagaaagctgcccccgcaactggggcctttgtccctgaggactgcagtgcatctgactcagaaacgtgcacctgatgatgatcattctgttcgctgtgagaattttgtccacagtaagaacttgggaaaaagtctttcagtggctttatagacaattctaattgaaggggagtgagccaggagtttcaacacattttctcttggttccatcctttattccacagcttgtaataatcccctttcatcctctttctccctgcactgtactaataggctgggcatcccacatctctcatcatattctactgacctccttctattaggagagaggagagagagaagagaaacatgtacagaaaggagagagttgttggcgattccacactaggtttcatgaatggatatctggcttttgaataactcacacagcaaactctttttaagaacatggcattttataaatgggcatcaattaatctgttgtatgaatgaatgaagaacaaacagatgcctgcacaggagatagataccttttgtctgtgattcctaaaatgttgtatgctttggacctgtgtataaaaatgtattttatatattttcattggtcatcatgatttagctgcttgcttgaatgtattttaaaacctattgtggtgccaatttgtagtctcagtttaaagtgaattattctttgcatcaacaaatcacagaagtggtggttattttcatttgtttatagctgtctgggggcaaacatgcaaagtaatttgacttgttattactgtacgcctgtcgtgtttacaggcacaatatacatacaatcaaacataggaagaaagaagttctgtattacgcagggagtcctgcatttatataattatagagccttagaagacgttcatgttgattcaaagattgaggaaaacaacttcatctctcagaactctctctgcatacattgtaggtaaaagtctctttttcttcagctttttaatattctttaactttgaatattcaaataaatgtgacagtgtttcacctggagatgatttggtccaattgaaccacatttgccaaaatggcttttattctccccgttttaggaggcaccctggtttgctgcgaagccacccctgccgtcttgatgtctgtgctcagggatggctgaaaacagtcacagctttatcactgaagcaaacgaaaatgtaaatactttttcaaagaagatattgcactattatcaaaaaaccaaagtatttgcttattcatgacacttgagaccaacttaaaggctatttcttttcatttagaatgttctagaattgagcaaagcaaatattctttaaacaaggcctctgtgatgacagatcatttgatatacgactccatttttaaaatatctgtagctcttaaaatatttcacacaaggaatctgaccatttctgtttcgaagtattgggacagggtgcagtgaccctgtgagtcccagcatccccacagtgacaacgagctttccttgatggacacagagcacaggctttggagtctgagacagctggactcatccctccctgccacttagctcctgtgacactcaggggaagtcaccgctctgctgggatttagcttccatctctgtaaaagggggattaacagtgcctcctacacagggtggtgacagcaattaaatgaggaaagcatttagcagaatccctggtacataccaggtacggaaatgtactaggtagagctcttatgcttctcttgcaattgtttataaataggtcttatttattcccagggatgtattcttagcacatacttcattcattcatttgaaaatgcatttattgggtactcacagcagggtagtgtaaacatactcagaatacataacatactcagaataaataaatgcaggtgaatataaagacattctatttcattagttacattgaccttaaaccttctcagacaacagtgggtgagggagatgagagatggcagtgggtagggagatgagagatggcagtggattagggagattagagatggcagtgggttagggagatgagagatggcagtggggggcaggggcaggtgatgagttgcatttttgcaaaagctatataagaattgttatatactgttctgattttttttaatgaacctaaatgagcatggatttatttgctatggagtacttgaaatctttatttgaagacattaagaatccatccaggccaggtgcagtggcacactgtaatcccagcactttgggaggctgaggcaggaggattacttgagcccaggagtccaagaccagtgtaggcaatatggtgagacttcgtctctacaaaaaataaaaatattagccaggaatggtggcgcatgcctgtagtcccagcagtggggggcaggggggtggttcaggagaggattgcttgagcccagggaggtcaaggctgcagtgatccatgattgcgcccctgtactctgggcaacagagcaagaccctggttgaagaaaaaaaaaaaaaaaaaagaacaagaagaatccacccccaaacatatcaagataagacatccattgcttcaaacactgggccaggcagctgtatgttcccgctttcgttttcaggtaagaaaaatgaagacctagaccatggaggggacttgcccagagtccaatttcaagtccagtccggggctctcctcagcatccagcacacgcttccctgactttgcgcaaaggtcttgctcctgacagggaccgaattacagattctgccactttacccgagaattactctccaaacgcactggtctctttgcaggacacagctctctgcctccatgtcaccacctttgaaggactgactgattccctcggctggtgccagtgcctgctcctgccatggggcccgcggggagcctgctgggcagcggacagatgcagatcaccctgtggggaagtctggctgctgtcgccattttcttcgtcatcaccttcctcatcttcctgtgctctagttgtgacaggtgagaaccagagtgtatatacctgtgccttaaactaatacatcccctgtacccagaagagtttctgtggaaagcctgttaggaatggaatcccgccacagagccgtcccagaaacttgtgcattagctttaactctcttctctctgctgcagagcgtctcgggacattctttattcactgaaggaaaacccatatttggttttgctagggagcaactagaagagcccttatattttaaacttcccagaatgaaagtcttgctgttctttcgatcacacccttgtcaaaatggattttgtcttttttcatgtgcgggcattttgaaatcttgtgtgatgcgcatctttttgccaccaccctgcggaagtcacagaatgtttgctgctacgtgatttcggagggattgtttatgattaaaaatgtgtagtgtagaccttcagtttctcaagaaacagattattttccaaggagaggaacatgctgtatatgaaataatcatcagtgtcctttttttagagttatacttctctctctcctctgtctcatataaaatgtcagtacccccaacaagagaaatctttgctcagagagaagttctttctaaccagaagtgatgtttcaggacattctggaactgttacaaagcacataaccttctgataggctagatgccaccagaggcccatgcagaccagctgaccgtcagccagccctgtccaaactctccctccaccatggaagcaactccaggagcgtcacttaaaattctgaaatagcttcctaccctaaaatctgtcaggaggagaaaagccaagaccctctgaacccagctagcctcctaatccctgcccagcctggacccagacctctgtggctgggacagagtctgaatgattgggaagatgaacaaagaggccgcagggccggggcttcccggggcctggacggcctgcttctgtagttactcatgttcccactaggtgtcacccttgttttatagagaacgtggatgggcggcgtattctctacaactgatggctttctttagactgtcccgagtaaaaacaaattctatttttacttgacagactttcccatagactggaagtacatatgactcaccctgagagcatgtacccttcctggcgtgccaaaaatctgtattttctccatcccactgcagtgtgtgactttgcagagactcagataattgtcttcattttctcaaaaaaaaaaaaaaaaaggtataacttactctgctagtttaggtataaacaatttctacgcaggcccaggcctcggtcctctccttgtgaacttgtatgttttttcccggaagaaggggtgccaggggaggtggacagtccctagttgaggcttgaactcctcttccccagcacctgcaaacgggccatcaaatcactgtctgattttgtctttgttgacaaaataaacatggttcttaaaacgagagatttaaaagctgataagaattgggataggaaagggtagtgtgcgcttgattttaagggggcacatttgacattacaacatttcacttttcatttcagggaaaagaagccgcgacagcatagtggggaccatgagaacctgatgaacgtggtgagcctgcgcgtgtcgtctgcctgtctgtccgtgcgtgctccagaacatcagctacttatctaagtgtgctcccatgtgctcacagcctgagtagaacccacggggagagctaagcctaagttaaacggtggcttctgaaatggatgcagtagtgctgctgccggaatgatccttaaatggctccaacctactgcagggatgggacttttttgcctctattaatttgctagtgctgtcataacaaaggaccgcaaacagggtggcttaaataacaagtttgtttctcagttctagaggccagaaatccaaaaatcaaggtgttggcaggattggttgcttctgagggaaagtctgttctaggcctctcctggggcttctggtggtttgcagccaaactttgggtgtgacttggtttgtacaggcatcaccccaaattctgccttcatcttcctatggtgacctctgtgtttcacatcacctcccatctatgtatggctggctgtgtccaagtttccccattttataaagacaccagacatattggactagtgcccaccctactgtagcacgacctcatattaactagcttcgtctgcaatgaccctatttccaaatgagaccatattctcaggtgctgggggttaggacttggacatgaattttggagagacacagttcaacccataacaacaggtcattaagctggagggagcttgggacccacaacaccctaggtatataacctagccttgctggcgttttcccagccctcagtatcttacagggtcctgatgatcctgaggccctcagggatccaccctggcgaggaacagcctgagagtgtccaggtccttccttgtcctctctgacccaggcccgtgcttttgaatggctgagcagtcccagccgctggggagggggcccatcgtcacattagcaaggcagagttcagaatctgccctgagtcctgtggcagtgctaagacagaagatgcttcttgttcaggacatcatttctcaaggtcaagcaaaaactggttgggaggagagggtgcaaacaaggaagcatggatgagccaaggtctggcgtaaaacccgcagccagcagacgtttgcagagatgaccaggggcatctccagtctaggcttcctgacctgccaattctcaggactcctctggcccaagcaggcaggaagttgtcaggactccccgttcctcctgggacccccaggattttccttccctcccctctgcatccacatgcccacctcacccttcgcagctttcctgggccctcatcaccactcctccctttactctgtttctcgccctgttcccatccctggttgtccacattgtcgccacttctcatctgttcccagcgcccctgctctgcctggtgattgctgctgtggtggcctcagcagggagggtgggagggatggagggaacgccccactgtcgcttctccccatgcagactccaggcccctgcctttcgtcactccaccattctcctggtgccagttgggtggtgaggtggggctggggaagggctcccaccgccattcctcacttccttctagagcaggggttcttctgcagtgtggcctggacctccacccacagcagcagcagcacctgggagctccttagaaatgcgaattttcctgggggtgaggcccagtaaaaggctcgcaagcaccccaggtgatccagttgtatgctcgagtgtgagagccactggcctagagcttgggttcccgctgttctactcaaggtcagcagcagccctgggcgagataggaagagagtggcaggtggataaaaggaaaaagctggcttccatcccctgccttcttcctcatccaccatataattcattattgccccaacccatagcctcatttatatggatgtgaatgtctgtgagagagcgcgagcacacacaggaacgcatgcttacccggacactggcacccatgtacacacgctcgcccacccagctctccttaagagcttttcagctcctagatcttatacaacttgcggattcttcatctcatagaagcaaagattaggaatagtagttagagtctagattatggtaacttcagctgtgatcgattatgctgttatgggcccacctgggagtcttccttccccacacccatgcctgcccatttataacatcatttctgggatattagcacctgcattgcaagttcctggcaacctaacacagtgacccatctcactgggggctcatcagacgtgaatgagctgcattggatggaaacagctgacttccaatacacttttggatcattgcacagcatgaactatctgctgtgtattactggcttccaatcaagagtcagagaatttgtgaggccaactagcaaaggtttgtgtgctgtttacatcacaactttccttgtagaatcctggagcatgagatagcctcttggaacgtgcaggctgtgagaagaacagggagcaaatcacatttgcagtgatttgggctgcaacctgagacaagttgggtatttaaagaaatacatgaacaccaacttgctttctgactactcttagctatagctgagccaggcatattgttctaggtagcatctacacattctatccctgcagaaaaccaactattgatgccattcttccctccaaatgtcctaagtttatttgtaagaataagaaagatttgcagagctgggcacagtggctcacgcctgtaatcccagcactttgggaggctggggtgggcatatcgcttgaggccaggagttcgagaccagcctgagcaacatagcaagatcccatctcttatgggagcagccagacatagtggtgcatacctgtagtcccaccgattccagaggctgaggcaggaggatctcttgggcccaggagtttgagacttcagtgagctataatcatgctactgcactccagcctgggcaacaaggtgagacctcatcttaaaaaataaataaataaataaataaaaagtttgcagagctaattttcagcatattattgtttctgtgaacctagcagccagaggctttgctggttctaaaatagtttcagaaatcaatagccttatctatctctgaccagatttaagtctgttcccttcacatgacaaagggtgatgcctttccacgtttctcatagcatggcacacctttaccaataatgatttacagcacctgtgttgtaaggatgaggctgctgtggtctttttcaaccagttcccttcctgccttgagctaagggaattgatatctcacaacctgcctatagccctgtgtaggtcaccaggcaggaagctctgcacatggctttggaagattcccagtgcccctaagattctgggacaacagtgtctaatagaactttctgcagtgctggaagtgttctgtatctcctattggatatggtatccactggccacatgtggctattgagcgcttgaaatgtgactagtcaacaaggaactcaatttagtgtattttattttacttaatttaaatctaaaaacagtagctccccttaatctgtagttttgatttctgcagtttcagttacccacagtcaaccacaatccaaaaataggtgagaaccatacaagatattttgagagaaaggaagagcacattcacataactttcattatattatattgttttattgtcagtggttattgttaaattactgtacttataaattaaacatcatcataggtataacatatatggataggaaaagacatagtctatatagggttcagtactactcatggttttaggcatccactgggggtcttgaaatgtaccctctgtagataaggggggactattataggagattctgttttctgtttctgctgttttaattttttgaaaaagccatggatcttctcctctgctctgcagtccagattcttagcaatgtgatgcatttgtttttgtttttgtttttgttttcagccttcagacaaggagatgttcagccgttcagttactagcctggcaacagatgctcctgccagcagtgagcagaatggggcactcaccaatggggacagtaagttctgcaaaaacaccagctttccacacaggcctcatcacctctggaagtcctaggtttcaaaatacatagctcaaaaagtaggaaatgtgttattgctcagttttagtattcctagcagttttagcagaacccctcatttggatgaatactgctacttattaatccacttctgtgtgccaggcattgttctaagactggtacatgtactaattcatttgctcttttagtacattttagtacatttacatgtactaattcatttaccccacgagattactgttattaataataacactactctgtaagataggtattattactcctcacaatttaaaggtgacaaaactgggcacattgctgctgtaacaatattaccacaaacctcatgccttaaaataacaatttattgacttgcaattctgaggtcaggagtctgaaatgggtctcactgggctaaaatcagggcatccgtaggcctgtggtccttcctgaagcctcaaggagaatccattggcctctccctcattcttcacatccctctctgaccctcccccctccctattcacttatagggacccttgtgattacactgggcccacctggataatccaggcttccctctcatccgggagtcatctaattaacagccttaattccacctgtagccctaatccctccataccctccacaaaacattacacattcacaagttccaggaattaggagacagacatttttcagggtcgttctgccttccacagagatgttgctaatttgcctgatatcatatagtcagcgggctaaggatctgtagttggaaccaggcagtctgatccctgggcacgcactcagtcactctgcataacctctgcatcatgcattgtgtactcttgctgatggaaggagcagctaggtttccttcatgctttagagtttacaccatgcttttacctgaggtaagagggcgtcctgttacccctgtttactgatgaggaaactgtggggtaatcaggacaccagtgcctgttctctgtctaccatgatgtagacaactagaaccagagagcaaaagttcaccccctccgtgatgatcagggatttagaacacacaggggtgttggtaagttcagaaggattgggggatccgttgtcattttttcacataccccttggaaacactatttctaattcccccagagtgagacactaatggaataacttgcttactttgtgtctgcatcctaagggcagggctttctgtttcattgaatgatgtgtctgcagcaccctgcaccatccctggtgcatggcaggcactcacaacacggttgacaaagggacgactgaacagcttcacacaatagcatatctgtggctggccaagaatttcacatttggtttttttctaatttgaggtaggaatgttggtggcgggatgagatggaagcaaggtatgaggtgccagtccctttgtgctaatggctgacgggtgcatgtttgccctgtagtttctattatgtctgccaaacaaaagtcacctgtgtgaaagggggtggctaccaataattccctccacacaggcaggggtcagtggtgctggggactgtggtcactgcacatgctgcctttctggtgtccagcctcccatagttcagcggcatcaaactggtcatcttctggtcacattggacaatctgcctacaagagtctctcattggagtgacattaaggaaagtaattgtgaactacacttagagccaagataacttattaaatcttgtattgggaaagatataatgaacagctttattttaaactgtgattgaagtaggataccaactgatggtcataacaactataatttgtgcctgagacttaaataaaaagcacgcatcttgatttaacctaactttatattacctgattctcggtaataattattgaaagacttgcctttctccgcttttaatgtgtgtgctgctttagttctttcagaggacagtactctgacctgcatgcagcattacgaggaagtccagacatcggcctcggatctgctggattcccaggacagcacagggaaaccaaaatgtcatcagagtcgggagctgcccagaatccctcccgagagcgcagtggataccatgctcacggcgagaagtgtggacggggaccaggggctggggatggaagggccctatgaagtgctcaaggacagctcctcccaagaaaacatggtggaggactgcttgtatgaaactgtgaaagagatcaaggaggtggctgcagctgcacacctggagaaaggccacagtggcaaggcaaaatctacttctgcctcgaaagagctcccagggccccagactgaaggcaaagctgagtttgctgaatatgcctcggtggacagaaacaaaaaatgtcgtcaaagtgttaatgtagagagtatccttggaaattcatgtgatccagaagaggaggccccaccacctgtccctgttaagcttctggacgagaatgaaaaccttcaggagaaggaagggggagaggcggaagagagtgccacagacacgaccagtgaaactaacaaggtgggcactggcgtttttgttttgtctttgtgggttcctgttctggttaggaatctagctggccctggagttgttctgggaaatatctgcaaacactttccagtttgttgaatgatgagagctgttttcatgtaagctgtgtttggctttttccccctccaagtaataaaataccaaaaacttgtatttatcaaatatttctctcagcaccttacttggatattttcacattttttccatcatgtctaattagggccaaatcttgtttgcttcattttgatgtccacaaattaaatacagaaactggacactttgcccacacattttacccattctgcttgttggctgcctcagcagcatggtgacctttccccttccaggatccccaaaaatcagcatgcatagcaacaggtaccatgggaaccaactcacaggtgcccctggttatatctgattgtacaaaccttcatataaatcagtaggagatcttattttgtgaccctttctaaactatagcctatacttcctaaatttagatattcaacaaagctgtaaaatgcattagcaatccacaccttctgcatgtgtctgataacttgatatctgagccacgatgaagttcacatccctggttgttaaaatctctttgggatttaactaggcccatctacttcaggcaactaataattaatttctgttttctacacagaaaaagaggaaggttctctcttctattcagttttagtaggaaggacaagtagcaggttagccagtcactagtagccttaaaaaccttccgtagttcatggccagaggtgaaccctcactctgtttgtataaattagaccaagaaaatcattctttgtgctgttctctgaatgcatttcaacttttcatattatccatgaaatcagctgttgagagcaccaataaaagggtttatgaacatgttcataaaatataaaaatgcagtccaattttttgcccttcatagaaccaaagaccataaacctgatgtaaagttcatgctgcctaaaccagacaaagctttttacttacaagcattagaaagataagacgttgagttgtctaaccattgctagtaaacagttctccagatttcacgttaaaaactggaaataatcatctggaaataaaattatccttccacaatatagtaaaaatgagtaatccatcatctttatataaacaaccctaattttaagtgagttgagggtttgaagtatttaatattcattcatttatttaacaaaagatcttaataagcacctgctgtgtgccacacagtcttctagtcctggaaacaaaacatgtacatgaacaaaatccctgccctgtggaacttacatcttagtgggaagagacagacataaagtttaaagtttataagagaaaaaaatagaaccgaataaggggaactgagaaaacaggtggggagtacagttttggatagagtggtcagggtctgcccagctatgaaggtgacgtttgagttaaaggatccaagggggtgaggtttgtgcttttgtggaaagagcacgtgaagcagaggggatgcccagtgtgaggcccctgaagctagagcttgcaactggctttttaagggaagaggaggggactgctgtgggtggagagggaagagcaaggacagcagtgaggagaaagagaaccagagctcgatcctggatggccttggcttatagtctgaacactaataatgtcactagagtcccgagcagcagaatggcacaacctagcctatgttttcaaaggatccctctgactccagttttgaaataaagggtagaagtgaggagaacaattgggtagtgactctaataaaccagattagaaatggcggtggcctggatcagggaagaggcagcagaggtgatgagaaaagctaagccagagccaagagatttgcggatggatcctacgcttagtgagataaagaagaggcagtgatgagtacgaggctgggcccaacatgtgggaaagattgaattgccattaactgaaatgaagaggatacaggcagagcaggttttggggggagaaccagcagtcagtgttgggtacgttcaacttgagataccgattggacttccaagtagagcttatcagatggtagctggattgatgagccgggtaaagaggaaaggccagggctggatttgctgatgtgggagtcatccacagaatgtggttttaaaagtcatgagattgggtgaggtcacaggataggtgagtgtaaatagagcctggaagagctccaagaatagagatctggaaaaggaaccagcagaagagaccaaagtaggaaacaaaaacaggaaagttgtggagtcctggaaggcagtgaagaacgtgtccaggaaggaaggagtggcgggccgctctgccaaatgcagcgggtaggtcagggaaggcgagtctcattggtgcccttgacaagagcagtctctgtggaatggtagaggcagaaacatgactgaaatggattagaaagagaataggaagagaaaaattgttcggttgactttttagaccactctttaaaagattttgctataaagaagtgagacaggctgggcgcagtgactcatgcctgtaatcgtaacactttgggaggccgaggtgggtggatcacttgaaaccaggtgtttgaaaccagcctgggcaatgtagcagcaccccgtctctacaaaaaatacaaaaattaactgggcatggtggtatgcacctgtagtcccagctacttgggaggctgaggtgggacaatggcttgagcctgggaggtcaaggctgcagtgagccaagatcacgccactgcatcccagcctgaatggcagagtgagacgctgtcaaaaaaaaaaaaaaaaaaaaaaaggaagtgagataatgagtaggtagaatttcggagtaggactaggtttgttttggttttagaatgagagaaacaacagcatgtttgcatgtggctgggaatgatcccacactgggagaattcctggctcagtattcacacataggtatgtggagacagggtctagtgtgtaggaaggaggggatcacctgaaggaggaacatggaaaatccatttgacagggaggaaagaaaatagattaacgcagaggctgagggtggggctaagagttgatacaaatttcttctgattccttcagttttcttagccaactaggaagcaagatcatctgctcagagtgaagataggtgaggaggtgttggaagtctggggagaagaggagaagatgcaaagtagactgtgagttgagcagagactgagtatactggggaagcatcggatgatacggagcggctttaagggctcactagagggttgagttcacgtatgattggcagttgactatggagcttaagcttagtaaagcagtacaggacaccaaggagaagggcagactttgaaagcatgaatgggtcccaatggtgttgaaggagcattggaactgggttacagaaggagtgagctttgacaacgagcgctggtctgaaaggggttgcaaggacttgggctggtggagaggctgtggtttagaaaggcctggggtgcagccatgagggtgctgaggccgggggtggacatggagaggggacacagatagagcataaaatcagtgggggaagggaaagtcaaggaactgaagggcgggatttagaagggtacacgtttgttgaggtcaccaaaaattaagacaagggatgtgttagagaatcagtaaaccaagagccaaaatccttcagaaatcaggcagggggcaagacacaaaatgtgagtcagtttctccattagctttgaagtttccaaatgacttaaggatctttctgatgacgccagcaaactgtagaagtataaaattcaggcatttgataaagaaacaccatgtttttaaatattaatcctccatggatgatcaatccttcagtgacaattaggaattgaaacagtagtctaaataattattttggcttctttgtacctacagatgcaaatacaaaattagaggaaatttctctaaggataatactactagatatccccgaacatcatacatgtggtaatagattgcataagtgtttctcttcccataatttcttcgtggttccataaaaatcatttgaaaacgttgctagacagattatgaggaaacatgtgcaaaagaaaggttagattgttaacgctgaattactttccttggcttgtgtttgttctgacagagatttagctcattgtcatacaagtctcgggaagaagaccccactctcacagaagaagaggtaagttttgtttctttttaaaaagggaaaactgtagtaaagaatagaccttccccccttgaataaatgcactgtaatgttaccctttgaaagagctgaaatattctcctatgcctatgtttggagatgaagacttgggatgctggttttataatggcttggagagactgacgggcaggccagacaagaaggatggcaggacaagtagtcagctcaggaaaagaaactgagcaggaaagcagggtcaggaaaaatagagagggcaggggagaagagtgagaagagaaaaattccagcgtgggagcagtcagcagtcaggaagaccacatcagaaggaaatgaatcatgggttggaaaattcaggaaattagaacaggtgagtgtagggaatttgctccagcctgggagacagaaagaggaagtctccgtggggaaatttggatgctgagagcagattaacttcagtaagtacagttccaggcaggagctagggtcagacatagcagccaacaagagcagatcgcatattcccaagcaccagggtgcaaaattcacgagttagattttcaatgaagcattaaaattgttaaagccagtattatacatataatatgaaatatgtgtatatatacatatttcatatgtatatatataaatgttgagctatgctcagagagctaaacaccttaattgatctagctgtatatagcttctatctggaattcctagcagagtaaattgtgtacatgtacaagagcaaagtacatatgcaggtacatcacttcctataggactctgagtaaagcattagaatatggacatagacacccacgttgaatgttcaaagagcaaaaatgctttccctaggtgatattgcccaccctcgtccatgtttctacctccagaatggacctgccatctgtctatctggttgcacagaccaaaacctaggggtcatctcgatacttccttttcctcactgtcctccaacacagtcaattgccaagacccatcagttgcacctccaaactgttttctttgtgtacccacctccctcaagcccactgcggccgcccctccctaggccagagcagtcccctcctgctgatccctggcagctccttggcctccctccactctgttttctactctgcagccaaagtgatcccatctgggacaagaaggtaaaatatataggagttctgggaattaaagactatgtaaaattttaaattgctccttatcttacatttgtttgtattttttgaaacaggacctagttatactgatgaatttttaacatgacagaactatgactcacagacattcattttaggacaaagaggaaaaataaatatgaaagttttttttgtatttatgtaatttaatgttaaacagtccagactgaagctgagatctgagctttaagttctattaccccaatttaacagaatgttatggaaaggattgattagaaaaagaagagaaatggggaaaaggaagagagtaacttatgggaatatagcaacaatttacagactgaggaataatgatgaaagttttaaagagaaaaattgagaagctaaatagcaagggggctggaagagaaacctgtatacaaaataaaaataatagtcataatggtcatagaaaacagtcaaaaggaatatgagaagactcaagaagcttttataaaagttgaaatgtacagtgagaccctctgcacactaggttcattcccagagtcaatattaaattgcaagttaatgaatgaggacaaaggccaagaagaccaagtactcttacaaagagtgaggggcattaattacaaagaccagggggaagaaagctgaggagagaagctaacggtggtgaggggctgactctcattgttacaatctaggtcaaggtacatttgtcctccttgatgttaccaggtgatgaatacgctggtatgccgtctcccctcaccattgtcatccattgtttacctttttataatctgtccacatataatttttggcttggaccaccatttagataatacattctgtgtttgcacttccttataaacagcagtgaattttttttattaaattcaaagaaattataattcttgtattctgagagcagttttttcattaaaacctctaaggtgagaatgttaatcatttcatattcattaggatagtcagatcaacatagtaagagttttccaaagactgtttttctgaactgtaaacccttggattgtcaaggcctcaccaaactgagccagccaccagcctgtaatgaaaagttctcatgcaaatgaccagttagcatgtggcaggcctgtcttaagaagcttttgagacataagaaggcctgtcttaagacaggcctgtcttaagaagctggaaacttcacctgcagtatgtgagaaaagtggaagcaggaaaatgtccctcagcccttgggaagccaggcatctgtgaggaagcatgttcatgtatttcctgggtatttgaatgaatcaaatcactgtgataaaaataaacacaggtaatgaagggtatttttacttatttccaaccgtgatttttcacaataaaataatactccccaaaagtctcctaattagtatatttaatcttcacaatgaatgaaatccctgttgatatcggaggtgatacaggatttattagtgagactgtgggggtgtgcttggaaagccactggctcttaatagtatcctgtaagttgtcatttctgacttggctggttgcaagcgagaatgagttttcccactgaagaaaactagacctggactgtcaatgtctgtttaaccagtaatacgcaactaagtcaagaaataatggacaggaataccctttcagatatatgtgtaccaccaacgagaatccagcaacgggtgttggagaccactgtgatgcaggaagcatggagtagtctaattcagagttcttatactttactggccatcagaatcagcaccggttgctgggccccagccccgaggttctgatttggtggttctgggatgaggcctgagaacttgcctttctgacaaattcccagatcctgttgctgctggtttacagcccacactttgagaatcaccggtctactatgtgttttctgtccttttttgtaaagcagtggagccccttttcaggcaaaatatcattctgataaagaaatgaaataaaacacatgctgtggtcaggtccccggggccttcaggagcttcccactccacctctcctcaaattcctcggcagacccaagagaactgggttttcacggaattaagggaatatgactgatctagttaacatagttgaagatagtgtgtgtaattattctctagtaatgtgctccataattagtacagataagaaagaacaaatctttaaggagtacacacacagaaacccaggagtgctcagtatgtagcttgtcactaaaaagagggagggggaagtcacagctggaagtttattcaactctccctttgtctcctagatctcagctatgtactcatcagtaaataaacctggacagttagtgaataaatcggggcagtcgcttacagttccggagtccacctacacctccattcaaggggacccacagaggtcaccctcctcctgtaatgatctctatgctactgttaaagacttcgaaaaaactccaaacagcacacttccaccagcagggaggcccagcgaggagccagagcctgattatgaagcgatacagactctcaacagagaggaagaaaaggccaccctggggaccaatggccaccacggtctcgtcccaaaggagaacgactacgagagcataagtgacttgcagcaaggcagagatattaccaggctctagcaacccagaagacaaccctgggtagcctgtgatcagtgtctggagacgtttcttctgtggaagagaagaagtgacacaaacctatacttcatatgctgctttagtcacctgaagatggttggagaggccctgtcgactgttctcccagttgttcagtttctgagacagagaggtacggactaggctgcacctgagtgtgcccctgcctgccagatggacaggtacacccaagcacatctccctgctgcaccctcaccacccacaaaagatcccagctgtcagtggtctcatctcattagtgaggaaagccaagctgtatggaaaagctgcactcaccaaggaccacaatgcccccggcctaaagtactgccattcagaaaagcaggtttttcttcctctctttccttttctctgtctgctactgactttaaggctttttcccccttgaaatgtccagattcctgtggttcatcccaaggaaattttcacacaaagcttggcctttgccctcaatataggtgttttaggatggtgacaaaccatggctgctgctttctgcccagctcgccagtcctccccaaagagttgcgcatcagcacctggggatctggaccctgcgggtgaagggatggggagggacgtccctggagtctcttctgtctttgttccttcttattttggcattcgatatcagcagcctctccccaaagtacttgaagtcagttttagatgctttattttatttttctagtcaaaaacgtgtttcccccagtgtttgaaaactcgtccgaatcttttcagtattttccatgagtattgtggtacttctagacttgtttaagcccagaactcattccttcaaaacagagagccttaatctttatgttgggacacagaccacatatttggacggcagccatgcatccatcgctgaagggctgtggacatgaatgtgtatttcccatggtctccgctgcccacaccaacagtgtggcatctcataagttaactgctaccctaaggtaatctaagattaaaatgtaaacatttatttttgttatgtaagtttataagatgttttatgttcaatgcctaatttctcaaaagtgccagaaaaaaatgtatattagctattttgattttatgtacaatgatttatactctccttttgaaaagataccataaagcacataagctagatcactacaaggagctgttatcttttttctaatcaagtgtttaaaacactgatggtttttaaagactcacctttttaaatggtacttggagctcctgattcaaattacctagaccccctagagaaataaatggaatatacataaataatcattttcagtggtttatggtgggcaatattgcaatatttgaaatggtaaaaatggaaagaagaacaaaatatgatgagaggtggctgtgaattataaacctcataaaagtgtcataattccattaaggtttaattatattttttcagaaaacagtgatgaattctgtagtccagtgcttgccaatgcaaattgcctattggaatcttcttcctatattttacaaacatcagtggctgaaatagctcagagtaagagctcagcctggtttgaatttaatcatctctttagatcttataaggccagcattaggaaacttgttcacttttcattttcaaaggagcctagttgaagtgctattatgagtgtgggctatggaaagacagcttttcctacactgataaagaaaaaaaatgaggaaattatttcatccccttgtgacatctgtgactttttggatttaataatcttgctgtttttcctctttatgacaaagaatataattgggaggatgaagtgtcttaaaaattgtagagaccagctcactggaatgtttttccatccctgtattcatggcttgactttgtgactgctctacactgcatgtctgacattgcagagtgagctatgttgaggtaaactggttggttgtcattattttgcaatcagcctggtctctcccatgaagatgtcgtgtgcataagcacaatcatcactgattagaagatcacagcagaatacccttggattagagagaagttcgtaccttgcatttctctgaattctagtctctcataagcactgctttgctggatgattttcactgctttgtgttaatgactttgagcgatctctcacatgatggggttctttagtacatggtaacagccatgtcatcttacacacctagcattgtgaatgctgtagtgacatcctttataggcaccttacagctcaaaacttttgtttcatttcatgccttacttatcaaaaaggcaggaaagtaggtatgatctctaaagtaaaaaaaaaaaaaaaaaaaaaactttttatagaaagctcataaataatcatgtcattttgcaattttgttaccaaaatttcccccaagagttttcaaatattagttctgcaatgtggctatgaaatatgcactgaaatataccttttaatttgagaaccagtggttagaataagctgtgatataaagtattttcagtgtacttttaaaggaactataaggccctccagcataaacgctaaaagaatagatggtagcacaggccatgagggctgggggagagaagcagagtgaaccttagaaagatggctcagctatttggagcactggatattttactgaagttatttactgaggcaccatcactgttttgactgtacagtatagtttttcataaatttcatcacatttactttgttcagaatctgggcttgaatctttgagttggacaaaagcctatggtttcttttaaaaagtttcatcttgagctaatgctacagtttaaataaaatgtatgaaaggtagttatcaaaaacaatttgtatatttaaaattctattttgacatccattttttacagcgaattatagcaggttatgtgaaatttaaaaataaattttaggaaatttttttatcttgtaagtaagaattataaatctatctcagttaaaagtaggatctttgtttttattcagatattttgaaagtttagaagcattttgtatgctactttggtatttcttaagtatagtcagcaggaaagggtaacctgttttatgcaaaatttttttaatttgtcaaatgtttttagtgtgtctactttctgaaatagtctcaatatcctgtctgtatcctaggcagataactacacaagaacaaaacgctatatagaaaagaaaatatttgaggaaatcttaaattccataagaaagtaattcttgcaagaatgttggctacatatttttttttctgtcctgaataaattacatcattaggtctgttgaagcttttgaagctaccactattctttctgggataaaggctaattactgatttatctgccctcaaaatcccagagttaattctaattgagtactaaattaacagtaagtagttaacacagagaactaaaatttaaccgcattatatcactgtatatatttctcatgatttttgctaattagagcatttacttaaccagtaataaactacacacacacacacacacacacacacgtatacgtgtgtgtgtgtatatacttggctctgacacaactctggtgcttaattaggatatgttctattatgtattttgaatgtttatcctgctagtgtgatgaacttttgttggaaaagcagaattagaaggaacagtttttcaatcagtttcatttggtaattacaggaaaaccttgagttgctctaatttaatttttccaattaatacatttagactttaaattgcatccgtaattctcttggctgaaaaacagtggtattttaagacagttttgttatacatgtgacttacttttgactcagcctgagaggaggaaatgtaaagagataagagatttggcccaaagcagcaagagactagtaaccttgagccaggacgaagccaagacaacgtgactcccaagtagcaggagcagaggtcggtcacctgtggcattctgtttcattcccttttaaaattatgagactttataggcagtgtaaaacatcagcaggcagcgatgtgataggatgtgcgaaaaagctggtctgataccatggctataattacagagctttagttcaattaggattttgtaaatgagcaaatgacctttttttccagtgccccttgtaatagttaatatgagtccatgcaatcttgtgatgccattctcctgaaggtgttgatttctggtacccagccagcttagctttggctgctggaagcacagtaggtactgatgattacttcctggaaatcttgacaggcttattgtactgtgtaatggggaaaagttaaagtataatgtttggtgttaataaatgactgatgtgaaaataggaacatgtgtctttaatatcaaatatggctttatttgcagtgaaatctaaattccttattctacagtagtattttcttgccctgtgttgtatattttcctaaatacatttttcctgacagtggctttaggccagttgaacacacttagactgaaagtgtttaacttaaagagatcagtccagaaaccatgataaattagaatctttatctggaattaccaaattaaaatttaaaatcatggtccagaagagaacaaacattcatggttttttttatcctactgctcatttttaggtctgtgtttacatctagtctctactatttgtgaagtatgtcattatttttttcaagttcttctttgacttaactgaaaaataatattccaaattcttaatgtaacatgaaaagagaaatacaatttttgcttaaaagacattttttaaaaagcgttcaattcagtaatcatttctgttaatacaggaagtttttttggcttgccagttatatactgtgggtattttttaaaatgtgctacccttgggttgtctcatatcaccttgcgtaatcatgtattacaaaggttgataattgtcatttctcagatgtctgtatgttacattggcagcagtaaaatgttttaatgttgttaccttttaaataattgtgttgtattaacatgcctcatattttctggggaaacttgaaatatatctaaacaaaaaaggtctgttataaataggaattggcatttcattgttaatgttttttcctcataaaaatagttacaccaaaagtgacatattgtctattacatgggcccaatcagtattaaagtactccccttactcaaaaatattaaaaaataattcatgacacttagtagcattttcattgattgtttcaaaagatcttcataatggtcaaattgtccaattcacaaaagagtgagaaagttgttttcagtactgggaatttttaaaccttagttttaagaccaaaaatatctcttattagcttgaacattttgtgattacttttccctccccggatctagtccttttaaggagtaagtctaaagaatgaggccatgaagtcactatttcctcccacctcagtttgtctcctggtacttagctggcctatcgctttgtgtggcaatacccctgggtcgcttccccactcagccttctgtatctgctgttcacaggacatgccattatgtctttccagtacggatcacagtgctgccatatcacagaccctgccagccggcacagaaccatgcctcgtcacagctctgcccaactcacaggctgccaagatgaggccacaggtccacctagggcggcagatgctggtgctatttgtcacgacttttgccaaaacatgtacactgttgctcacatctttcgtaagaatggttgacactaaggggccatggaaaagcacttttaaaaaattatgtggtggaatcaaactcacagaggcagaaatgttagtgccgtgctctaaccaagtaagcttagtgttccccacagtgatctgtatctggcctgagtctcctcaagcagcaacccccactgtccagcatgtggaaggtagatccttatgacaacaccagacccatagttaccaggaaagaaaaaggaagctgagtgttgtgaaggggaagaaatcctttttataagaagtaatcatttttaggccgggtgcagtggctcatgcctgtaatcccagcactttgggaggctgagacaggtggatcacttgaggtcaggagtttgagacctgcctggccaacatgatgaaaccctgtctctactaaaaatgcaaaaaaaattagccaggcatggtggcatgtgcctgtagtcccaactactcaggaggctgaggcaggagaatcacttgaacctgggaggcagaggttgcaatgagctgagatcgcaacactgcactccagcctgggcgacagagcaagactccatctcaaaaacaaaaacaaaaaaaaaacctttttaaagtaaattgagtgtaaaatgttttcaccatgaagccattgcaccctctcccccaggaaacagtgcctaaggatgatgtcaagttacagccagtttgctctgatcccccaggacctaagaaaactgtgagtgcttcagcatgcaaaggtagagctaccagataaggagaataacttggccatttatagcaaactgcctgactttggagtgagaaaccaagcaccttctaggtcctaggataggtgaattggaggtgcagctgctgaagttcccattttctacatacttcaggagccagggtgtttcatttggttttgtaaaactttgctgtaagtcatcacagttaattctttgaatggacattttagagtgtaactttttttcaaaattagcagaacagatatctctgctcattctctttatacatttagttttttaaagttcccctagtatacctgttaggcactctaaataggacacagttaaagctaaaagaaggaccagttgctccctagagcctacagttcagaactatcttgttgtcatgtcctggtttggtttggtttgtttttaactcaacaagttggaaaccatgagtttaaagcaaactatttccttttcttaagcttaaagagaattttttttttaatctttagctcctcatttaggtagtgaaggcttccctgaaagacagcagtgcccttctctggaagaagaggctgggaccaaaagcctgagtctatgggttgaggattttgagcattcctttgacaagcttctatgtatttttaatataagactcataaatgaacctgatgtggtgttcatgacccatcccttaagcatgcttgctttttttaactttactttttgagtatagtacttgtcttgtttttcctggagccatgctaggatttaattcctatgtgccactacccgcccatgtcctggaagatggccatgcctgcagcaatgctcatgtcttgaggagaagcaatgtgaaaagcatcaggaaagctgaaccttacgttcaagtcagcaaacatttgtgagcattctagtatgcttgcgaccttgacactttttaaaaattatctttttatttgcttcgagtatcaaccgtatagttgactctagtggggcgaagggagcagagatgagagcaaaattcagacttgctgcccctgtgtgtctcagttctcatgtctctctgagaaatgtgttggcccaattccctatctgccactctgagtctcttgagtaaatgtgtgtaaatgagaaaaattatctcaaagatttaacttattatttagatattttcttctttttaaactcaggaataaacctggtttgtagataatataatatggctactagagctataattgagtaggtgactagaagcattttttcaaatatatttcttgtaaagacatctactttgttttaactaggaaaagaaactcctcatattaaaataaacatttccataagcactttctagaagagtgtagcatccatctaccatccatcccagaatgtttgtatcttgctcatagtatttcaaaaatttttatgggtgaaaaaaatgcacttttttatttattggaaaagtgtagagttattgaattaaattctcaagtgggacaatttagtgtaaagggaaacatgggttttggagacaagagcacagggctgtggtccctgttccagcattgactttactatgtgacctcgagcaaatgatttaacttctctgtgcctcagtttctccatatacaaaatggggataatgatactaaccattgcctacctcatagagatgttatggggacaaacgaaataatagagataagcacgaatgctttcaactcttcggaagaaaggtgctatataaattgaagttgtgtttttaatgatccaattattaattatgtttagggtttaaataacaatactgttagtcatgttaagaataagttttgttttgatgcatatttccacttctcttctgtggccagatcttgatcattcaaccagtaatggtacctgaggaactgaaatgggtatttgttttcgtatgtttctgccagtagtatttcaattgaatatccagaaaagactggagtttaacttgtaatatcttatagtttacatgtaataaaacttattcaagctatatataaaagtatgattacatgtaaatagcaggtatgttgtaattaaaggcacttatcaaattgtctttgttcttttttaattgtaataaaagtcagttttacataaaggcttgttaaaatttatttggtatttgaaaaggtcaagaatggctaatttatgtacctttcatacattaccagggttttgggattccagcagtcaactcaccaccataacaggaaagataatgttcctggtaatcagaccaaagtgtgtagaggttagcatcaaaaactttgcagaaaaggacccgagtttgaatcccggctccatcatgactttgaggaagctgttagacttctttgtgccctccttttcacattaggaaatgggggattatagtatagaacctgctaatggggttgtcctggggattaaatgagatattaagcatggtacctggcaaggtgctaagtgctctgtgcatggtaagagaccatcttcacaaaagggctgggaaatttttgatggcatttacccacacttgccaagcactcctatgaagatgtgcaacctgagagcaaataattccccaggccaagaggaaaatccatctgcttgttgtgtgaaggggatgcagccccagcaggatgtctcagagcaaatgactttaaccaccatctgacctggctgcccccttcctagtcacttaagactggccttggggccaaaaggcgaagcagtgagagttttctttggcatgctcctgtcttatttttgtctgtgccctgtaactacaggacaccccaaacccccagattgcctctttaacacccaccacaacccagcctccctttctgagatttttctctgctttctccttctgttccaccccatctgcaccattataaatactcaccctgttccatatttctccagggactagcccgcttatttctacccaactaactgttcctgtacagtgagtgaatatccctcctactccgaggactgtttacagttgtttaaggagcttgctgcctatcacagtcttgagcaaaaccacccttcactctcatgggcacggcaaactcctgagagactgctgggagtatttgggcatagaagagaggacagaggctcccgcagatcacacgccacatcagcaaatgcctgctgagccctcacagaggccgtgcctgctgctccctgtcaaagggtctcatcttgcctggttgcttccttgcatgtgatgtaatgatagcaacctagaggcagatgtgcgtaagggcctggccatcttggtttcaaactctggcttcatttctcaccacacgggcagaactttcctttcccagagtattaatcacaactccattctgtgtgtggaggctcagcgctaagaaatgtttgttctgagtctttggaacacagatcctggtttcccacctgggctgtctggggaaatggaagctccagagctcagcagtttcgaaggttccctgtcacctgtagaatggagcactcgcctcttctgtcagaggtgggtgtactgccgattctaggacgtagacatttaccaagtgctcattaagaggactggagaattctgataccctagttaaggtgagccaaacagtccagactttatcattttttttttaaatgtttctccttgggtccatctttctacctctgtgaatacaatctgcaatacgatttttttcagttttgaagagttatccaggaccttactgtacttttgaggtcgccattttgaatgtttgctcccatcctagatgattcttaaaatctcaaggctggacctcggcactccaaagccagctgtctcccaggcatcacatctgtttccacaatgtctccctcggtatgtcccaatgtaaatgtggttgttctggagtggaatcatctttccgagctgccttgtttgctcttcagggcacattaactttgaaatattccccgtagcatacactacaatttcctgcacacagcaagcactaaataaatgtttggtttgatttgaattctcctacctttctatcatccataatcttacaagcctgtcttgaactagtgcctacgaatcttaggatttcatacttgaactcttcccccaccgaaagcttctctgtgactgtgaatttctgaagagatgccagggtaacaagatagggatatcctccaagtcaaaccagcccaaaaagcagtggcacggggaagaaggcagacatctgacatgcagataaacagcaccacaatctggcagagtgtcttctaaaacagacacgtcattcaaagcaacagctttaaatgtttaggcccaaaggaaaaaaaattaatcatcgcaacatcaaagtagaaaagcaaagttaacaggaaaacaaaacaagccacaggaaaaccaaatattgattcattccataaatatttgctgagtatttactatgtgccaggagctgaaacagggtgagagagaagagacagaactcctgcctcattggagctcacattctaatggccttagtgcctacctttaaatgtttgacatacacgtttaaattctcagggtattcagcatctcaatgtctccactgattgtaccaagtctctggagatccactttacagagaggcctccagaaaggcctctatgagcaggttacatttaatgtgagactgaaataataagccagtgaaagaaattccaggcatggtgcacagccaacgccagggctccaagccaggaaaaccttgatcttctcacacaagcacacataaatcaataacgggccagcttgccaggcctccggcatgtctccttctccaccattcctgcccttgtccagccagtccccatcctaagtcactctgtagcacctcaaatcaaccttccgtactgttgccagtattatccatctagaaagcaagcctgtttggatcaggagaaaagtacagactaatcactaattattatctactatttcccgggcactgttctagatgttggggatacagcaataaataaaacagctaatggtttctgttccaatgaagcttacattctagcaggggaagaaaaataattaatcaaaccaaatttcagatccgaaatgtgatgagtaaaacaaaatggaataaagttaatgaaatgatgataaaatagagactgccttggtttgttagggcaggaagaatgataccttttctactgggtggtcagggaaggcctgaatgacttggggcatcagtataaaacttggggagaaaaacattccaagaagagaaaatagcaagtgcaaaggccccagggaggaaaagacactggtatgttcctggaccacaaaagaaggcagggtatctgaaccacagatagagtcacaaaaaagggaaatatgagagagaggcagggtccagattccacagagcagagtagatcaaatcaagaattatactgtgatagcccaggcacagtagctcatgcctgtaatcccagcagtttgggaggctgagacggccggatcacttgatgtcaggagtttgagaccagcctggccaacatggcaaaaccccgtctctaccaaaagtacaaaaattagccagcgtggtggtgcacgcctgtagtcccagctactgtggaggctgaggccggagaatggcttgaacccaggaggcagaggttgcagtgagccgagatcacgccactgtactccagcctgggtgacacagcaagactccatctcaaaaaaaaaaaaaaagaaaaaaaaaagaattgtactgtgatattaggagcaaatagaggccactgaaagattttaaacagaagtttggcaaaaattggttttccatatgaaacataacataatacttgaggccaggagtttcagaccagcttgggcaacacagtgagacactgtgtacaaaaatcatttttaaaaaattagctgggcatggtggcacacacctgtaatcccagctacttgggaggctgaggtagaagaatcacttgagcccaggaagttgaggctgcaatgagctatgattctgtcaccgcactccagcctggagaacagagcaagaccctgtctcaaaacaaaacacatacgaaaagaaaataacaaaaaagaacataaaattgaattcccaacttacaccataaatgaaaataaacttcagatggacgaaagagagaataataagaaacaaacatactagctacaataatataagcttactatttatgagttaccattctacaggcatctcactgtattagctcatttaatcttcaaaacaactttaatgagttaaataattattctcatggtaatcaatgatatcacactgaagcatagaatagttaacaaatttgtccagattttagtggcaaagatgagatttgaactcaggtaattttatttccaagcctgagttcttaaaattctgctgtgggagatatttattatggctttattatgtatggtttagaactgaaatatgcaatgcacaaaagcacaaatcatagaggaaaacactgatctgtttgactccataaatttataaaatgtctttataaaggtttaagtgtatgcatcagtgtaagaagcaacatatctaaggacagcaatatctattttgtttacttccatattctcatttacctacaagtgtgcctgcccataatagggcctcattaatatatgttgaagggatggatggtggataaacagatagatgaatagcatgtaggtttactcacagccaacctaccaggcattgtactgatgacacaaaggtggatcagacagaccccccccgccaacccctctggaactcacagccttgtaggcgatgcaggcaacatttgtacatatgatggcaaggagttaaggggcttgcatccgaggcacttgaagttcgcaaggggggatgctgagatcagaggctgggagatcagttcagatgggccaatgaaggcttgaccagggcagaggaaatggggagaaaaaatgctaattttagacatcagtaggtggtgtaacaaagggatctggctactcataagatgtacagaattaggggcatagagatgaaaagacaactcttgggtctctggatagaagatgatgatattaatgaactacagatatagaaggagaaggttgaagagaggtaggcagtgatttcagattggactcagaatgtacatctttccatttctacaactagttatagaatatttacctattttcaattgatttcataactattcaataatattgctttgagcttcttggtaaaaaatattttgcaatatcatgatggcagtgttcaagcaaactaaatatggcctgagaaggactctgtactctatatttgagtccttgtggatgaactgtaacttagcctaatagtcagacaaaattgaaaacccagcttagtagtatgcacctgttacaatggctgagcgctggccaatcccagctgccatacttcaaccactcatagactgctgaatgttcaaactgcgttcaaagaaggcaaacgccgagctgtaactaatttcactgtttctgtacctcatttctgattcctgtacgccattttaccttttttgtctataaatgtgttctgaccatgaggcacccctggagtttctgtgaatctgctgtgattctgggggctgcccgattcacgaatcgttcattgctcaattaaactcttttaaatttaattcagctgaagtttttcttttatcaggggaatgtaaactccccaattataataagttgaaaaactatggagttcccactgaaacataattaatcagatatgggtttacctgaaacccatagttatcttccattaaccccacccccaatgaataaatgttatgtgataatcatatgcactactgaatgaaagaatctctgatcatttaaatgaagactagctgagtaattgaatagaggctcaacaaagtagagagctggcaagcagttaaagggaagaaagaatggacagaaataaactgtatcagcccagtaccatctaattaattttttttttttttttgagacaggggcactctgtcgcccaggctggagtacagtgacacgatctcagcttattgcaacctccacccccccaggctcaagtgatcctcccacctcagcctcccaagtcgctgggactacagggcatgccaccacacccggctattctgtacgtttagttgagacgggatctcaccttgttgcccaggctggtctcgaactcctgagctcaagcaatctgcctgcctcagcctcccaaagtgctgggattacaggcgtgagccactgtgcctggcctccaattaacatttttttaaattgaggtaaaaataattttcccacaaaaaacacaaaacacctttcctactctcactcctcttattaattactaggaagctttttaaaaatgaaaagtttttagttctgagattgctgttgtcaaccacagttactgttagtgttatttttctacatggttttcagtctgctggtgcttctctctcacttcgttctgtttcataactagttggatccagtgaccctgaattgtcctctgtctttctcttgcata

SEQ ID NO: 900 - DNA, 1153 bp, Homo sapiens
gacacagctctctgcctccatgtcaccacctttgaaggactgactgattccctcggctggtgccagtgcctgctcctgccatggggcccgcggggagcctgctgggcagcggacagatgcagatcaccctgtggggaagtctggctgctgtcgccattttcttcgtcatcaccttcctcatcttcctgtgctctagttgtgacagggaaaagaagccgcgacagcatagtggggaccatgagaacctgatgaacgtgccttcagacaaggagatgttcagccgttcagttactagcctggcaacagatgctcctgccagcagtgagcagaatggggcactcaccaatggggacattctttcagaggacagtactctgacctgcatgcagcattacgaggaagtccagacatcggcctcggatctgctggattcccaggacagcacagggaaaccaaaatgtcatcagagtcgggagctgcccagaatccctcccgagagcgcagtggataccatgctcacggcgagaagtgtggacggggaccaggggctggggatggaagggccctatgaagtgctcaaggacagctcctcccaagaaaacatggtggaggactgcttgtatgaaactgtgaaagagatcaaggaggtggctgcagctgcacacctggagaaaggccacagtggcaaggcaaaatctacttctgcctcgaaagagctcccagggccccagactgaaggcaaagctgagtttgctgaatatgcctcggtggacagaaacaaaaaatgtcgtcaaagtgttaatgtagagagtatccttggaaattcatgtgatccagaagaggaggccccaccacctgtccctgttaagcttctggacgagaatgaaaaccttcaggagaaggaagggggagaggcggaagagagtgccacagacacgaccagtgaaactaacaaggtgggcactggcgtttttgttttgtctttgtgggttcctgttctggttaggaatctagctggccctggagttgttctgggaaatatctgcaaacactttccagtttgttgaatgatgagagctgttttcatgtaagctgtgtttggctttttccccctccaagtaataaaataccaaaaacttgtatttatcaaata

SEQ ID NO: 901 - protein, 328 aa, Homo sapiens
MGPAGSLLGSGQMQITLWGSLAAVAIFFVITFLIFLCSSCDREKKPRQHSGDHENLMNVPSDKEMFSRSVTSLATDAPASSEQNGALTNGDILSEDSTLTCMQHYEEVQTSASDLLDSQDSTGKPKCHQSRELPRIPPESAVDTMLTARSVDGDQGLGMEGPYEVLKDSSSQENMVEDCLYETVKEIKEVAAAAHLEKGHSGKAKSTSASKELPGPQTEGKAEFAEYASVDRNKKCRQSVNVESILGNSCDPEEEAPPPVPVKLLDENENLQEKEGGEAEESATDTTSETNKVGTGVFVLSLWVPVLVRNLAGPGVVLGNICKHFPVC

SEQ ID NO: 902 - DNA, 6633 bp, Homo sapiens
gacacagctctctgcctccatgtcaccacctttgaaggactgactgattccctcggctggtgccagtgcctgctcctgccatggggcccgcggggagcctgctgggcagcggacagatgcagatcaccctgtggggaagtctggctgctgtcgccattttcttcgtcatcaccttcctcatcttcctgtgctctagttgtgacagggaaaagaagccgcgacagcatagtggggaccatgagaacctgatgaacgtgccttcagacaaggagatgttcagccgttcagttactagcctggcaacagatgctcctgccagcagtgagcagaatggggcactcaccaatggggacattctttcagaggacagtactctgacctgcatgcagcattacgaggaagtccagacatcggcctcggatctgctggattcccaggacagcacagggaaaccaaaatgtcatcagagtcgggagctgcccagaatccctcccgagagcgcagtggataccatgctcacggcgagaagtgtggacggggaccaggggctggggatggaagggccctatgaagtgctcaaggacagctcctcccaagaaaacatggtggaggactgcttgtatgaaactgtgaaagagatcaaggaggtggctgcagctgcacacctggagaaaggccacagtggcaaggcaaaatctacttctgcctcgaaagagctcccagggccccagactgaaggcaaagctgagtttgctgaatatgcctcggtggacagaaacaaaaaatgtcgtcaaagtgttaatgtagagagtatccttggaaattcatgtgatccagaagaggaggccccaccacctgtccctgttaagcttctggacgagaatgaaaaccttcaggagaaggaagggggagaggcggaagagagtgccacagacacgaccagtgaaactaacaagagatttagctcattgtcatacaagtctcgggaagaagaccccactctcacagaagaagagatctcagctatgtactcatcagtaaataaacctggacagttagtgaataaatcggggcagtcgcttacagttccggagtccacctacacctccattcaaggggacccacagaggtcaccctcctcctgtaatgatctctatgctactgttaaagacttcgaaaaaactccaaacagcacacttccaccagcagggaggcccagcgaggagccagagcctgattatgaagcgatacagactctcaacagagaggaagaaaaggccaccctggggaccaatggccaccacggtctcgtcccaaaggagaacgactacgagagcataagtgacttgcagcaaggcagagatattaccaggctctagcaacccagaagacaaccctgggtagcctgtgatcagtgtctggagacgtttcttctgtggaagagaagaagtgacacaaacctatacttcatatgctgctttagtcacctgaagatggttggagaggccctgtcgactgttctcccagttgttcagtttctgagacagagaggtacggactaggctgcacctgagtgtgcccctgcctgccagatggacaggtacacccaagcacatctccctgctgcaccctcaccacccacaaaagatcccagctgtcagtggtctcatctcattagtgaggaaagccaagctgtatggaaaagctgcactcaccaaggaccacaatgcccccggcctaaagtactgccattcagaaaagcaggtttttcttcctctctttccttttctctgtctgctactgactttaaggctttttcccccttgaaatgtccagattcctgtggttcatcccaaggaaattttcacacaaagcttggcctttgccctcaatataggtgttttaggatggtgacaaaccatggctgctgctttctgcccagctcgccagtcctccccaaagagttgcgcatcagcacctggggatctggaccctgcgggtgaagggatggggagggacgtccctggagtctcttctgtctttgttccttcttattttggcattcgatatcagcagcctctccccaaagtacttgaagtcagttttagatgctttattttatttttctagtcaaaaacgtgtttcccccagtgtttgaaaactcgtccgaatcttttcagtattttccatgagtattgtggtacttctagacttgtttaagcccagaactcattccttcaaaacagagagccttaatctttatgttgggacacagaccacatatttggacggcagccatgcatccatcgctgaagggctgtggacatgaatgtgtatttcccatggtctccgctgcccacaccaacagtgtggcatctcataagttaactgctaccctaaggtaatctaagattaaaatgtaaacatttatttttgttatgtaagtttataagatgttttatgttcaatgcctaatttctcaaaagtgccagaaaaaaatgtatattagctattttgattttatgtacaatgatttatactctccttttgaaaagataccataaagcacataagctagatcactacaaggagctgttatcttttttctaatcaagtgtttaaaacactgatggtttttaaagactcacctttttaaatggtacttggagctcctgattcaaattacctagaccccctagagaaataaatggaatatacataaataatcattttcagtggtttatggtgggcaatattgcaatatttgaaatggtaaaaatggaaagaagaacaaaatatgatgagaggtggctgtgaattataaacctcataaaagtgtcataattccattaaggtttaattatattttttcagaaaacagtgatgaattctgtagtccagtgcttgccaatgcaaattgcctattggaatcttcttcctatattttacaaacatcagtggctgaaatagctcagagtaagagctcagcctggtttgaatttaatcatctctttagatcttataaggccagcattaggaaacttgttcacttttcattttcaaaggagcctagttgaagtgctattatgagtgtgggctatggaaagacagcttttcctacactgataaagaaaaaaaatgaggaaattatttcatccccttgtgacatctgtgactttttggatttaataatcttgctgtttttcctctttatgacaaagaatataattgggaggatgaagtgtcttaaaaattgtagagaccagctcactggaatgtttttccatccctgtattcatggcttgactttgtgactgctctacactgcatgtctgacattgcagagtgagctatgttgaggtaaactggttggttgtcattattttgcaatcagcctggtctctcccatgaagatgtcgtgtgcataagcacaatcatcactgattagaagatcacagcagaatacccttggattagagagaagttcgtaccttgcatttctctgaattctagtctctcataagcactgctttgctggatgattttcactgctttgtgttaatgactttgagcgatctctcacatgatggggttctttagtacatggtaacagccatgtcatcttacacacctagcattgtgaatgctgtagtgacatcctttataggcaccttacagctcaaaacttttgtttcatttcatgccttacttatcaaaaaggcaggaaagtaggtatgatctctaaagtaaaaaaaaaaaaaaaaaaaaaactttttatagaaagctcataaataatcatgtcattttgcaattttgttaccaaaatttcccccaagagttttcaaatattagttctgcaatgtggctatgaaatatgcactgaaatataccttttaatttgagaaccagtggttagaataagctgtgatataaagtattttcagtgtacttttaaaggaactataaggccctccagcataaacgctaaaagaatagatggtagcacaggccatgagggctgggggagagaagcagagtgaaccttagaaagatggctcagctatttggagcactggatattttactgaagttatttactgaggcaccatcactgttttgactgtacagtatagtttttcataaatttcatcacatttactttgttcagaatctgggcttgaatctttgagttggacaaaagcctatggtttcttttaaaaagtttcatcttgagctaatgctacagtttaaataaaatgtatgaaaggtagttatcaaaaacaatttgtatatttaaaattctattttgacatccattttttacagcgaattatagcaggttatgtgaaatttaaaaataaattttaggaaatttttttatcttgtaagtaagaattataaatctatctcagttaaaagtaggatctttgtttttattcagatattttgaaagtttagaagcattttgtatgctactttggtatttcttaagtatagtcagcaggaaagggtaacctgttttatgcaaaatttttttaatttgtcaaatgtttttagtgtgtctactttctgaaatagtctcaatatcctgtctgtatcctaggcagataactacacaagaacaaaacgctatatagaaaagaaaatatttgaggaaatcttaaattccataagaaagtaattcttgcaagaatgttggctacatatttttttttctgtcctgaataaattacatcattaggtctgttgaagcttttgaagctaccactattctttctgggataaaggctaattactgatttatctgccctcaaaatcccagagttaattctaattgagtactaaattaacagtaagtagttaacacagagaactaaaatttaaccgcattatatcactgtatatatttctcatgatttttgctaattagagcatttacttaaccagtaataaactacacacacacacacacacacacacacgtatacgtgtgtgtgtgtatatacttggctctgacacaactctggtgcttaattaggatatgttctattatgtattttgaatgtttatcctgctagtgtgatgaacttttgttggaaaagcagaattagaaggaacagtttttcaatcagtttcatttggtaattacaggaaaaccttgagttgctctaatttaatttttccaattaatacatttagactttaaattgcatccgtaattctcttggctgaaaaacagtggtattttaagacagttttgttatacatgtgacttacttttgactcagcctgagaggaggaaatgtaaagagataagagatttggcccaaagcagcaagagactagtaaccttgagccaggacgaagccaagacaacgtgactcccaagtagcaggagcagaggtcggtcacctgtggcattctgtttcattcccttttaaaattatgagactttataggcagtgtaaaacatcagcaggcagcgatgtgataggatgtgcgaaaaagctggtctgataccatggctataattacagagctttagttcaattaggattttgtaaatgagcaaatgacctttttttccagtgccccttgtaatagttaatatgagtccatgcaatcttgtgatgccattctcctgaaggtgttgatttctggtacccagccagcttagctttggctgctggaagcacagtaggtactgatgattacttcctggaaatcttgacaggcttattgtactgtgtaatggggaaaagttaaagtataatgtttggtgttaataaatgactgatgtgaaaataggaacatgtgtctttaatatcaaatatggctttatttgcagtgaaatctaaattccttattctacagtagtattttcttgccctgtgttgtatattttcctaaatacatttttcctgacagtggctttaggccagttgaacacacttagactgaaagtgtttaacttaaagagatcagtccagaaaccatgataaattagaatctttatctggaattaccaaattaaaatttaaaatcatggtccagaagagaacaaacattcatggttttttttatcctactgctcatttttaggtctgtgtttacatctagtctctactatttgtgaagtatgtcattatttttttcaagttcttctttgacttaactgaaaaataatattccaaattcttaatgtaacatgaaaagagaaatacaatttttgcttaaaagacattttttaaaaagcgttcaattcagtaatcatttctgttaatacaggaagtttttttggcttgccagttatatactgtgggtattttttaaaatgtgctacccttgggttgtctcatatcaccttgcgtaatcatgtattacaaaggttgataattgtcatttctcagatgtctgtatgttacattggcagcagtaaaatgttttaatgttgttaccttttaaataattgtgttgtattaacatgcctcatattttctggggaaacttgaaatatatctaaacaaaaaaggtctgttataaataggaattggcatttcattgttaatgttttttcctcataaaaatagttacaccaaaagtgacatattgtctattacatgggcccaatca

SEQ ID NO: 903 - protein, 432 aa, Homo sapiens
MGPAGSLLGSGQMQITLWGSLAAVAIFFVITFLIFLCSSCDREKKPRQHSGDHENLMNVPSDKEMFSRSVTSLATDAPASSEQNGALTNGDILSEDSTLTCMQHYEEVQTSASDLLDSQDSTGKPKCHQSRELPRIPPESAVDTMLTARSVDGDQGLGMEGPYEVLKDSSSQENMVEDCLYETVKEIKEVAAAAHLEKGHSGKAKSTSASKELPGPQTEGKAEFAEYASVDRNKKCRQSVNVESILGNSCDPEEEAPPPVPVKLLDENENLQEKEGGEAEESATDTTSETNKRFSSLSYKSREEDPTLTEEEISAMYSSVNKPGQLVNKSGQSLTVPESTYTSIQGDPQRSPSSCNDLYATVKDFEKTPNSTLPPAGRPSEEPEPDYEAIQTLNREEEKATLGTNGHHGLVPKENDYESISDLQQGRDITRL

SEQ ID NO: 904 - DNA, 155692 bp, Mus musculus
  misc_feature (1)...(155692): n = A,T,C or G
tgtctccaggggttgtcccttcagtaaggtagaatacttctgaacactgatccctaagttgggagaaagtatttggcattcatgtatcaactaacacctgagtattttgtagataacaacaatgttgcatatgacatttatgtagccacaagggaaaacagaatctatgggtttactgaaggaagcaagataaaggctaggaacgtgtctggattatcactccatagaaaggcacacatgagtgggctgcagaggtgactcgattgataaagtacttgttgtacaagcgctaacggctgggtttgaatcttcagtcccccatgtgaagagctctgtggagtggttgtgcttgcctatcatctagtgctagtagggggagtcttgggacttctgaacagctagtctacctgagttagtaagctctgggttcagaaagagactttgtctcaaaaagtaaggtggagagtgaactgaggaacgtgctagactatagtgagaattttgtttgtttgtttaaaacacacagaaatgttataagagtatgtttttattttaatcccaggtgtggaatatgggaatgcttaggattattcacagcagctgactgtgatttgcatcatgcaggggtgtgatttttgccagtagcagatagtttctgtgattgtgtgacacttggaattatgggaacttttcacagggtatatagatactagaaccctgagaggcagggtaggttgttggtagtgggttggttgctgttggtagtggtttgttaagtagtcgtgcacaaagaagaaacaagaagaaattagatatcctgacagtgaagatcaaacttgtcccaaggaactcaacacccctaatcagcaggaagtagtctacggataatgaatcctttttctctcttatctagtgttagggggttgaaagggtagaagaaagaagaacccacaaagtagccaaagtctgcctacatttggcatcattctgatggacacacaaacgcatcatgaatgcacacacacccacaaacacacacacacactgtgcctttgaagagcaactgaataaatacctccaaactgtcagtggtaatattagtatagaaaaatttaaaatagatatctttatgtttataatttgttatggccaaagtagaatggattctttattgggtttatctccttttgggtagagaatattagaagagaatactttaaaatgaaaagttgtagcatctaaccaagcactgaagtctgggcttccctgtggcagacacagtagatgggcaagccttgctttagcatttgaggcagatgaacagaaatgtaattgccatgctttagtggagcacagaggtctgtggtctcataatgcccttataagacctggctttagataagtgaatgaggacatacttagtgctcaaaaaggtcctctgatcaggggcagtgttttagggtgagctcctgtggtcatggtgcaatagaatacagaataagacaggtggctttggctttctaaggcagagacttgtggcctctgtgtcaggtagaagctggaggatctttggctacttctctgtgaagtgagaacaatacatacttgtaagctaaggttggagagttatacatgacaaccagctaaagtacatagtgtgccacacaacaagtgagttactgcatcaacactggctgcctgtgccattaaagtcattattgctaaaatctatgaagactcacaatgtgtgtgtgtgtgtgtgtgtgtgtgtgtgtgtgtaccaatttggacttcagatatttgaatttagagagatagccagaggcagctctctcattgctgggacgttgctgtggtcccctttgggaggagaatggggatgtgcaagggggaactccatgctggttcttcttttgctcctcttcatgctacttccccgcatctgagcaggtgcacgctgccccagaacagccttttaccttcctgttcttgcattctgtgtttcttttcttcaacttttcgtacttcccttttctcccccaaacccaaagagggtagatgactaaggaacaattctgtcttcttcgtggttgccttttttatttgaaactgaaagctattttcctaatgccagcacttggagtttgcctgagtacagctgtgtccaccctactatctcttttcttccttttaatgatgccttttctccagcaggagggtggttcgatgggtaaaggtgcttgctgccaagtctgaagacctgagttcaatccctgggatccacatggactcttgaaggttgtcctctgacatcagcatacacacaccacactaatcaaacaaattaataaaatgtgataagaatgtctattctcccaaagattgtttttagtaaatgtcaaaaatgacagtgacagtcatcagaacagagacaggatagagttcacttcaggtaactctgtcttgcacagaggcatggctcttcccagagcttttctgcactctggtaatgccttcctagactcagacatagatgttagtgtgagaaacattctctgtcttggcaccatttgctttttgatttctgcttcaacctccagcagctgttatgagaggaaaagacacacacaggtgtgaaggacacacagccggaccagggaggagtcacagctcagggttgccaccagaacaaagtgattaaaagcaaaaccaagctgacacccaggatacttgagtgcaaaacacccctcacctgccaaaatctaacccactccacctttgccaaaaatactggggtgcccctggttttactagaaattccatttgcatgtttataagcccattatctccaggcacacatacccatttgggtctagcagttcccaccccatctctctgcatacataagcagacgtacatacgcacacacatacgcatacattagcagacatgcacgctgctggtttgcactttcccataaaattactctttccctttttaattagggtgctttcagaggcacctccgcgttaaggctgtgttcgcttccattataaatacctgttgccagccaataattatcccctgatgaattactcactcagaaggagattttaaatgctcattttttttttttaataaacagggattccccttcattacttctggtgcctctgctctcaaacttcattaatcactttggcgttctgcatagtaagaaaaatgtccctctttgcttcagaagacgcagacgtggatctgcacgagtatggaacaaagatgatccacactagaggaggaaagctgtttgagaacttggacctcagtggtcaagagttgctgggctactcaggaaggtgcaatgtaaggatgcgggtggagacgatggaattgtctctgtgaacatttcatctggagttgcatatccatctcagtaacgaaagcactgatactcatccaataatatcatgggttgataattatacacctgtgggtttgtgatgctcttgaataggggagctgtcttgggacacacgggtcagctgtttctgtacgttcctattttatatttatgtagtgtgtgtacccacttaggaagtgaagtgtgatatttctcagtataaaatatgtaagagaggtttttaaggtcaagtggtgctctggcaagccttcctatgctaacatgttaattttaaggtcatgtgctgctctggcaaaagttccatgctaacatattagttctcctcgactcttgagcagcacagggtccccaggtaagctgtgtttgtcacgtagcctatgcctatgagggagcaaccctcctaaaggcatcttcacattgctttgctttaatactgactgagatacctacatttgcaaaagggaaaagaacaccaagacaccaaaattatagcagcttttattatttgtatgcttcattaaggcgggacagttgggtctatgttcagagccgggtctgatcactgtattgactgactgctgagttgtttggctgaactatgcagaccatttcgagggtggagtgttttggttttgtttcatttcgtggttgtttttaagacagggtttgcctcatagtctgtgccaaaactgaacttactttgaaccttgagctttcttgcctcagcctcccaaatgctgggattacaggcctggaaatgaggatctttactgagagctttgttgaggggagaaaaaaaatccatttctgtggggctacaaacctgaagaagaaataaattagagatggccccggtcttcaaatcgttttcaattagttgtgctggccaccctgattcatattgctcaggacgaggacttgaaaatacagacggccttgaaattaatcttagtgctgagaatggtggaagggccagcaccttatcaccattggagctgtggtgtgagtctgtgatgtccacagagcaagaacggctggggcttatttagatttgtattgtcacagagtcaaggacgtgctctgcagagtgcaagctctcaaaatggctttaaaataattccaagagttgacttacttgtttcaatttctcagttgcagtaggtcagcttgccctgtaccaatatgaaagtggaaagaggctggcactctgtgcctgcaggcccctgcactgagaagcacctccaaaaatgcttgtactattgtgccccatgcagtgaaactgaatacgtagtcaaaaccaagggattttgtcttagctctgtcattaattacttatttaaccttgggcaagacactttatcttcaattttttttttttttttttttttgtctgtgaatggtgatgataatggctggtctgtttatttcccacggctgctttgaggatcgcgagataatataccttaacgtgcttgggtaagtataaagcactttctaaatagaaggcattattaaaagaaatctcacttgtaattcctgcttccactaacatcgcctccaccatctcatagatggtgagatatgtaatgtaggtcagctcaggtctggtccctgctgagtctctacctcaggatgtatagtacctgactgactgacgctgcctgggattttccaagaggcagtctcacacctgttgcaaacttgcttcccttccaacacattcatttatcacacatgcacacactcacacatgcacacacgcacacgcacacacacacacacacaaacatatacatgggctcaatggcttctgcaggagagaaaaggcatgtgcttagctggctgtgatgggacgtttgtaatcccagcacttggtaggtagagggaggcaggaggatcaggagttcaaagtcattttctgtgatgtttacagctagcttgtctcagaagaaaaacccaacccaaacccgaataaagcaaaactaggtcaaatcacaacacgcccccccccaccatatattattgagcgcctctgtatacaaatgccctagaaaccaggacaaaataggtaaacgagatggtcacaactgtctgtaactgtgcgttccagaggagcccttgagcgttttatgagaggacagactggatggcaggcaagcactcgcttctgttcttacttttgaaggaaatcttatctgtgggttttaattaaatagggcctaactgcatattttaaggtttgagtacaatcaaagcctttggtagcccttgtttgtatttctgtactagtggagtgtgaatcgagacggggttctggaggcagagtgtgttttcagatgaaggtctgcgggatcccatttttctttgcaccagtgaagctatggctcaccaaggatctgcagctgctctgactggttgtaggactccccccagccccgacctccaggtgtccctgccaatctggcttagaagaaggacttgctctaatgaggaactatgttcttaggagaagagccatccccagtctagttacagtgctcagtctatctggggcttagctttgtaggcaggttggagacttccacctcttcaggctctggttcagggtttgagatgctaccacaagccactctggcagcaggaaaacagatgcagacagtgatattcaggcttcacccagggaagagaccagttgcaagagtgcaaggccacacttgtgaatcagccaggctacatccggctctttcaaaaggccataactgctgtaagtcccgaacacagtttccccttagagctatgctgatttcttgcctactttatctcctctatcgaaccacctttctcttccttttgctagcctttatctaggaatggtgtcttcctgccccaaggtattgaggccattgctgattccttgatgttactcttgctctctcctttgagcagttgctaatcccaaaagccacgcccacatgtccagcactcccacagctcctgtttaagttgctgtctccccagttcatggacaaactttgatcttcttgattatctgctttcacagaccctgccctgtccctgtggcagaagtaagcctctaaacgcaataagtccctgctcacctgattggctatttcttcatctgattgatcatttaattctctgacttttagtttacttatcggcctcttcctgaagctttcccttgatgatagttggtctggtgctgtgtatacaaatgctatattctgtaccctaagagctggttgccccccaacaagagaattctcacatacatcagcctttgcttgctccccaatttcaagttaattggttaataaaaggctacaacctgtgatgggcagacagagagggaaaggcaggacttgatgatctagtgagaggtttcaggagagaccaggggaaggagaaaggaaaagagggagggaggagaaggtcacctcgaggctggatgaatcttgagcacaacaaggagaaatggaccctgagaataacccaggcaagaacaaaatagcaagtgacaagggacatgtggctggaacataaattataatagttccaaacttgtccaatttaggtttacagcttgaaaataaaataccaggattttgtatcttttatactggctagctagaatatgtaattcactttacattccctgacgaattccaggctgaacctgtaacactcttgactggattataacgctttttatgagcaccttcttattctttcttttatttataatatttctgcattatttatctagtgcttactagaacacacacacagtgagtttaacactccaacaattcaacagaagtttcacatcatgtaatactttctattctttaatgtacacaggaacatgcacacgtgtacatacacacacacacacacacacacagatgtatctgcgggtatgcatacatatatgtgcatgtgtatagaagccagaagttaaagttgggtattattatctggactgccatctcttttgagacaaggtctctcattggtctagagttcatcaattatgttagattggttgccaacaagctccaagggccagctagtctctgcctccttaatacttggctttggctttttttttttttcttggtcaagattttgtatgtgtgtgtctgtctgtctgtctctgtgtatggtgggcattgtgcacatatatgtgggtgcctgtgaagccagaactattagatctcctggaactggagttatacgaggtcacgggccacttgacatgggtgctgggaaccaaactctggttctctggaagagcagacttagcttttaactgctaaaccattttccccacccctctgcctgttatggtaggggagagcaagctcgggttaaacccactggactgtttccccagccctgaaggttattgtctttaaagctgtcaccctgaggaacacagctacagccacttctggagctgtgcctcaggggtgagcacctttactctcttttgtatgcatgttggttgtgagaaatctgatctttgtaggtcaatttaaagtttgtatcggcaactcacgatttaccctcttacgtgagtagagattagactggtaacaccatgggtgaacaaatgaaagttaatgttattactcttctttaaacacatggcacaagcagaaattgcctagtgattttcactaactatactatttttaaatttaaatttggttttattttatgtgtatgggagctttgcctgcgtgtatctctgtccatcatgtgcatgcctggtgcctgtggagcccaggagagggaagtggatcccttggaactggagttgcggatagacgtgaagcaccatgtgggatgtgggtgctggggattgaacccaggttctctacaagaacagcaaccactgagctatctctctagtcctcaattatgctactttttgaaaagagcttctagggtcccaatgtgaccgtttgcagtaagtactagcttctctttcccaaggtaatgtatatgtgtatgtggtatattattatttgtgtttggtataaggtatatgtgtgtgacatatgctgtatgtgtgtgatatatggtatatatgtatgatatatgctgtatatgtgtatgtatatattcatgtgtgtggaggtcagaggacatcagatatcctgttctattactctctaacttattccctggttggggggggggggatctcttactgaacctggaactgggctacctgctaattagccccagagattcatttaactctactccctacagctgtttgaggcatgtgcatagtcaaacctggctttcactgtgagtgttggagatttgaactcaggtccccgtgcttgcacagcaagcactctttcccgctgatccatttcctcagactctatagtgcttattaaactgcagttttaatgttcacacccatttgcacttgctgaacggtattctgcattctaggtcaccatctactaattgataggcactagtgatgaaggccatgatcctgggccataaagacttccccgtgtagtcaagacagaaatacaaacagtcctgtgttacttatgcaattcctcgtagttgccaatttcgttctacaaatgcatttattcctaagacagatcacaccctccactctcccactttggaaattgttagtgtaatagctttatcttttaaaaactatgcacacaaacgtccatacaatgttcagtgttgtttggaaacatttatatgtaaatggcattcttagagtctcgctctgcgattcgtgttttcatcatcattttggttttacggctgacgtatatgaagatggtattttcaattgtattgcacttataattatgcattattcatctagtccctaagggtggggcatttaggttactcttcactcgcagctattaataggttataaagagtattcctggttcttctttctattttctacacctttgactagagtttcaagctcctgctgtctcttgaaagcctcccctaaattcttctagaccctagagcggacgattccagtgtcccaagcaccttgctacacgaagttcactaaaagaaccaaggatgggtgggtggatggacggatgaatgaacgaaatgcccagagcatcttaaggaatgtcctcttaagagtactttggcgcctttgccctctgccttccgttgacagtctcgtttttgctctccctcattcctctaaccagccaagaagtgtgtgggtgggtgtgtggggcatgaggtctgcctctctctacaagttcaggacccgggtaaaccctagtgtttgatgttgggcgcttcagccgcccccctttccgagctcatgggcgggctcggcggtcgagcgggcggagtacggggtgctgctcactcagatccctccgcgcgcagaggaccggcgcttctttctgcgggaaacccctgggcgcgcggcggcgacgggggcggagcctcgcggtgggaggaggccgaggcggaaggacacgcgggccgcccagccgcgcggcgcagccagaaactttcagccaaacttcgggcggcggcctggctgcgcggagtgcaggggcggcgcagcgggagctccaggactcagcgagccgcgggggcagggtagagcacgcgagagccgggctcctggtcgggacccgctccccatgcggatctgctctggctgcggccccgaagatgcccgctctgcgtcccgccgcgctgcgggcgctgctgtggctctggctgtgcggcgcgggccccgcgcacggtgagtaccgggcgcccgggagaccatccctctctgtctctgcgctacggggactgcgtcttccaaactgcctcgtccgggcctcgagtcttggcaacgcgtagcgtcccgggttccgcgttagcggggtctcgggcgagcagctcgcgggccgaggtgcgagtgtggtcgggagggcggcgggggcttgcggcgttcccagcttttgacacccggatcggtcggtttgtccggaggaggagttgggcgtggggcttaggtcttggataggtggaggcagcagtgggggaactggtgtggcagcgtgctgagccacatgattgaaaatctcaactgctgttattctttccgaggcgcggagctctgctgcggttccagtgtgcgtccagccccaggaatgtggtgtgacgatccccaactcctccaacctggcagcagcttgctgctcttttggcaccgttgggggtggggcaggggcaggcgaggaaaagtggagacgttgcttgatccgaagtgcttgcttagaaaggcttgttatggtgggatattccgtgccccctcgctaacttggtgggagccaggaaaggaaatcggatcatattttacccactccacccacatctttagattttacatttctttggaatgttgtatggaaagaacttcggctttggagtccagctctgtaatcctggattcaaatcttctgtattaactcaccaataaaatggggatgaaattacccagctaataggattaattaaaagaatgtatattaaacccgtagcacttaaaagatgttcagaaaagttgtttcagggcaggagcagcggtttggtctgtgcttccaatggggctatgtcttgtactggtttgaagtctgtgcttccagtggggctatgtcttgtactggttcgaagtctgtgcttccagtggggctatgtcttgtactggtttgaagtctgtgcttccagtggggctatgtcttgtactggtttgaagtctgtgcttccagtggggctatgtcttgtactggtttgttgaactggtagggtccccctttactcaagaacaattaacttttaccagaaaaactctagtacatttcctcagagaagggatgagtttcagaaaagtatggtctttgttcattgtaacaggcagctgacatgccaatcgcagatgctttgaggaagactcgattatttatcacctgcaaacagtgctgggctgtccagcatcaaccagatactttctggaaaattagaatgtcatacattgctgggtctgtaggttttcagaagtggaccaggattgaattcaggattgaatggttcccgaaagttttcctcaaaactcaacgatggcattcttgccttgccccttttctttgagtgaagctgttagccctcagtgtagacttagtgtaaagagctgtatgattagtgtggttttttttctgaggatgaaagtgcttggtcccccacgacttgttttacatagtaaagtaactttagtcttcatgacctgtgtcttttcccatatggaataggattcaaagcctaactatttttctcttgagtacttcggggactagtacgtaaagtgactcacaagtgctaacgctggcaacagagatgggatgaggctggcacacgggctttctcccatgttgaaccccagtgcgctgaactgatgcccccacttctgctaatgcaggccctcgctgtcaccgatatcggttggggcgtcacactgagtgtcagtccagctcaaatgtaggcattttgggttttggacaggtgttctttagatgctaaactattctcatgaaagagattaaagagctagttgttgttgcaaatcttaaatcttcccagggtctagcagggaagcttcctaatctattatggtgtatttgccaaggtaccaattataactctccctccctaagttttgagtgttcccgtgtttggctcgtggccagttgttaatttgaacatcactggttcctaaggcaaggagctgtcaacccatctgtgtgagcttctgaacaattctctggaccaccccttactccccttacttctggcttgcttttggctctgcggtgggagtgactccctggttttgctgtcacctagacactttctcagttgaatccctactataaaaagaacaagttttttttttttttcctttagggtggagataaaattcaccctataactatttcccgtttttctttcttggagggaggggggagtggttggttgcagaatctcttgttttatggtgtttggcatctcttttctgcctcctctgtggatttgtgttgcccagaagggcagccttggctcacctggcctgtcactgatttcaggacctttaaagaatgtttaagcgcagtgggatatgcttggatgcttgagagaaaccttataatacattttaaaaatatcacacccacagaaattttattttgcccacagaatttgcattgatgtagttcccactcttccattcctggtgaccctcctccctgccccttccatgtcctggctgcagcagacctccactcagcaccctggtgtcctgacacaggaggcctgagaatctgtattattattttttttaaataaggcttacaaaagattttgacaaattgaccgagtgggacaatcacagattaattctgccttcaagaggtgtatgagatcttgccttttagattttaatagtttccacagtgaacccagctttaaccagccattccagcagttaacccttttgactcttaaagaattcagaaattgctaacatgaaagctgtagactgtgattggatccttcttgtgcacaactgcttctaaaaaggcttcatgtgtgagtgatacctctaccccctctgccacggattcttcttcaaatgttatatatacatataaattttggattctttataaacttttccaggtgtgtgtgtgtgtgtgattgtgtgtgtgtgtgtgtgtgtgtgtgccctctaaggcatgatctggataggaatgcattcttgtgctgtatttacagactgtatctgttttctttcttgatgtctgtccggatgtctcactgatctgtcccctccactcctgaactttctggatcctcctgctcctgtcttctcttgctttccaaacacaccttgaaaacaagaatgtcccccgtctggcactttccctctgcaccggtccactgtatatgtagtaattgggacaagccactaagccgggagccagaaaaccagaaatctcctccagctctgttattaattgatttggtgaccttgcaggggagcccatggtttggtagttcacattctcatggactttgtcaccaatcacagggctggttgcagagttgggactagaatttctttgtttaaggcctcaggtccagggccttgtgtatcgtccatactgcttctgtcttgtgtacagatggatttgtgtacacagaaacacatccttgagtgcttactgttagtgtatgctacagggaaagaattgtgcctctgcttgtctgtgttctggtacccacatttctaccctgtacttggcatggttccttggcatctcattggcatcctgtgaagacgtgttcatttgagccagtacctttcagtcctttttcattgtaggccacagtggtcctgctggatgcctattaagtggtgtttgcaatgaggctctggtgtcttctcttccctgacctctcctgctccatgtggtggtcacaggttaacactcactgcacttttgttcaccttttctatagaaggctttcatttggggcacagcttgggatcatttctggaatagtatatttttctttggggtcagctttgttttgctatttttgagccttttcatcttaaacttgatactgcaatcctgtgccagacaaccacatgtgattggcctctgacacacagatcctgctccttgagagaggtgctctgcctcacacacacagcccttttctgtcctacggatgttcacggcatgtgtccagtgtgcagaggcacctgagcggaacgccttggttgagcacctgtggcttgctcagtgtgcctacagacttatactgcctggcgccttttgagacagggctttggaaccttggtcctcctgtgtcagcctctcgagtgctcgtgttcagtgtgcaccatcatgtctcacctggctttgtgctaacccatcccctgtttttacctaagaggtgggtcagggttacctctttgttgtatgtgctgatggggactttaaagccctctggtgcttctctctgcccatgctagatctgatctctacctggcaaggggcagtgtacctgtgtttcctatcaagaggcagtctttgacctctagttcttatatgcaccaagtttctctcctcttgtttctattcattggtatcatctctggattttgtcctcagagtcctgagctttgtgtgggtgacagaagtaaaaaagagcaggctatgtacccttcactgaagtgacacccacttgtccataaaaggagtggaacttgtgaagaacgttatgttcttctgtctgggaaggctgttcaggtgaaccaccttagccctacgtcttcatacctccctgtccagataggtccatgaagaaggaaagagtttgtccagcagcttccctggctcctcttacgaaaagaacacatgattgtcctgggtagtgtgactcagtggatctcaagttgtgtctgggaatttgtacgttctagttaggggtggggatggctcagtgtgtagagtacctgttacaagcaagaacacctgggtttggatctccagcacccacataataagcagctgtggtggtgtttatttgtaattccatagctgggggcagagacaggatgatcctggggctgtaccagccagtcactccagatgaaacaataaactgtatcctttcccaaaaagcaaggcagatggtgctggagagatggatcagggattgtgagtgcttgctgatcttccaaggtcacaagtttgattcccagcacctgtatcaggtgcctcataactgcctgtaactccagtttggggggggtgtctgatgcccatttctggcttccatgggcactgacacacacatgacttacactcacacaagcatatacataaacatagctgtatgcaatacagtgatagcttgaaaaggaggccatcacttgctctgctggcactgcaaggctagtaatgttgccttgtgcttttaaagagccggtctgtgaagtctatattttaggactgacagaggtatagcgtgtgtctttaaaggcagtctccctccctccatcagtgtcactcggatagatcccggaatgcacggatttcacacgaagtgctgtctttagcccgggtgattgacgcttcctcggaggatatctgttttgttaacctgtgactgcctctctgctggcagcttttcccttgagtacaggagcacggagagagaggaagacaacttatttcagcctgtcctgattttttgagagagggtcttactactttgtagccagaattggctggaacttactgtgttcgaggctggccttgaacttagagtgatctgtaggccttagcttccttcttatttcgattagaggaacaagccatcattgggtggcagtactgacttgggttgggatattctcacgtggtgcatgaggggaagggagaatgatgagcgtgccaaaggccccctacatggcacgtttagcaagaagggcccagggtcgccctgttaccatggcacttcatgttaccgcctctgatggaaagaaagaagtggcttcagaagttgttggctgtcctttgggcttcggcgggtcagactgcacagtgttccctggcagcagcaggaggtttgccgcccctttttgaagggattcttacctgtttgcctttaacactgtggccttcaaaagcgtgaaacagagaaagagggctcttgggagctggagtgagcaaagcaatgatcgcattcattttttattgttacttttggtcagtgtgttcaagaattcagggtcactgctcaattgcctgcaggactctcagggactgggctccagggcattagaagagggacccaggccctcaatgcctggcttgaagaccaaagtgccagctcagccatcaaattggcctgcagttcaaggggtccaggcacatttgcgtagaatcctctgaagactgtgggctcttagagtgatgctatgttaaggccttgggtgtgtcgtcaggcttaattgtttcccttggcatcttggggcaggcagtgcagggaaatatagtctccaggtatgtgggaattgtacccagagtggaagttaggctcctgcccccaggactgatagcatcactgagatgaggcagagaggtacacggtgtgtagtttgaaagccacctagccatttattgaactctctgaaagcagtttcctgcagtctgggtaactaagagcagtggggttcctggggagtacccaggagagaagagcagccccagctccccccacccaggggggcttgtctgctattttgcacagtccgctattttcttttctctgttgtaacataggaaaagaataatcaacttgccttggtgagaagaagacaaagacccccgtctggtggcgggtgtgagtataacattggcagaggttgtggtggctattagtggctctgtggtgagagagcactgtgtcctcagccctgcatggcaggcttgctacaggacatatcagggtggaaactgtcttcctgggaagatcccagttctcagcggcagtggctgaaagacctcctcatcacaggcatggggtgtgtgtggtgtggacacacccagagtcgctgctgctggtggcattgattaatcaacgctgacatagccctcaccctgctttacttgtcttggcaaaaccctgttctgccagctcctcagtacttatgtggtaccaggagagatggagcaaggtcctggtggttgcgggggcggtcactccactgtcctccctctgctgtctggaactgttggctgtcaccttggttgaccagatgacttttctgccaggtgtggaggacctgggtcccatcttccagtggactgaagcccagttccctggaggcctgccagcggagatctctagtctccaagtcagttccttctacagattgctggcaactgaatagtaattctgggttctttgaatatatcagaccaacatcatgccagagtggactcattgccacacaaagactggttgggtgtgtggtgttgcagaacctgtttctggggtaagagtgactctcccactcacagacatgtttattcatatgaagaaagtatgtgtgttttgtgaggccagaaaaacacgatgagaatattttgattggagtcagatattgtctccttaataatacgtcttcatttaacaaatagcaccccctttaaatgcagccttgcttgccaggtaaggtgttgaagacacagctgtggttgtattctaaagtatatgtcctttttcagaggcaggtgtacttttaaatggtgtggtttgcttccttttcattttgtgttctcctccctgccctccctcccctccctccctttgagaagattctgcatcgggtgtaggtcacaagcgttacctagcaggagagagaaatcttgtctgttgggctcacgaggtgtcccagtaagaataaccgaatgctgtctacttaggtggtgcctgagttaactcctgcagagagaaggtggaaaggtgctgggagccttgtgtgtttctgggctctcggagccttgcctttggaagctattcagtctcattgaggttccaggacaagctatcttgcttattcattttgtatgtttttctttgaagtgtacatggctgttcatttgctgactcttcttttaagtggcacacatttacctttagatagtaaattttttttttgcaacatttaagacacttccaaatctttatgaggatttaaaggcaaaagctcaaatggtgtgcctagtgcaaggtttgtcattacgtcagcaacggctgggtggggtgtgcttacctaattcaagaatgctggaaactgagacaggaggattgctgtaaggacaagcagctaggctatcttggaagaccccctgtcctcccaaataaggcaagcaaccacttacagtccttgctccacattgcctagccattaaggaaaatggttgtaactaaaaacaaacattgtaacagtttcgcttaggtaggtttacatagcaacagaattattccttatgtttacacataattaacttgtatttatactgtgttgattttccctggcacctttacaagattttgtgtgtatatgtgcttttaaaagcagtcacatttggaattctttaggtatgtgtgagcaatcagaataatatcaccacacctctgttagtgttttggtattcatgtatgtattttgttatatcttttttcacccttagattttaaaagctcctatacatttgaaagtcacacaggcagttttctgtttaaaatgttttcatacatttgattctagtaattaaataatactaaggaatggactcatatgttttgacctctttcttttgactgcaaatttggttggatccaactcccccccccctgcccccccgccctgtcccatgtacagataagaatcagctgcccaccagaggaagcgttgctctttggtattccagcgatttctaaacctaagagagtggcatctaaaaaaaaaaaaaaaaaaaaaaatcagagacaattaacatctccaataatcacatcgtttataagccaaacttgtggttaacattttgattgatactttacagtatttttccatgctcagtgtctattataaaactttaattgggattttaacagacatatagttttccactaaaaataatatgaacatttcctccatatatgttagtagcctttaagaatatgacttcaaaggcaacatactacactatcttaagggactactagccttcatttttgtggaaatccatccttagtttccaggtgtcataaatataaagaattctgtaatgtatattgttgctgggactggctcggttaagagcactggctgcttttccagattcccagcacccatctctggctgctcgcaaccatctgtagctctagttctaagggcttcataccttctgaccactgtgggccccacacacacatgctgtgcagacatgcacggagacacagcacccatactcataaaataaaaacacatctttaaaaaaacaaatcccttactttctaccaaaatccagaagcttttcagccaaatggttgcattactttttatagagtttgacccagtcatacttttcattagcagaatatgaggctgccagcgctgccagccaccgacagccctgggattcatttaaataactcttgttattacctggcaaatggtgaatcctacctcatctcttgttgccttttattagagcagtatagaaaaaaagatctctgtggattcattcgtctaacgcctcttcttcctttctatctcttttactcaactgagtcttttacccgtgaattttttaatatatctgaactttagctattaaaggcattggtacttcacctgcttaaaacatatcacagtatgcctgtcagtttacagtacatacaggctggggctgggatggagtacatgtatgacatgcatgacgccctgggttcaatgtccagcaccaaaagcagtcagccacacgaaaccctctcactctgtctgtctctgcctcgctcagtcgaacataaagaccccaaataagcaaactagaataccatacacaataccaagtttagtataagaaatgtcctttgataaggtaatagtttttcatcttttgaattctgagttttcgagacagggtctgcagccctggctggcctagaactcagagatctgcctgggctctgctgggattcagggtggatgccctcataccttgtccttggccatttaaaaaatacatatattaagtagtattttctatagctactttaaattccatttttggatgtagttgtttagttctgattttttgagagtctcatgtagcccaggctggcctcgaactcagtacaaagtggaggctagtgttgaactcttgatcttcctgccttcatgtccctagaggggattataagtatggattgccattgcctggcttggtgctctcaaatttggatctgactttaccacacaacagctgcttgtaagttatatgcatcaaggaaccgtacgtttactatatactgggtttaagaagagaccttgggggcaaatggtatgtggttccactactgtcctgtttttcggagggtgcagaaatgtgtggagcacataacactctgaaagacaaaaccagcatcctgtcctctccactcactgggacctaactggtgagcctggacagtggtcagggcagtcagttcaggcagacaactgggtgactgagactcccttctctctaccctcaccaaattgattcgttgtgggatggagtggcctgaagcaacctgttgttttggcaccctgtggacaccacctgtttcttccctttctcactccagcctcccacttgccggtgcagggcgagtgcacagcggagcacagcggggaagcgatcggtgttgttgccgaggaatgttgcaataaagaggaatagattgagttttgcaagcttgtgtgttcctaagacgccccactgcttttgacatggagtgctccggctgaacggctctgtgctgaagccttgccggccccaagcgtttgctgcagagcaatttcaggctgtatgaatgcttaagtatcattggaatttactgggctggttgtttgccagcaattaccatatttagcatgaggagacctggggaatgaggacatttctgaccaaccaaagaaggaaactctgaaggactgcaactccttcctctctttctttctttctttctttctttctttctttctttctttctttctttctttctttctttttcttcttttaatgaggtggttaggagaacaccagccaagctaggactctaatttgtgacaactggtctttgtttttgtgccccttccacataattaatttatggacgggcaaagagatttgatagtggagttctttctcaccctgacgtacaattctgccttcgggaggaagcagggaattactaggcctgcttccctgctgcctggctcagcctgcaggtgagactgtggatctatggctagtttccactcttctcacttaagatgtgctagttttcggctttgtcctggcctgaatttattttggcctagcccttgtctccaccctgtgtttggagacatcggccttcgtgctgtggcttaacattcctctgcctcagtttttccagtactggaataaccagccaatataattaacataaacattgtttttataaagtaagacaacctccaacatcagtacagccctgtgtagttcaaagagcatctcacaggagttgctcctttaatcccttcaaacctttgctggagcccagcaccaagaggtcaggtggctttgcactgcgtcctgttgcttcttcctagatggtcgttggtcgtcgagggcagggcaggcacttaaacgcacattttgattgttttcttttctttctctctctctcttttttaaatgttcatttccttcccaaaaaggtctgctgcgcttttactctgtaagcatcatccgtccagggctgtgtcgtgtgtggttcctcattgcgctcacatgaccgtcctttggggtaaacagtagtcactggcgctgtagctcgagttcggagattagaaagttaagtcagaggggcatcaggctgcatccagagccctaccagggcctcacagctgctgcccactccatgacttccctggaacacagggcgggatgtggagactgaggctgcagttagtcgttggcttagtttaggttcataaataggcttgatcccaatgttcttctgggttcaaagacactgcgcacacactttatgataggaataactaaacattaaatcccagagtcttctgttttgaagagccagcctcttaggaagcctttgtaagcctcagtaaggctgggatggctgtgtcagctgacaggtgcagctgtggctctggcctccccttagctgctccactgccaggacaggcaaaaagaattcagggagattggcaggagttcccgttaggtcaacatgggtctctcagctctgagctctctcaggaggactgctcttaggcgcaccagtctctggctgtcctcgggacattccagtgtgtgtccagcctttgtgaggaagttgtcagctttgtggggagaaggtggaggcaccaacaagtttggttcccagcttaccagctttttttcttaggacagatttctttgtgccttccttttgccgtctgtgtaacgaggagagtagtagtgtgtgatctgggggcttgttgtgaatgttaactggtctgtgtgagattcacaggacagtgtctggagtgcagtgagtgtggtaaggactcggcactgatgttcctttaggtcacagtgtggacagcctgttcattcccgcagaatggaatgcttcatccatcttccggaatctagtgtgagtgagtgactgcagtcctccgtgaagaaccagggacttttcagcttcctggtcaggggctgtaccctgctttcttctgacttggggagtgttgaagtctgttcccttcatggggtggaagtccaacttggacaagttttgggttctgctgggaaggtggtaagattttgcttttactttttaaccaggtgtgtggttatatgttatgtcaggccacactgaaggtgttgatcttagagtagttttagattcaaaactcattatttttttaacttgagttttcaagttttatttgtatgtgtctctgtgtgtggatgttttcagaggtcagaagaagatgtctggtccccttggagttacaggtggctatgcacctgaagtgcatgctggaaactgaacttgcttcttcaggaagagcagtcttatgcactgagccatctctctagctccaaggttcatacttactctagactttctgtgatatgacagatgttcttgtctgccattctgtaccatggtgagggatattaataaggctaggatactcaattcattatctctgttagacattgcaaaataataccaatgtgcgacacctctcactacacttgcagaggcaattggaggttctcaggctgggagctatcctcctacttcatacccactttaaagatggagaaactgaagcctgtagaaacagagtgtctgccaaagggataggcgccaggccagggccagggccagggccaggatttatgctcctgatttctggtcaggtggttttttgttttgttgttgttgttgtttctctctgtgcttgctcctcagaagtgtgtcagtgtgttgactatctgggttttgaggtctgagggttgctttcagagccaacagcagtgacgaagtaggaaggatgtggggagggcagaggtgtagccatcttgaagctgtctctgaagtaaagatcttgtttcctggggactcaggcttgtccctttggacttctttgtcatagtgagggtaaccagtgggcctgatgtgactgatgattcagagttggctcatccaggactgggaagctgctgtgtcagatggacgttaacatttgtttcccgtggcagcttgcttatctcaagtcttggcagccttggacaaatggttgttagggttcttttgttttgttttgttttaagacaagatttcagattctactttgcagattttgtgagccaccttctacctaccactcccttctgctccctctgtaattatttttaagactttgttttttcattgtgggaatatgaaaggtttcttttatagtctaaagatatttataattattggtaagcacacaattgacagaaaatgttgtgtattcattttaacttaagatatccctaaaacacttaaactatgttccctataatttggatcttcctacaaaagcagtttaagctactttctgagaagactgtactaaggggaggactatctggatataacctagatatgtatgaagacactctggagaaactgcagtgcctgtgtgaaaggtgacctaggacatgtccccttgctcataaagtaaaccagacagacacctccgttctcatggagcttatgtggtttccagtcatttgcatgttctgagggcttaagtccttagagtaagcattatgattcctggtcacagaaaggccagggagtggccatgcatgtgactgtcctagccagtggatcagagcagcggctgagcactggcttgacacgaaagctgacccccaaccatagggcagtctggaggaatcctgtgtcccattgatgacttagctttgagtttaatcatttatgtactgaattgacacttggttcttagcagtatcttcactccgaataaatacctgcatagtgttatggaaattattaaaatttccacttctacttagaagaattctagttccttctgatttttttttaactaggaaggatgtatttatattgatagtaatgccaaagagttgtttactggtctcgtctgtgttttctcttgaccctctcaaagaaactcttcagtagattgggaccaggaatgaatagtatagcttttatatttttattttttataataagaaaaagtttagaaagattggaaatggtagctcggagtcctatttgtgttcagaaatgttttctggcaggctttttggttacaattagctttctctggactgtgcagttgtcttcttactgtgtccttcaaaaagagatgtgtaaaacagattggaatgcttcagtctctcaacactggacacagcctgctactaaaactacccagtactaacctgtcctcaccagaaaccaaaactacccagtttcaacctgccctgcctcaatgttagttaaaactacccattctaacctgtcctgaccaggaagtttgaactgtgtatggcattctgcacctgtcgctcgctccgggccaagaacgaagaggccttgccttttccatgagcattcctcagtgtcgtctcctctggcactgagaactagcagtcatttgcactgctgtttgtgagaagagggaaccccagagcaccctttctgctttgcagcgcaggcttgtcctgggcacacaattgtgcatgtgagtcttctcagcacacccggtttctgccaaggacttgctgtgctccccaccagttgaacagtgacggggggtgggggggggagcagcgtaaagactgcggcagtcagcactggtcatttctcagcagccagcaggatgcttannnnnnnnnnnnnnnnnnnnggtttggaacatggatagacttggctttggttcttatcagctgggaatatcagagaagccattgaagtctttaggtcccaggcccctcatttgtgtagtgggagtaatagtaataactaacttatggagtgctcttaaagactagagacatttaattatgcctgtgtggctgtgggcacaaaggtagggggtcccagaactttaagtgtcattaggcttatggtaattctacattccctgggcctgtttgtttcagtgactcccgtttcgctctgctctgctaccaaggcaagattctggattacccagaatgcaggccgaaagctttaccaagagtctgctactcttgtttgcagtggttttgttcatagcatgcagcctcttgctcctctcacctcagaagccatcgattcatagaaaaatactgttcaggatttcagagtaaagctgcagaactctgccagtgccaagctacgtggttggattatttctgtcgttaacccccaagtccatggtgtcaggtgccaggggctgtttccagcactgggcctcacacagacatgtgatgggacttccactgaaacttgtgccagagaaggctggaggtgggttggggattggggtcgggtagggggtgggtgcctgctcctgcctctgactcctgagtgtggctgagacagcagtggaaccgtggggaagctgctttcagaagtggttgatgctacatcacctaatgatgtacatgtttgtgccctgtgggctggggaaggggctttcctgacataaatcttgttgccatttatcatttctggcctaagttgggggaggactttttttgcttcatagaactttagactgggaattttgttttaatgaaacacttatattaaataatgtttctcagtttatattcaaccctatcttatttgagcctcaaatcaactcaaccatagatgagaataatgaatatttagtaacttcagggaattcttctaaatcatgtagttagtgtctgacagagccaggcctgggacccacattcttacatgtctgccagctcgcctttatataccacatgcttccttcagagcacccctcatctggattctgttccccatggcctggagcacttttctcctgtctgactatctctgttggctagacttcaagggtgccttccccaaagctgggctgtccaggtgtggctctagtcacctgtccctgtcccacctaagcaggatggatccaaggagaagctggcagaaagtgtcactgacacagctcagccgccacagggggcctgtgcctgctcactcagcatcacactcttccctgcttgtttattacccagtcttcatatgttaagcttgctttctttccatgttgccagagcaactgctccttaaagttccccaagcgtaccctggacgtgcttgtgttcaccagcagctccagcactcagcaggctgaggaagaaccatctccgttagttcaaggccagcctggactatatagtaacttccaagtcagcctgggctaaacaaagcgagaccctgtctcaaacccaaaacaaaggctgacaaactgagctgactcagaagataaaggtgctgctaagcctggcagcccgaggttgtttgatctctggaactcaagaggtttaaaaaaaaaaaaaatcaatttctgaaggttgccctttgacctctgcatgtatgctgctgcacatgcatcatgggtacacacacacacacacactccacctgcctcccaaagttacctaaggtttgtctagagtacacagcagtgaggagccactccttagtgtaattttaagctctggctggcaatgcttccttccttaatcattataacagtaaatagaacccgtgctgcgcatgcacacgggtgtgtccgcagtgcactgtcacttacacaagtgcacttcaggtttcttcttttcatcaaaatgaggaaatagaacatgttttgttaatggtgattttacaaggaagtgtgagttcaggttctgtgggcgtgctaagagatagagtttaggggaggaaaggctgctgctggatgttagctgcgagatgttcaggagagaggaaacccacgcactcatgctgtgcactccagatgtgccgctcaggcctgaggtaatggtgatctgaaagcccttgcctacatccatgctgtatggaccatttattcaagaaaaccctcttaaaatgtgctattggtcacaggtgtgaggggctaattaaaagtttgatatgtgagctctcagaaaacaccaaaggaccatcattttgactcctgcagctgtccaggtgggtgcttgtcttggcccgtggtcattggagcacgtccgtgaaggctgctgcacctagctgtaccaggatggcgctgcactctgctctctaggaaggtggcagctgaatctctggtgctgtaatccctagaactccgagacagcagggttgctccccagcaaagacggcgtttcaacattcatgtaatcttctcataggaagctgggggactctagatgtggttgcacacaaccctagtacttgcgaggctgaggcaggaagattgttagttcaaggccacctagactatgtagcaggatgagagagggagagagagagggagagggagagagagagaatatgaatgtgtgtatgtgtctgtgagagatgtagggggaacataaattagtacctttgttatatctcaagcaggggtgaagttttaaatctgaaaatttggatatctgaattagaaattgggcatccctaataggttaagttggtgtgtgagtgtgtgagtgtgtgtgtgtgtgtgtgtgtatggaggaacaatagactttggaacttttttttttcagaaaggatatttatctctgtatctcttctcagttggcagagaatagctatctagagcactgctcaggcctcctgaaagatagatttagggaagttgtagctcgcttaataaccatctgtggagtgacatagattgacacacccaattacacaagcctggagtctgagaactggtgatgtgcaatcatctcatccgcatctgctggtcattatcaacagcgataatggctcagctatttcttcagggccatgaaaaaagacagggtagctctatcaaaggttaagtcagctctgaagagaatagcctttcccaccctcttcttcccaaacttctctttaaacattctcttttgagaggttttgaaagaattcattttgtttcttgtttttcaaatatatgtatatatatgaaatatatatatatgtatctatatgactatatatgaaaaacaagaaacaaaatgaatacatacatacatacatagacatgtgcatatacatatgctgctccttctgaaaacagaaaagatcaaagtattgtaggccattttctcaaattgaatttctttgtcatgtgcaagcttttggtgacatcacagtgctttatttgtgtgaaggtattcattctttctagtttatggttttgtcacatctgctattaagtcacctgtgggcaattttctaatgcaatgcatttgggtcaccatgagtaggagggaaggagtcagtttacagggatgatttgcatgtgagaacataagctgtactagtctgtccacactcacaggggcatcggtaccttttacagagactgggcagtgtgtctgcagatactgaggcaggcatccgtgcgatctcaggccagcttgctctgtgggtaccagggtgagttagggacaacaaagccagctcccctgcctgttcctctttgtagagctggaatgttagttggcaaaagtgtgggctcttcttttaggagatgtactgttggctctgggagagtgtgctaggattcacgtcctctgtgggaagaggacacactgttgccttatcgtaaaagtcatcttactgtccctgaaccatgcatggttctgtggctatctaatggcactgcagggcttctggctaggatgggaaataggcagtgtcatggaaaatactgagcttctccacagctttctgtgagaggaagtcccatgtggtagatgatctctgattttgccaactgtagctttggtgttttaaagtttatgtgccttgtttttggaatgtgtctctctctacaacacaaatgcttaatgaggtctcattgttttgacaaatggtcagacacaagggggtcagagcagtgctgttatagctgggactaagagtgttatgtaggcagtggtgatgggcttgtttgctgtttgagaactgctgtagaatatgaggaagcaccccgagtcgagtttccagaagtccaggtaatgacaatgtgagcccagggtatgtgctagataaaaagaccaaaaaaagcaaaactctttggagccatccatttcattcattcattcatatatgcatgcatgactagactcattcaacaaatatttaagtgcccaccaggtgccaggaactgaattgctgggggtttttgaagaaaatgctaaaacctccatttgtggggctgcagtgagcataggccagcactgacttgttcctgatggttagtgatgtgtacaggtaagcctgcccttttctcttgggcttttgtttggaatccctgcactttgttacagtggcctccctgctagatacagggtagctgatgatgcatttaatccttagaaaaacctcagtgacttaatcaggatgtaaaagatgatgaactttgaagaggtcataacttggggctgaagaggtggctcagcagttaagagatcactggctgctcttcctgaggtgctgggttcaattcccagcacccattgtcagcttacaactggctataactccagttctaggggatctgatacccttttctgacctccttgggtattgcttacttgtggtacatagatatatatgcagattaaaaaagacactgataaacagaatatatatatgtgtgtgtgtgtgtgtgtgtgtgtgtgtgtgtaaccagtttgctatgtatcaaacagcacattgtaggaaaagagtggactcaagagaaggtaccacagtcataagtgttgtttggggtgtgtatgtgtatatgtggtataaagtatatttttaccctaggttattataaaatgtcagcaagatacagcttccttagctgtggacccacagattggtgttagcagattgtgacatttaggccttagaaaaactaagtttccaagagcacggagatagtagccacacaacacccagtcacctgctcccttgatagtgctgaggatgcctgggaatcaaatcttatcttctgcgtggtgctgtggatgctttagagatgttgacagaacctgaaaagggaagctgaccctcacctgctgagtaggtgaaaattcggccatggagtcccactgtttgcagataaagacagaacatgtctccagggaattctggcatggatgatggaatgagcgtgatagccttagtgatcagcacaggctgcgtgtgatgtttctgtgttagctcatgtaattgctaattactttggcagaggggccgtagctgttgggagtgagaagggcgcctatcagcaagcccacatttctgtacgctgccttcagttccttcttttgtttctgctgaggtcggagctgttttcctcagagcctggctcacctggcatgcactccctcatttttcttttgctgcactatatattgcttgcttcattagccgggtgacagtgggtcctgtagagatgctagtgagtgagcccagttcatctctacgttttcctggcctgtcatattctctgaagggcgtgcatatcctaccgtgtggagtgttggggtgaaaactttaaaacagtataccccaagaaaaacattcttttgagcctgcctgccagtgtgtgcacagtcttaggaaggcttaattttagaccattctaacgtttcctccagcttcccagtggagggtcttgcacctccccccatacccttccaggatacacatacttcattttgcagaccactgatccagaaggtaaattgaagagtttaatgccaaagctgttggctctttcgttaactagattatcttttactcccagtgttcctaatgcccttctgcaaagtagcttttgtgaatgactgcatgaattgagaggctacatttttgaggtggaaaagatgaggatagagcatgcacgtgaattaagttgaatctgttgttgccagaatactgtttttgattttggaaaaggagaaccaacagctctccctgtaacagtctgggttggtgtttggtgtgattaagtctctccttcatatcgtggtgactagcctggctcatgatccagagttagagcttggtaaatgtttattgaaaaaaaaaatcagcctacttgagagtaagctagaagtgacagagtaataaaatgggtgatacatcatctgagggccctactgaaggctgctagcatcgtgcaacggttgtagattctccgtcggcctttctgtgggcccaaagtggagcagggcataagaaaaatagacattagaggaaaaacttgcatttcagcgtttggaagctcagcaatgtggggattatcagaggccgtgggacaccgagcagaagcaacaaaagattattttggtattggaagaattttcatttttgtgatagagcaggttaccatttgagatataaaaagcagaatggaactggctggctgtaaggtagaagcagacagactcacagacatgggtgcagtgtacgtagacgttttgggcatttcttcaaccatagacatgccagtctgttcagtgttagggctgtttagcttattaatgtcactggaaaaacgagttagactgtgtgctgaggaggcccagtgagcagtgtcctagcctgggacagcgcatgagcgaggtcttcccagtgctgtggttttcctccagctgagtaaagacagctgctcctcagactggggcttggctgcacaataagaaggcaccctttgcgattcttcttggttgtcccctcccacccccaacccttttgtgctgatacttttcaaaactctttgtttttagtttcctcagatttttgtcattgaatttcttgaatttggtagaacatttatagagcacacacacacacacacacacacacacacacacaaaacacacacacatactatacatggtgtctgatacccttacaaaggtcataacgatgggcaggaaagacagttctctggctggtagcatgctctgctctttcagagaactagaactacatctggctctcacaactgcctgtaactccagtgccaggggatctgatgccagtttctagcccttgtgggtactactatttggagggtcgtgctcacatgtacaaacttacactcaaacacatatacacagaagtaaaatatttaaaaagtgccattaagaaagcagaaaagtaatatctttaaaacatcttttaattaagtttttttcattaaagaaactatatgtgtactgatgttttacctgtgtgcataatgcaacatgtgtgttcagtgcaatgtccaccgaggccaaaaggaggcgtcagatctcctaggactagagttatagacaattgtgagctgccatgtgggtgctgggaattgaacctgtgtcctctggaagatcagccagtgctcttaagtcctacgacatctccccagcccctattttatacagttttaaagtagtgcagacatgaaataaggtgacactttggggacaacatatgaaaatgtaatgtacttttgtctttggaagactagggtctggggtctgagccatgtggaaagaatgagctaacgactcttgcagcaccgagggcatgcggcagaattgcttatttcctgccttgggaagttaggctgctctctgctgtctctgttgattcttttaattggacagaagctgagcagatgaagaaaatccccagcttcctatggccttttggttcaccgcatcagtcattacccaccctctacagagcatgccacgctttttcctggtgagtgctccgtcttcattagcttcgtttgcagatgtgttttttattttggaggtatttctatctaactgtttgaactgtggattctttgtcccagtgagggtgactgtccccgtcactaggctcaccatctgtaagagtaaattcctgtcaaagtgaggtgtggtcagtcgttcctgagttccagttctgactcctgggtgttctcttccttccccatgctgttctgttattgagaagaaatgctgtctagctacagtctgattatcaacaacttcagcctctcccctgctgctttcaactccatatagtaccctgttttgttttgtttcccaggctggaaagcctgggattgctgtggaggtcggtgatggtgaagtgtgtgtcttcatagggcttgactgtccagggtgggtctggaacacagcactgtagcctctcctgtcctaggagctcaggcctactttcacaagcatgtgggctttggcagaggtgttcttcatatgcatggctaatatgtaagtggctgtctatttgacgagactgttgtatcgcaaatggtattaatgcaagtttgttgttgttgttttgtatctaatacaggattggtagattaacaaaacaaaacaaatctaaaatactgcattctagccttggtttggagtctccatctgtatggctataggcaagtctgttatttttaaaattctttcctcttttgcaaagtggagctaatatcaatttgtatgccttgccaggttgtagggattaaaggatttgtatgaagacacctagctggccgagacagtactttattgtagccgtgcatttctagagctgggtggagagtccttgcctgtgaggagctgggccgtccgtcgtaaatactctgtacagggctgctgtctatggtctgtgttgctccctggtgctcagtcaacgccagcttcagctgttgttggagtgggtgcctttgaccctctagctatatggcttgggatgcagttagatcatttctgaagttcatgtcctcagagttcctccctgagacctccagtagcagggttgggattgttttctgctcagatccgtgagataggctggagcccaccgtgctcaaaagtcataatcttgccaacattataaatttagcaggccgaaaaccaggccacattgcaggggcaggtaggagctagagacttggtttgaattttttttttttttttaactataaaacgtagagtatttgagactttccacggagacatactcgggcgcatagccaaagtggttacaataccctggttttaatattgtcggtgaggtaatcgtgtgttgggagaggggatgcttgtttcctctctggcactccaccaaaccccaccactgactcctttgtcccttgaacctaggcttacttgtaccagtaccggcttttccaaaggatttgaccctggtaatgagatgaggtgatgggaaggcaggccccagccctgggcatggactggtgtaactggtaaactccctcttaaatccctctgttcaacaggcctctcgctcccatgtcctcagtggggtgaattgttctcgaggagagaattttaagagtgataaacaagagggattaaaatgtcccctccaccaggtctctgtgtccttataaaaggctataataaactgtcattttgcaggttttccttgtgctttgtgggcaattaaggccttgtttatcattctcttggtgggagatagaaaattactggtctctccattccttgggcagtccagcttagcaaccatttcccaagcattgattgtatgtgtgcctgtcctcacagctgagctgagtgatgtaggtggagcagaaagggcttgtgtttgttgccttagtcctagaacccacaagcttctggaactctcttcagctccgaatagaaggaatgccaaggaagatgaatgggagttgaccccgagttcactcttctggatccttgagctccctcaggacttgttaatgacgagcgggggggggggggnnnnnnnnnnnnnnnnnnnncaacacctcacacagaacttaccctcaggtcttagtttagtaatctagagtttgcactgtcactggcggcctttctgagacctccaggctgagctactcttgacctctctagacttgagaatgctgccaagggcatcgtggccctctgtgtttgtgagttgactttgtttttttggaagcctagggtttgatgaaggagctccctggctgcggggatcagtggcagccatcagtgtcgcctgcttctctctgccctcgtgttgatatgagttgatttctgtgtgaggaaacagctgaggagaactgagaagtaagactagggatggaagggccgggctgtgccccttgcaccatcttcatgtgcactacagagtgggtgtctgcctgctggctccctctggtccccagatttgggccctgggtgtactgtgcatcccccatctccacggttacttttctgactgcaagtctctgtgctgatttggagtgtcagatataggcaggccagggacttaggacctttggaggttcttggacttagacaattctcagtgacgtgtgcaggaatgctgggcttgaataccatgcacgggtgagtggggttcatttggtgccgtaggtatcgagcatctgggaccgagatgaccatgtagctgccgacttgcacacttcagagcatatcgttgaactctgtggtgtcaccatttgcacagcagctgcggtattccggtgactcctgcccagcctggttcttgtgaatagcccctgttcctaccacacaagggtgtttttgaaaaagaccatgaggatggacgctggtcaggaaatctgagactagtctctggattttccctgcttggttttgggaagttgccatattttgtgatagcatttaacaatcacaggattttgttttgttttgttttgttttttttcctttttaatataacattgtgtcttagacttttttgaaatctacctctggatgaacaaacactagacattgtcttcttcacttaaaaagcaccaagaagtttaagctaaaagacattctgcttcttttggggggagggtagcaagaaaattatatatacttataattttttccagtaagggtacttaaaagcttctatttaaaattatggggtttaaaaactttaagttgtacttaaaatacttttttttttaaatatcttttaatagagagggcttactaaaagaacagggaattgttggcaggcagaatttgtcttgataagaggacagatagaggtagtacgacagatcagctagaaggctggccctttgagcctttggatgggaattcttcctctacctgaggctttagcacactgagccatgggcttgtaagccccgcgtctgtctttgttagtgccatttcttccccagatggatgtccatgctgaggaaatacactggggcttcttggaaccatactggcacctactgaccagtggatgtgccaggagcaaaagtgcttactgcgagaggagagcaggcatgcatcctccctcactgcgagaggagagcaggcatgcgtcctccctcactgtgagaggagagcaggcatgcgtccttgctcaagtttcctggacagtttccttttgaggagtttgtttttgcatttgttggttagttgcacatgattttgcttttgtccaacttcttcagtcagtctcccctccttgatacacatggctaaaggtgcacaggggttgggtcggagggaatatcatcatgcacacaaattttcctttattttaaagacttattttagttatatgtgcatgtgccacgtgcacatgagtgcaggtacacaccgaagtcagaagagggcactgtgtgggtgctaggaggagctgtgtggcctctcagccacttgccgtctccccagccccagctcatgcgtattttaagacagaagaaacattgaaaggtgttttagttttgccgagatcagaaatgtacaattctactttctcagacttttattcttgttaaaggctaagatgtgtctaactgtgttcctctgtttattttacttctcctgacaaacgtaaaatctgtgttagagtctcatttcagtgtctccatgctcagtaaaatggaaacctttgaacattttaatcacgggagctggtggttgagtctgacagtaggtttttgtcttagctgtttagtttgttgaatgtcagtgactatgcaccttccgtggttcatacacatggagatgagccatctctgttgtcaacaccactgcctttcaagaactttgctagacgtgagggtgagagtatgatacacctgcccaagccatagtggaagcacgtggaagcaaatgattcggaatgcaagtaggaattagcaagctagagaggggtcgcatcgttcagtgccgtctagagggacagcatgcagtggtgccattaatagactgacatgtcctggttcttctgtgggttttcaaaccatatgttgtatatagtgtaatctttaacatgcaagggctgaaacttacctagttgaactcatttgcttcagctcacaattggggtctagttgttttttctataatcccgataagagaaaagcagaggaggaggagaagaaggagggggaggaggaggaaggggaagaagaagaaggaggagaaggagaaggagaaggagaagaaggagaccaccatcaccaccaccaccaccaccattgtatagtaaactctggtgttacatagtacattgatgagttcaggttttagaatcaaggattaatatttcatagaaatgaatttctgtataaaatgaaaatcctagatgctgggcatggtgactcacctgagaggcaggcaagagctttgccaggagttcaagggcagcctggatcacacagtcagtttccggccagtctgggccggagtgaaaccctgttgcttctgtttttcccaaaccacagcaggtttcatttttgggaaagcagctgggacggggagccctctagatgtcctgtctgcatcaggaatcggcatattttaggtcagaaatattttctactggtgatctctgaagaacgcagagatccttgacatattaggggaggcataaaaatccgtgtctccctggttgcttttctcctttcttttaaccaagactgatttcaggagggagacaactactcccacgttgcttctgtttaaatgtgagcttctgtgcttctgtttgtttgtatttttttttcatggctgacacgccctcccccctcggcggctgccccccaaaaatggaataaaaaacaaagtggaagctttgttgtttgaaattgaagggtgctgtgagaatcactgcaaatccctgctgtctccgcctgccctcagttctcctattttgggtagtagtgcaagcagtcattttagaaaacatggccgtgtccactggacggcactccttccagaggccctgtgccagaagcaacagagggacacacagccaagtcccagccagcaacccagacttcagctctcaaattctgctacttgaaatttgcataaacgttgaagggagaaaagaagcgccctgtgtctgtcactcttctactttaggctctgcagccattcagagcattaaacctcgtctgagggtgcagcggatgagcgcgctgcaggcagaaggagcagggtatgaaaagagtcatgtgagtcagacaacagacagaggcttatttgaagaggctacaaagcaacaagtattgccaatttaaaacattgcttgtcagagcaaggagtgaaacacattgtaggctgctcagattacaccgtctggggtaccagacttaattactcatgtttgagattcttaaaacaaagggaggcttttaagcctgtgatacatagctggcacggcccaaaaagctccggaaagcctagaaaattgtgatggggactccatcaagcctggataccttcagtctgtcttttcgaagataaattcctggtgcgttggacctggtaaagatcactgactgatatgtaccttgttgtctgcagtgtttgtatacagtggaggctaataaatgtgaatatgaagcctcgtctggactgaatggcttcaagggtctgtgctgttttcgtagttctttgtagagaggttttgacagtgagttttaagagggtatactgaaggcatccaataaaagccatttttgctgtgtttgtatttttctggagtcatttggctaggtccctttctctctgttccatctgtcccttccctgtaggctgagaggatggtgtatccagagactggttcattcatggttggttggtctctgtgtattgctggttgagcgccatgctcgtgtatggagtggccctttgctcaagtatagtactggctgtacatttagtgaatcatttcttttttattgcccctttaggaggatagcagtaagctctgcgtggcttgtgtgttttattagagggctggtgatggcatctgggaggaattaatcccatttattgatatcatactctatattaaattgtgtcattttcctttgaagttgatgtgcttaaacagggcagtttgttcccctcccacttgaaggagcagctgtgacctgaccaggcctttggtgacttatcccatcctagcctccatggcctttttcttgtgactattgtttaatttgcgatctcaatccccaaatgtatgttagttttctgtgcctgggttcctgctcaagtgggcttttcttatctctacctgagaacttttttcgttgcttggttttgtttttttttctagaacataccactgtctaaagaggctttatttacattttgtttgttgttgcctgttttcccctaagagaagcagagtttgtgagagtttgctgactacagtgtccctgacatcagggccctgcatctgcatgctttgtagatgtgctgtgttctgaatgggtttcagctgagggtggtggcacccacctttgatgtctgcactgaggaggccgagctagatggtgctctgtgaattttgaagctagcctgctctacatagtgagttccaggataaccagagctacagtgagaccctatctcaaaactccgaaaaaagaaaaattctagaagctttcttctacgttttgtgtcacactgccaagtgaccgggcaatgagacacaagtccactttcttgtgtttgcttttccttttattgtggggtacatgtccagaaatacagaccgtggtctgaaagattgatcttcctctgctactgtgtgcagcctgagaagaaaagttgggctggtgtctcagactccatccactcttggatttgattggggctggagagccagtccaggtactgatttaacaggcgcctctgatgcatattgaagtttgaaaactgtgactggggaaatgttaaaggttcaaggtagtagaatcccagaaaccagccaagtggcattaattattagcctggggtgcccacctttttttttttttttttttttggtcactgacttggattggttctctaaagcaaggctgtaaagttatttgctaggtagataggcacatattgactctaggttgtgtgtattctatgaatctgtcactgtgattatttgccaggacacctagtaggaacaggctgtgatttttttttttttcctctccctgcccacagctgagtcatgggtggctggggtccttctgctctcctggataaatttctctttgtattctgcctatttttatgtacttgttaaaacttggtgtatttcgtgtcgcacgcctttaatctcagcacttgggagctagaggcaagcagatttctgagttcaaggccagcctggtctacagagtgagttccaggacagccagggctttacagagaaaccctgtctcgccaaacaaaaaaaacaaaaaacaaacaaacaaacaaaaaaaaaccaaacaaaaacaaaaacaaaaacccaacccccccaaaacaaaacaaaaccaaaaaaccttggtatatttcttaacacattatccctgtgtgtggtgtaatgcttatgcatttgtgtgtggtacgtgcactgagtgtggaggtgagtgaccttgtgtgcacacgccaggttcagagggggagctgctgcctccctctgcttctctttccctcactgtcttgagacagggtgttaatctgagctgaagctggctttggggattagcctggccatgcagtgagctcttgggcgctgcccccatccccctcttcaggttgagatcccaggcgtgcacagccatgtctgactctttgcgtgggtgcctgggggggtagtgggggggttgatctcatctcttcactcttgcacagctagcgctctccagctgagcctctgcagcctcttttatggagtgccactccctgctggattacaggggactctgggggcggtcaacctagattagttcacaggtagggaatggagcccagtgaggctgtcttgcctgaggttaccagctaggtacaggaggcaggactcatgatggcttttgcctgttggaattcttgtaggggactgagctggaacgctctgtgctggtggtacagtcctttcctgagctgttttccttttttaaataagaggaagaggaaaaggcaaccagaagagagctaataaaagtgtctcaagaggatgaaaacatgagtttgagcgctgcagtatggaggaaataacctgacattactgttttaattatggtagttgcattggagcttatcagtgtgggaagagggagcgcttatgccttacagggaagtgggccgtggatgagaagatgtgcctggctgtgcctgttgagtgcacagcccagcgggtgcttctgtgatgccaacagctgtcgcagagataggccgggcttagcgagaggcctggctctcaggctcagtgctgccaccagataggatctgatacctcatgaggaagccacttaacctctctggccctcactttccagcacgtggtcataataacacccgcccagccatggtagtgggaagtagcctgtctctgtgcataaggacagtctctgggcctggtcaccccaggccagtgttgtatctggctctggctcactgtgatgatctcacaggctgcctgcctacgctgcttcttcagctatgacgtagggtgtgatgaaatgaaccatttcagggttgttgtcaaagctgaattagttcccgtgtgtacagtgcctgataaataaacacttctaagaggggtttgaatgtcttgaatgttagaataggttctatcttgccttcctagtagtccttaggagtcttgatgtatctttggtgatgaaaattccacttctaaaagctgaacatttggatgctgaaagcacctgagctgggtagacatcctcctttcctggctgaaatcagtgcaagttttggggtatggccattcccctacccacgctgagtcggctgctttggggagcctttcctgctaaagtcttccttgtcgcgcaaggggcttctgtgtgtccgtaaatacgaagttagtttctactttgtttacttagtcccttctcccaccgtctccattgaccaccttctccttgcttttttgtgagtccttgaaatgagaggttattgtagtcccttctccacagatgtggtttctccttttttctgggtcctgttagtggatgttgatgcttttggctgcttactaaagtggcccattttattaaatcgtaacctgaagccaagcagctcctcctatagtcaaccgctgtccactcagatcttaagtagtcagtggtggactcttgtgtgctttgctgaagtgtctaaatcctgaaaggcccacagcctgttatggttggtacggctttaacgatctcattgtcactaggacatgtgtctgccagacacatggaggcacagagaacgaagggcatacaagaccatgagaggagactgtgaggtgaactgtgttcctgtgacttgggagccaaacactggctagtcagtgaagtctcaagggacgtgcaggggtgctaagaaaggctttctctttggatcccactttgccgtcaaagggctgtgactggtgcctgatttctgattccactttgtcttttatttcagctttgcagtgtcgaggtggtcaagagccctgtgtaaatgaagggacctgtgttacctaccacaacggcacaggcttctgccggtaagttcttctgtaatcatctctctgacagtaggccctgggcaaggtgtgcttgggctttttaaaatttcaatgcttctgtgaagtgttgctggctcttagatcttctgatgtagtttttgtgggtggtgaggatggaagggcgggctggttgttagtgaaatggttgaggagagtaagtcactatcctgccattatctttatcattgtgaaagggttttagtgagtggctagtaatatctattgagtatttcttttatttttcagtgtaagagatagccttttttttctccctcaaataccagatatgatcatgtttttaagtcataccaagtagatacactctaaatgaatgtcaagtagtcattggaaaactttaatccccctgtttaaaaagtccagttctgaatgcgagactatggagcaagatgtatatgagcttgtaggatggaggaggggccggtctatgggtggagcacatgggtgggaggggatcggacctggaaactttcagtacctcttgattcaagaacacttcctttctgtttttccaatggtctaatctagcctaatttttttgtttgagacaagctgtgagataatttcatacacagctttttccccacttcttctatgtattattttcttattttaaagacagggtcccactatctagccttggctgcttagaactccctttgtagacaaggttggccttgaactcacagagatatgcctgcttctgctcagagtccttggattaaaggcttgcatcaccaaaccaagctacctttcttactgatgtcatatgttttttacctcagaagttttagtgctaaggcagctccattctctttacaccagggaaataagatgtggataggaaattgctggtcctttttcttttgaccttgtgacaactacccctagattctgaccttacgatctgcattctttaatgtcataagattttcagaaagatggtcagaaacagttttcttcaacaaagtgaaaatattttaaactgtgatgacagtcaaatttaacattggtttgtttgggttggaattaagatagcatcagaaatggaagattatataactgattgtggctactcacttgagtcttagccaggaaaactacccgacgtggtacactctcctccacttggaagatactaagggagggagttcaatacctcaacagtttgtctctcgcagcatctgctgtgtggttggttactctgttctaactggctcaatgtgattacctgctgagcctcttcttagtaccggactctgggcatttttgcatagctaatacctagcatggtgcctgctatgtagagactgtagagcaaagtgtcttgtgccttcttcaacagcagcaggtctcagccttcctagtactgccaccctctaatatagttcctcatgtgtggtgacccccctcccaccataaaatcatttcatagctgtaattttgctactgttatgaatcataatgtaaatatctatgttttccaatggccttaggcgatccctatgaaagggtcgttcaaccccaaaggggtcacaacccacaggttgagaactgctgttctaggatgctgtcaacagacacctatttacctcaagtggggcactgaaaatggaaccaagaattgatgccacttaagtctagctagtccactggggttccttattggagcacaggccactaaaaggccagctgccacactgaaaagcccaccagcatgtgacaaaatctagagagccttaactcacacaactcgcaggacgtgagcctgctccccccaccagctgatggttgtttttgtaaccctggagcagggctttgcagatcctctgggtcccaagcttcttatgccttgtgagtttcattagctgcatcttaccagcccctcctacctttgcagaataaatgtttcaattgggaggaaacagccacacaggatccttgagtaaaaaggtccatacacacagatttcagcacatgtaatcatttccatgtctcttatctgtttatctttcaagattgattttcccctgggaattttacttgctttgtgtggcattggcctggtggagaggcaagctggttgggtataattggacttaatgagttatgcagggggagtttcacatacatgctgatctgcgcatggtctgatgtgagaggggaggcatcagggagaacagtgtctgagtactggagaggacacagaagttcacctttaaaaaaaaaagatttatttattgtttattctatatgtaagtacactgtagctgtcttcagacacaccgggagagggagtcagatgtcattaaggatggttgtgagccaccatgtggttgctgggatttgaactcagaaccttcggaagagcagtcagtgctcttaaccgctgagccgtctctccagcccagaagttcacttttagagaaaggcagttgctagcctcagacttgaccagggaggcatggttgtaccgacttcaggaagaagccccgcatagtgacgtgcatgctagaagtggtgtcagcctgggactctctgtggtgagtactgtttgtcccagtacttgacagaaggcatattaagggtgatctgtgtgggttcaagatcagcctgatttacatagtgagtttcaggccagccagggtcacacagcaaagaaagtaggtttggaaaaggaggcctaagtgcgaaagttggcagagccatccttttgggagaccagcaagaagcctgggcagagtgctctcctctcccatgtgtccaccgtgtcctcaggagaggtcgtgggcgtgactgaccacgggagagtggcagtgcagcctaggctgagcacattgctctctggctcctcagcatcatcttaagtaacaatggtgtgtactcacggcacttgtcagcatccttcaccacccccgacccgagggataaggtatgcgagtttgttcagtaaatattttcacaacatagtaagtaagtattccaacacttagaggattatgaaaattacatcagatgtgcagggcatgtgattgtctttttattttttttccctgaggttgcttagtggattaaggaaacagagttgaagccaagttccttctgtagggggtagggtgggaattgggagaaaactgttttagagtggaaggtatcccagaacctgctaaggtggccttatcctgctgattcagccaaaacctaatgattgtttatagaaattatagaaaccctcgataagatcacattgacagatgcggataagtactttcaaagataggttttgtgcacagctcaactgtgtggttattccccccccccccccttcacactgtgatgagctcaaggaccctgtcagactgtgatgccaggcaaggggaacctgtgcaatcttgcatgaaactcaattactgctgctaaatagtcgctgtcagctcttaataaagtcctctcagtacttaaagttaagacattttattctctccctgtcctactgggaggtgtaaatatataattacgtttggatgtaattaatcactttcgagttgtttgttccaagctttcaagtataaaccacgcaaatcccattttgattaaaaatcacgggcagtgcatgtttgctagcctggcgggtgtaggtgaggtcatgagttacccagtcgggacgttcactctaaggacgtatttatcctgttacatacggtctgcccgctgctccttgtcttcactttgggctcacgtttgctttccttcactctttgaaatgactgcctggacactggatgatgcattcggagtgtttatcccagcagagcttcgtgggagtgggtctgttccatccctgacggatcactttgatcccactgaggctatgttacatggctttgcttctgtttcacccttactgctgggagatggcccacatggccaaatgtgacccttcagaggactgctgtggagcgtggggggggggggggggttgaccgagcctgggatgttcttaacaggccctctgttctggccgacttgagttctaaggaggaactaactgcctgcgcagtctttacagccatccaactctttctcttgggtcctgtgttctcctcttctgcacagtcagaagccattgaaggggaagtattttcagagttgtgttcagacgttgcgctcctcctcccaggtcttttctaaggttttgcctttcaaattctgtttacctccatggctcctggtgcccccgccctgccctgtctctgttagagagatgtccatggccacttgctgtctctgttagagagatgtccatggccacttgctttttttctgtagcgctgcaggaccttcatgtagagcagcttgcagagggaaagcagctaactgtgggattctcacagtttgcgtctgtcctgtgtcccttgtagttttctctagtgcctttaatatttcatcctgagttgataattgttatgaacaagagagttgttctgatgtgattgttgctgttcgtgagggtgcagattggggtcgtgaagggtccttcaccctcgcctgccgggttgaggtgcctagcacagtactgggaaagggaggaaaggatacatgcaaagccacacaattgcagagtccctgaggatgggggcttactcctgggaaactccagtttgtatctaagaattacatttttaagtgcatgatgatggatgcaaaatgttataaaatataagctgtgtcacattttatccaaaccttgttgctagctgcagtaaacattagcaactaagtattttctttgccaggattaggagtgatgttggtggtccaggcatctgaaatccatccaagaaagctgggcgggttgccttcattgtcctcctaacacgttaggtatcacagcagagagcagaggagctagactcccccagaactcagctctggatggaggccctagcctagtgcttgtgccgcggtggtggtctcagaagggtgtgtgccactgtggccagctcagccttagtcccttttgtcaccttctcctgagcgcatgcgttgctgtgagggttgctgaggatcagggccatggagtggactgtccactgccaattgctcgcttgcttccctgccaagctggtcctgccagcctggtcccttcatgttgggtgcccaggttaccagaacatcgtgcgtgcttacgctctctggaaggtgatagcagagttagccatacctctgagtgccttcatcttcctttttcttagcgtcttgcagatcttaagtgaagagtggtagctttgcctttcacagggtaatgtttcttttcttcttctgagagtggtgcctaagaatgattaactcccagagttacttattgtgcagacagcgatggctccgtggttaaaagcacctgctgctcttgcagaggatccaggtttggtttcaagcacccacatggtggctcacaaccatctgtatgtaactccagtctagggcacctgaagtcaccttgggcctctgaggccaccaggcttgcaggtggtacacagatacgtagacgcaaaacacccctacacataacgtaaaaaataaacacatcttgaaaaacctaagagtgacttactgcagtctgtgtgtaccacaggcagcaccccatgcaccgctcaagtccgtggtagcagttgcaattaattgatgttgttctattatttcattcttcttcgggagtcaccagcctttcccagtccactggatgacttacagcagtcccgagaagccctgcagggctcttgtgaggacgggcgagaaataaagttaggcaggaaacaactgaatctcgtatggtctgttcagagcgagctggggctacggtgagtggggagagccacagcctcaggtgtggaagtcagggcactgcctgaaaactcactcatcagtcggggataccttggttcaaaaatatcaaagttaatgcaaaaaatggtgaaaaatcctaacattctaaataaggagattagcaatacccattactgccttagccccaggctccagtgtggctcagcctagtgcttgtgagtggattaagtcttggaagagtcctgtctggtaacatgcagagaacatagatttctatgccagatagactgagtctgagtctacttcctgctagcaatcagatctttggcagtgtaacggctcagtgctagctgattgttctggaccaactctgacatcagttcagctgtttatatgaaatgcatgctaaattcttgttttatcagtcagtatatggatgctcagagagtttagataatttgcccaagatcttaaaactttctattttaactgattcaagaggaattcttgaaaaatgtgctgtctttgtctcagtttacctatcaataaaatggaaccaaattgtgtattaaactgaaagctcaaacaagactgccccaaaaagaaactgtgacacttgaaaacatataattactagaatacgattaaatctctgcttttattagctaaaagttatgtatatatttacttacttttatgtgtgggcacgcatgtgctgtggcatgcacactgagatgagagcacagtttgcagatgccagttctctcccatcatgtgggtcccagggcctcagcgcaggctgtcaggcttggccgcaagcacctttatctgatgtgcctatcttctggccttttagtgcttgctttgaaagtagaagtagtggttttaggtaggcctcagcatctcacttaaccatttattactggcttttagctagcttaggttacatgggtgagcctgtactagtgcctgttgccattatgtagatgaaatataaagagaaaggcagtggaatgtggggtggaaaatattgtttgtgactgagcttttcagtagagaaagcaaatgaacaaaaccttgaacctccccatttcctgactggggactggcaggtccagaaccgttttacacagccatgaatgacactgagatggacgaagccccgtgactgcttggatgttgctgccaacacagaactacttgttaaacatggcacttggtgcttgcacatgaattacctatgtacgttggtatttccatcaaggctgtaccttgtctaactgccattccaaagggagttttattcacatggtcctttcagagtcctttaagctgtgagtctgtctgaagagtcttccattacggtcttgatcaccagtttcttatcagcgcatggtaagagagtccccgtgcgctatctaagtcccctttatgcttttggctgaatcagtcagtaaccattgtttgatagggaagtagagtgccatccgtaggctctgcctgaattctgctgcctgtcttgggtagctgccaataaattaaatcaattaattttggctcacaaagctggcattaatagattggaatttagctcagcttctttgaacacggcctccaggttaaccataatcctgggtgaagttgcttattgttcaatcgtagcttgtcagcgccatcacttcatgtaggagcccccctgactccccacttctcttccctggggagaagaatgagaaatatttctcttctggagaagcttaattaaattcttcattttagttttgcctatatttgcccttagtcacaactgaatggaaatatagttattcagagatttccaagcttattttgataaaatagcataaatatgtgggcatgatggaccctttcctcagtgctcaggggttggaattcccaggaaagaaggagtgtctcgtctcccccttgttgcatgcacacatatgcaggaatgagcgtgcacgcgtgtgcacatgtattaggaaactgtgttgtttccaggtttttgtataatttgagttctattttatatctcacgaaatgtaaggcaaattaatattcctcttcaatttcactatactttctagatcatatcgactgttagtgacctccctgaagacgcaggcagccatctgggtctaaggtccttggataggaacatccggcttccccttctgatgccgcagcttctgtttaatatctccttccagaaatagtccacatggtctttatgagaagggctttaggaaagaggagcgaaggcaagggcagtggtgatagctggcattgctcaatgactacagaatcacaccctcccacccgcttcccctcctgtaggaagagaaagttcatgagaacattgcctgccttggagtctccgtggtagcagaagcctctaattccacctcctgttccaccgaggcgcttcctctgcttgactcttcgtacttctcgggatctgtcacccaaggcagctacagactgttttattcaaataggaacaccccatgttccccttaggatggcaaggactcggaggactgcagccacacatgccagaggcttctcaggcctttctgtgctgggtcgtgtgaatagacccaaaagccccaaatatgtctccatcttggctgctttttctgtctaaattctagttcatgtaatgtttcactgaaccagtgtgtggaccagtcaggtttcaagcgacagttaagtggtttggacaaacatcccttgagcacatgttagcaatgagcgtgtggaggtggagtggccagcgtgagaggctggggaaagggcccaggcacaggaagagagggcagctggcagcaattaccttccttccctggactttctgactcattgtgttgctagacagagtagccaggtagcttgtggctggaaactcggagttcaagaatctcagaagccaagaaaaagtttgggtagagggagtgaaacaagagcagagacagtgcctgggcgctatgcgcgggctccctctgttagccaagaggctaggtatctcacagtcatgtcttctgcccagcatctcactggccaggttcaattcatcttaggaattcggagtgagtgggtatctgttagccaagtcttgggttaccccaaattagctcatgtcctttactgcttgtttcctctaattatatagtacatatccaaacccccaattatccagaatagaccaggctgcctgctccgcgtggaaaacatttgacagtggttatgattttcttgcctagaccttggcagtgccttcgtccctcaacctcctggccctttaagattgtgaaaccctggtgcttgtgtaagtcaggcacatctccttgaggaatttcttcactgggcagcttgcccctttgaaaccttagtcattctgagcagtacccaaagaaccttctcgactctaatttttctgccacggccctatttgtatataatatttgtggtgtctgactcttggtctcttattgccgaaacttatggttgtgaatgtctaggtcactccttaaaaccggacagcccttgattactaaagaaaggtgactcatttccttccaggcaaagactggcactgactgtcagagtcctaagtttgtatctacacacagttcagtgatgcgcttcacatagcccttctaagttgttattggtggtggtttgttttagagacaagatctctctccttaaccttctctctccttaaccttgcctggaacttactatgtagagtaagcaggctttgaactcaaagagatccatctgtttctgcctctgctgggattaaaggcttgtaccaccacacctggctcctccggttttattggaggtaatgacaacatcactgtgacctggggagggagcaggagaggccctcatgctgagttgaagggatgtctgaaaatgagttctggagaaaggccttccccagatttacctaagggttgattccctgtgaggggttcttcccagaccactgtctctcgcacacatgtcagccattaaaatgtctcctgtaacttacctgtaaggcttgagatgtctgctgccgtgtcattctgtgctgaagaaagcaggctgccacgctggcatgggggtttggggaagatgctaaggcctggaaggggacagaggtccctggtctctggatttcctcctggtgccctgatggtttgttagttctgttttgctcggtcttggcctccttgcttcctgtgagggcttagctcaaggtgacaccttagcaacagttcatctacataagcatccacaggccctttggagggactgctagactccatgaggggtgtgattcttgcccaaggagtgggacttggagttcttacatcctggggttgaagggtgctgaaggagttaagtgtcactattgaagtcacctcatttaggaggagggtaaagacaccttagagtccttcctactcattgtgatgtatatatgacaagctgacacagaatacaaccgagtgagttcctctgtgttcctctgtgtatccgactgactggaatatagacaggattcagttagttctcttgacctcattaggaagaaagctggacatcttatcttatttttttctttatggtagcaaccctttaagagctggtgtgggtagacatatgtgttatcatggaagcagaccttaaaaacaaaagatttgggtttttgtgaagcagtttgaaagaataggcattttcattttttaaaagtccagtgaatccaagcaatggggagatcacagctctcggtgaggcgtgtgtccctgtgactccagggctctgaacagaactgagggcacctgtacaatttcagagcaactgttggagattgtttggtccagcatcttacttttagaaaatgcttggggctcttggaaggccagaagagcgcatcagagtccctgaaggcagagttacagagggttgtgagctgccaggtgagttccaggaactgaattctggtcctctgcttgaacagcaagtgctcataaccaccgagccctctgcccagaaccaagcatcttctttttaacacaagggagactgaggatcagagaggtaaagtgatttgttcaaggtaacatgtccagcagcagagccaaggctaggctgaggaaagggctgtgggtcagcaactttaccagagagatctggggccatcctggagcccttggccaaacattgtaaaaactttaatattcatttagatagacaaaaggtcacaaccgttggacacacatggctatgtacgtttgcacacatgttttatatgtgacagacttggattgtgagtgtttacccacacgtgtatacacttgtgaatgcacccatgccctcagagtctcccatagaaccgtcctgaaggctgctgggcagtgctgaggagagtgtgggtccatctgtagtggctttgcccacatctctagtcagtgaagcacctttccagaaatgatgtagaatgtctgtggcatggaccatgatagttcctgctgtagactgtctttgcttacacttgtgaccttggccttgggctccatctggaagcacagatcagcctgggccggtcagctctggctttgctgtgcttgctgctactgccccacaagtgtctctgcacttccctttgccttcgctttgggcacagtggagtggtaagttcagcgtgtctgttggatgtttagtttctgtagtatgaaaggccacagaccactataaagtctcagataagttttactcccaagaattgatcttcctccctccccctgataggcaatgactctgtttttaagaggagtagttaggaaccataattattttgcagatgtctactgttttaggtatttatttatttatttatttaggtgttggcaaccaatctggagtcttgctgttgtcaaatgctctacctctgagctatgctcccagtctttgtttttctctatacagatggtgtggcattgggctgtctttctgaaattaagcatacttcataataactgcttctcaagtggcctggtttctataaccctgttttgttttttgtttttgtttttgtttttgttttttttttgtttgtttgttttgtttttctccttctctttcttttgctctggtcttgggagttaaacctagggactcacacaggggactcgagggttctaccagctgagcattattatctcttgcagaaatggccttatttgcagtgaacaagagttcacctaaactgtaagccttttgcctttatgatgtcagtggtgtcctgccctcgagcaagtgtcagcaaacttccttaaaaatgctagatatcacatcttttaggccaagagtcaagctgacagttctgtgtcactttatgcccatttaaaatgccaccagtgacagttcctgagctgatgatccaaacatagatggtggagtgtgccagcccaccttagggctcaggagccattggaaagcttcctgtttccccagaagtgccagatgccagaaagccactgtttctgctgtttgttcttgatttaatgtgcaatgatgttcttgaagcagaggagctgagatcacaacagtgaactacccttgatccctctgctgcccgcttttggtcgatgccatctctggctgaggtgatgtgtgctagttacagccagggtttctactaaattaacgaggaacatcattcaaagaagtgaacaccactcatttttctttggcaattaattgttctcattaccatcaaagtaataaatgttagttggtgtaaatgccataaaagttatcttttgtgtggacaagttttggggttgggtgttgtgacagtggtggtttaatagtcatgtttgctcttaagagcatcttgagaggcttgcaggtaaatctggcagagctggtgctgcctggtgtctgcttctgggcacagcaatgcagtgtgagcctcttacatgggcactgcaatcaatttctgttgtatgtgacagtcagagggtttatgtgcagcagatatgcactctgaaagctgagtaacacacacacacacacacacacacacacacacacacacacacatatatattaggaaaatgtgatttaaagaaatctattccatatggggtagggcagctttgaatagccttgggtttatgaaggttaagaggtaggtgctttgtgtatcaagaatcttaattagcttaaagatcctttaggtaaacagctcaacccagtggttcccaaacttccagtgtaattgaagtctggagcctttaagttgtaaagattatgtggacccttgcatcttgccctttggcatccgttaagaatttgaacagctgaatggcttccatatgctagtcactgtgtttggcacatagggtatagtagagaataactcttgtctattagagaagataaataattgtagtaaaggttaatgcactgtgtcagatttatgggaacataaagtggggatgtcccttccaaaccttctctttccctttctctcctccctcttcccctttcttctccttcctgtatcttcccctcctctccttcttttgggggtggggacagggtcttattgcctgagcctctcgagtgtgcttacaggcagcatgaggctgccagcaggaaataacgtttaggcagaggcttggaggaattttagggcatggttgtgacagagggtggagagagtgggggctttgtgactgacgtgtgcacaggtctggcaggaggcgtgttggattgtagcatgttctttgagctggaggaagctgagcacagagaacgtacagtgcatgaagaaaagctacattgaaaccgttgtttcaacacaatgcaccaggtcaaagtctacaaggaattcaggcatcttcccagggcttgggaatgatgcacagtgcaggagcaaggtctgcctccatcagcagtaatatggaagtcacccagatagaccgttaggttaatcgtaacagcatcttatatacattcaaatgtggaccagatagaacttagtggtgtaaggagtgcttgtcaggattacagcccctggcatgctgctgcaacacaacacttagagcacgcatctccttctctcagacagtttgtctgttatggtgaagggtgtgataagagccgctctgtgatgttttagtcacattctaatatttttcagggttcagggcacatggtaaaggactgattatttcttctgctacatcaaggacacaagcctcagcactgtctgtgtgtcccggttccatcattcaaggctgctgaagagcctgggcactccgcttgttctcagagctctgatgaatgcgctgagactctctgctggaagataagggcgctcacgacattccattgtaaataaagcatgtgttcccatctcctcactccttataccagcctcctacagagggtcgagttgctgtgaatgagtgggtctgaggtcgtgcctcttcagcctcttcagtctggatgtgttagcatcagtgtgcttgttgctttattcagatgagggggtggaaaaacctgagcacctgtgaaccaagcgaggtggggctccagaagacgagccctggcctcccggctcccatgtcggttttttcctgtgggaaacttttaatttggaagcattcagctaatgtgggaatcaagattaacattttctgaaatacttgtacaagaaaggcagaaacgtgctgtccaggaagcagatttacatagtagaaaaaaatgcctgccttgcagggtttggtagtctttgtgtgtcagatgtgagtgtgtgtgtgtgtgtgtgtgagagagagagagagagagagagagagagaatgtgtgtgtgagagagagtgtgtgtctctctgtgtgtgtgtgtgtgtgtgtgtgtgtgtgtgtgagagagagagagagaaagagagagagagagagtgtgtgtgtgtctgtgtgtagggttgattatatacaggtctttgtttcctttacatcaaaccaagaaggccctagaaagcatgttttaccacaaacagcctgtttggggctccactctgcacaccagcgcttccccttcttactaaggaaggtgtactgtttctttctctggttttctttatttccctttcatttctggaagtagcagtggggaatgagtgggagtgggaacatgggaagatgcatgtgatatgatatgcagcttccattttctctaattactaggatgttaactaagtctgtgcttaaaacaaaacaaaacaaacaaaaaacaaaccacagcaacaacaaaacagtcagcagtgagcacaacccatttagtttcttttgcatagagtcacagagttaagaggctgaaggtctagtgagatgtggggctgaagttcttgaaatgagggccatgtcaggttgcccagtggcctgggctattgagtacagcaggggcattttaggctggagtctgaatgctttggggcatctagatgttttcagcctggctttgggaaagttaaaagggaactttcactggttacgctagcttcgcctgttagcaattaattttatctactttaacaggggaacaggaacagggtaggggtgggtggcggtggcaggaaacctggctggcatcatggtcacaggaaagaacagactgatttggggcccttcaaactgtagacctttgttactgaccagtgtttaatttggtttgtgggttctgttagctcccaccccattcaccttaatggctgtctccgtcctgggctcagcagaggctggctgctgctgtagagtggagggctgagaggcccagggcaagaagaaagtgggctgaaagctgcgttctgtttaaagaattttctgctggaaaccagcccagagggagtcaagaggagctttaatgaggagcagctgcgctgcgatcagcccacaggagacattttccctccatcccacattctgcacaggttttgaaaactcaggattttgaaattgctgttgtgtgaagaatgcccctccctcttgcgtgtggtggggcttttctttgttgttgtttttaatgaccagatcctcaccaaaagtaaaaataaaactcctaaaaacaaaaccaaaagggttgcagtagagcctgggcacaatttgggctcaccctgctgctgaacatttggtggggaaagtgggggagcaagccctggggtttagttggaagagacgttgtttccttctcagacttcacccgtgttggagctgacagagcctctcactgctcttggcgtttctctcgatgggtggctattcacgtgggaaagttttctgccctgtattactggggagacagctattgcagatagactataggtgggaactgccattcacgtccctgcctcatgtcaagaatgcaggcctgtgagaggcaggggctgtttcagcgaggggggctgtactggaatcctttcggatggaatcttttctactgcgtttctctctttcctgccttcaccctgttccaccatgtgcatgtgaaatgaacagtaggttcttttgtgtcatcaacagtagacttttaagaactaggtaatggatgtagccgtggggaccaggcagcaagcacctgcctgtgtctgtggccttgcctgctgtgctcatctctaaggacagaataagacccgtggctgcctggttctgctgtcttttacttagcataatatttccagtgttgtaggatgtgacaggagtctatctcttttcacagacaaataatattttattgtgtggatataatggcttttatttctctactcatcagatggtgggcattcgggctatttctaccttcagctattatgagtcatgctggcatggacatatggacgaactttttttttttttaatgaagagtgctagtatgaacatatacttttagttactgtggtgtgtgtgtgggggggtggggggggcagaattttagagaaagatgtatcttataatggaaagaccaaagaatgttaaagcagcaagccagtagttttacttaaaaagtacatttgctacatagtgttctcagtgctgtgatgatgtgaagaccccaggagggcaggcactcatactgagtctgtgtcaaagagagggggccagtgctgtgctcccgaatccatggtgagccagctctgcagtccaggcggctggttctggggcacaggctcagcagcaccaagtgaccacttagtaatggaagtgtagtcaacatagtaaaggcctgccacgggcgtgtgttggtgcaagcagggcctggtgattgcctcttcggaatattttagaaatgcttatggcattcgatagaaatcaccttaaggtgccttaaggttctgctattcagggatgcgtggaggtgggaaaagagccagtaacaagatgtctggcctgaggctttaaagatgatctgaattgctatcaagagggaaactgtgaacatgagtgataagcgttacaggaattcggttaacaagacttgtcagacacagcaattatatataacttcaagggattaaataaaagtcgaattatgacccctagaaaattggaagagctgaagtttcatggaaaaatgatgttttcctaatgtttgtctttaagtcattggcaggacatagtatgataggtgaatggtttagaaagctaaactggtgccctagagtggtgtcctttggcatcttttgtgtttaaatcattgtaaaatgacaaacattaaatgtatagtagagagaagagcagtgtggcccagagttgaattgaaaatgaccatgatggaagaggaaagaggtagactaactttgccaggtcttgtgagagacatggtcacattccagatggtgcgggaagtgacccgcacagcttccagtgggaatggggactcacttatagtgagcagagaagtgtcagctaagcctgaccaagtcggaactctcagaaggtgatcatggagcctgctgggctgcaggctgtgttctgagaactgcggacggtgtggatggagagaaagaggactgtctgcccagcgtccgagaagcctgtttgtgcacaggatgcctccatagaaggaaagggcagagggacttagttgaaaaggtaagttagaagagacctgcatatattttaagctaaacacaaagacacagaggaatggtaaactcaggacattttaattaggaaattggatcttcaccaataagaaagtctagtttcatataaagcgaggtggttctgcccatgggctttagaggcctcttttttttgtttgtttccattttatttgatgtttccaaacgtaaaaaagaaagtcaagattcttacaattcttacaacagttcgaatacaaccctctcagatgagaccatgcaaagcaattcttgtacacatacccttttctctccttcacctttgctgcttcatacggtgtgactgacaactggatggcttgtccttggtgggaaaatgccatttctttacaccaccacccaacaatttctacttttctgcaagtcaatttttaacaagttactttgctgttttcttttaaacattaggaggcacatggaactgctgtgtgtcatcccaaggattctggagaaccctgaccctgcacctcgactaagggcttcatgtccttgccagcttgcagcttccctccgtcgttactccttatgcccttaggtgtggcagtacagggtcccttgccgctccttggctaagctagggttgcttccatccttaggaccttggtgcttggtgctctgtgtccctttgcctcacacactttcccctcagtcagcagcctcgggtaaaaggtacattaggcagaaggaaagctaaatcaggaagtggtgtggggctggagcaatgtctcagtagctgagagcacaggctgcatttgtcatggacctgggctattccctagcacccacagagtggctcataactactgtaaccccagttccaggaactcatcaccacactctggggaaccctgaccctgcaccacgactaaggcctcattgcctttgtctctgctagactttacatctatgagcacagaggtttttccagcacagttgttcctcaaatcagctgggcattggctccaggaatcccacagtctttggataaagttacacagtcttttttttttttttttagaattatttctttattttatgtatataagttcgttgtacctaccttcaggtgcaccagaagagggcatctggtcccattacagatggttgtgagtcaccatgtggttgctggcaattgaactcaggacctctggaagaacagtcagtgttcctaattgctgagccatttcttcagcccgacatagtttttttttattcaacctgtgcataaactcccacattaaaccatctgcatattacttttaatgcttaatataatgttagcactgtgtaaatagctgccatgatatatatttggggaatggcaaagcaactgaacatggctagtgcagatgccatcttgcccatttttgacctatggttggtcgagtccttggatgcggaacctatgtgtatccatgactactaggaaaaaaaaataaaaaacaaaaaacgcctggcacacagtcagtatttgctaagcgtttgctctaacagttaatgaatgggtttaatattttttgtactaaactagtattcttcatcatcattaatgtcatgattaataagcatattggatgctattaataggctccatgtcttctctactgaggaattggcaaacttctgcaaagttccagggactaaatatttttgtgggccatgtggtctcgctgtaaatactctactctgttgttgtggcagccatggccatctgcaaatgagcaagcctggcagatctccaacgtgactatttatggatgcggaaatgggaatttatatattttccaagtaccacaaaatatgattttttaaaagtttttcaagcatctacaaatgtaaagaccactcatggtttataggccatacagaaacagacccctaaacaccagacccctaaggactccttgcttcttctccactgtggccagcttcttaaacaccatctacttagtggaagcttatcttctgtacttggtagggaatggctatttggattaaaccctagaaattcatctcggaggtcccagaactttcctgctgatcgtttctgggttcctggggaccttgttctcattgtatgttcatgatgttgacatttaaatgactttgcattttctcagccgatgacacatggcagcgctgggggtggcgcaacagtcgaggagcagagctgggcagagcccacccgggtttacaggcacgccattcttcacacggtgcatggttcccaccctggaagatcaacaggcctgatgcccagaggcctgtagctgtgagtgggaggtgggatacagcttcttagcatcttccacaacacatttcttgaataagccgcaagtgcttttaataatcccttgcagggttaattttagccatgccacactggtgttctcagtgcctctatttaagaaaaagaaatccagcgaagcctcacagcctattgtcaaagcaagctgtgatttggataaggcaacatattttcctcagcacgcatgaagagaaaaatggtttttatttgctgagcattttaatgcttataatttttttttccacatacttgagtttgcctggttctcacacaatcccacagtgtaagtggcctttttaactatttaagatgtcagtgaggagaagcagttagcccaaagcctggactcttcttaaaattaagtaacttagttttcattctctgtctgtgcatatctgtgtgtgggtgtgtgcgtgtgagtgtgtctgtgcatatctgtgtgtgggtgtgtgcgtgtgagtgtgtgtctgtgcatatctgtgtgtgggtgtgtgagtgtgtgtctgtgcatatctgtgtgtgggtgtgtgcgtgtgagtgtgtctgtgcatatctgtgtgtgggtgtgtgcgtgtgagtgtgtgtctgtgcatatctgtgtgtgggtgtgtgcgtgtgagtgtgtgtctgcatatctgtgtgtgggtgtgtgcgtgtgagtgtgtgtctgtgcatatctgtgtgtgggtgtgtgcgtgtgagtgtgtgtctgcatatctgtgtgtgggtgtgtgcgtgtgagtgtgtgtctgtgcatatctgtgtgtgggtgtgtgcgtgtgagtgtgtgtctgtgcatatctgtgtgtgggtgtgtgcgtgtgagtgtgtgtctgtgcatatctgtgtgtgggtgtgtgcgtgtgagtgcagggcaggaagccagaggcatcagcttctcctggagctggagtcacaggctcgtgagttgtctgctgtgcggtgctggggaccaaacttggatcctttcaagaacagaatgctcttaactactgagccatctctcagccctgacgcctggactcttgacaagacctgtgcccttctgaagtgcactccctgtccacagccagtctgttggtttcatcactgtgaactctgctccttgcctatctggagagtgacttactgatgaagaagctcaagagtcctgtcctctctccccctcccccaccaccgtatagagttctgggaaggggcaggaggccttcgctgatgacctcacacaccgtccctgtttaccagctactttccccaccagtcgttatagctactgcgcaattcttctgagcatgttgtcttagttccccagtttcatgccttcctcatatttttcaaaaaccttctggctaatgaggtgtctttggtgtgcttggtaaaagcaggaaggaattcagtgcttccagtcatcagggaagacatgacaggagctgggtctgtgggtgaaggcttggtttaaagatgttttaggtaggagtggaacaggcttctatgtcattctcctgtcctccaaaaagtaaaattgacaagtagatcactcaggtatctggggttccagccaaacagcgcacattatagtgagaagcacagtctttaaatgtgttcttgttacgtagtcgttagtggtctcgattaaacaacttcacatccttcctgaggctgtttagagaacatttctgtaagtgattcctgtgtctatggggtgtctatgtgtcttacagacgagaggaacaacttctcaatgaactaattggaaaatgtgggagaaagttgttttgaagcaggttctcatacagttctggctgcccttgatttcagtgtgtggcctaggctggccttgaacctcccaaaccctggggttgcaggtgtgtgtcatcacgctcagctagagtgttgttcttgaattagttccctgctatacacagctgtttacgtgttacttgagattttctatgcattcttcattatacccagtttttcatttgcttagttatcaacatttatgatgtctctttgaacccctcctgaaccttcctttcctcctctgtgtcggtcttagctacctgaatgtaatccagcgaggcaagtgcagaacagagagagagagagagagagagagagagagagagagagagagagacctaccatgtcctagcactcagttgtgaaggagcccatgatggcagctatatgttaactgggaggtctggagggctcagtgtacttgttatcatgaaagcgtcatagtcctgtccactgcctcgccagcatgagaaagttacggccacaaaggaggcaggtcttcatagcactgtataaggagaccatctcagcctgtgctgatggacagatgtggtgggtatattttacctctgaggaagggtcgtgctgcctggctgtagttgaccctgctgggtcacccgtctggtattttgttacctgccaggactcacagggacttggagatatagtaaattctctgagtgccacttccgcagtcagggagtttgtagattgtacctttacacgtctttgtttacacttgaatattttcttgcatgtacaacatcgttttctggtctttggactcacaagaaatcaggtggttttcatggatttttcctttcttcttaatacagatgtccagagggcttcttgggagaatattgccaacatcgagacccctgtgagaaaaaccgctgtcagaatggtggtacttgtgtgccgcagggcatgttggggaaagctacctgccgatgtgctccaggattcacaggagaggactgccaatactccacctctcacccctgctttgtgtcccgcccttgtcagaatgggggtacctgtcacatgctcagccgggacacctacgagtgcacctgccaagtcggcttcacaggtaatgggttcagccagagcacgtgctttccggtctccgtggtgacctgtactgtgcacgtctagtcctcagtgccttaccctgtgttagctacttctcactgctgtcatagaacacttcgatcacagcagctcagagcaccacagctccaagaagagtttgttttctgttagttctagaggaaggatacatagtatctagggaaggtatgggggtggggtgggaggtgggggctgcaccctgtcagaaagttggctggtcaggtttcaaccccagataggaagcagctcagctcacagcctgcccttgtctctgggcttcctgcagtaggggctccccaggcagcagtgccagctgttagataccagcctgggagggatgtttctcattcaaactcccacacccgggtcccccaactccagtgcacgtttagcgttataatacaagttggaatatggggaaaaggctcagggacacttaaaaaaatctgttaatagataaatgttagctattttaaacaagtaaaaggttaaaaatatggttaagaggacataaaatatgtgagatcttttatatagtatagaaagaaaataattcaagaacattctaaaacatcttttatattgaggcactgagaatcttctaatttgtcagatgagcagtcagtgcgtcctctacctttggagagtttgaagggatagagggggagaaaggaaaaaggtcagacaccttgaagtttctgcttagacactggcttttctggcttctccaactcttcttctccctacaacttactgacaaaaggagaattgtttgtcattttggtccctgctggagacactaaaccaatggttctataaatctataagccaaaatgaacagggtgttcaaaaaattagacttcctctcttgtgcttgaagaagcatggtcttgtttctctaagaagtgctcaactcggcaaccatcagcagacatgactgagagctgtggggtctcagctttgttgctgtggtggctggcatgggtggaaggacacagcattgggtgggcattgagggcagtttgaagaggtggcagctgttgggcagagtggtcaacagccagtaaacaagaggcgttcccagctgagaagcagcttaacagcggacctggagctaggagagcgatggatcctgaccctgggctgcaggactaatggactcctgccggcctggcttcatgtagccaacactcagtcccctcaggtgccctgtcccctgagtctttgagtctcaccttaaggcctcagcctctgaaaaacaccatttgtctgaagatcttcaggtgacactgctatgcgctgtagaatccaaagtctaggggtctccatgtaaggtcttgttgttcgctggctgggagacagagctgctgagtgtggggctggctccctttgcgagtggtactaagttctgttacccttcctttagggaagcagtgtcagtggacagatgcctgtctatctcatccctgcgaaaatggaagcacctgtacatctgtggccagccagttctcctgcaaatgccctgcaggcctcacagggcagaagtgtgaagctgatatcaatgagtgtgacattccaggacgctgccaacatggtggcacctgcctcaaccttcctggttcctacagatgccaatgtcctcagggcttcacaggccagcactgtgacagcccttatgtgccctgtgcaccctcgccctgcgtcaacggaggcacctgtcgtcagactggcgacttcactttcgaatgcaactgcctgccaggtgaggagctctctcttggctatgggagtgggggtaaaccaacctcaggatgaaggtggagggtgtacttcccagagcctcctttaggaagcaaagcagggggaaggagaagtgagagctttgtgtggggtgggttgctggcgagggaggggttttatgggctcactgtggtccataagtagagcagggggtaatttaacatgtcaagagtttatgacgatgagtgcttagaaaattgtttattgtcccttttggagaaacagttctaagaaacggccaggaagatctggagtggggaagacggtgagaaccacacactctgtgtgtgtgtgtgtgtgtgtgtgtgtgtgtgtgtgtgtgtgtgtgtgtagtaagcactgtaagccaaagtgacaccaagacgggaggatcagctcccttttatgcttccgcacccccacccccacacagaatagttacctctcttgcgtcccttccttgacttggggagagggtagcccttcccaccttgatatagtagttaaccctttcaccttgacatgggagtggcccttcccaccttcaagctgtggagacttgaaagaagctcttctgttaaccaaggcattttctgacaagctctggttgacatcgtgggagaaactaatcacgacacaacactttgccattctcttggctgctcagggtcctaggtacacacacaacccaactctgacacacagaggagttgtgtttgggggcccagagtctggtgatccttagagggagaaaggcgcaagcctggccagctcacttcactccatataaaagtaatgaggatgctgaaaagcaagaattttgattgggaacagagcacaagcagctggagcagatgaattactaagcaacaaagattctgtttttatacaaatacccttagcacaaaaacaaaagagaaaactgtgtgtggggtgtggggtgtgtgtgtaatgtgcaaaataagcaggattgcctcaaaaagaagttgttcagccactcttcgagtgggagtcctagactccggtgttgagtctaggactcaacacataatcggtttgtgtgtgtcatctttaggggcttaaaggtcataggtcaatccttagtagaaaaccaaatggcaatttatttgaaactcttttggtttgtttattttatgtttaagagtgttttgactacatgtatgtctgtacactacatgtgtacctagtagccaaggaggtcagaagagggcattgtagtccctgaaaccggagttacaggtagttgtgagccaccatgtgggtgctgggaactgaacctggatccgcacccagaccagcaaatgctcttaatcactaagccctctctttagagcactgattttcaacttcctaatgctgtgaccctttagtacagttcctcatgttgtggtgaccccaaccgtagaattattttgttgctacttcataactgtaactttgctagttatgaactgtaatgtaaatacccgatgtgcacagtatctggcccgtgttgcagtaagcggcatgtcagaaccctaagtcaagctggtcacttagccaagacagaaggaggtacatttaatcatactgctttagtttctctttcaatcaagaataaataaccatcattctacatgctaaataaacatttagtaagaattgctgtcacctatattatcatgtagaaggagagactatgatatctttctttatatttgcatttgtttgcattttaggacttaaaaacagaaagagaaatataaacaacttcctttgtagatattttaatattgcagacattctaataacctaatgtaatggcccaagtggctcataattgaagttagtgtgatttatggctgggggctgtgcgccattttcagtttcaagaaaattgcttttaatagttgcctagaacaagaggctgtttggcagcaagatattgaccggaagttagagaggtcaataaaggaagtctttagctggggagtgattattcacccgcattgttctgcattgttatccactaggcacgataaagcacctcagggaattctgagagaggtcaggaaaggcttgtcaaatgagaatggctgctcctccttgagaaaggaaataaccagggattccacagccagcggactgccagggctggagtggtggagtaaggaggtttgcctgaattccatgctgtgcttggtgtgtgtgtgtgtgtgtgtgtgtttgtctattcgtgtgtatgcacatgcatgcatgtgtgtgcacacatctctaatactttggaggtaggtattattttttgagtttcctcagaggaagtgtctagagtctggcatgttaagtcacttaatgagccacagctgatccttcctatagaagcagagccctggaacccaggcaggtcatttccaaagccagcacctggtgtacctggtggccgtcacactgctcatctgcttctgaggccactttggcgtgtttgacatctcattaaatgtcttgagcagtttggattaaaattaaacgtagtttacatatgaggaaaagaagacacttccattataagcaattagtgtttgttttgcattagcccaggtgtactgcacacagcacagagggctcactggactagtgcttgtcttttgggatcacctgatctgaggcagatgactgccttctgtgtgtatagaaggagtgggtggtgcacagcactgtgagcaagttaggcttttccagagtgtggaaggctcatgctctattctatcccaggagaggcccgggcagtgttcttgcaggcctcctagactttctttttcacagttctttcttactgtagttcccttctcactccccttccttgttcctgctctggacaggggattgagatgctgctagaataggaatctctatgtgttggcacacccagcctaacagaattgtcatttctgttgtcacagtggggaaactgagtcagcggggcacaaggcctcctgcatcccctgcactgctgtttcctgctacagtgcaggtctttgcatttcatatacatacatatatatatatattttttttttttggttaggtattttcctcatttacatttccaatgctatcccaaatagtcccccatactctccccgctcactcccctacccacccactcccactttttggccctggcgttctcctgtactggggcatataaagtttgcaagtccaatgggcctctctttccagtgatggctgactaggccatcttttgatacatatgcagctagagtcaagagctccggggtactggttagttcataatgttgttccacctacagggttgcagatccctttagctccttgggtactttctctagcttctccattggggaccctgtgatccatccaatagctgactgtgagcatccacttctgtgtttgctaggccccggcatagtctcacaagagacagctatatctgggtctttgcatttctaatcgtactctgaccactctatttaaaattatagccatcccctccatccccataattactggccctggcctcagtctttgttttctttttctgtgacacttagagtcctactgtatgatcggtaccctgtcatttcctccattatacctgttggtttttgccagttgtcccccagatcgactgaaggtcaggacccttgtttttgtttattgatcactgtcccaaacacctgaaaacagggcccttgtggaacaggcccacagatgcttgccaggatggtggggtgactggtgtcatttcctgtctggaatcctgcatctcaggattggccgcttttgtccaaggacactctaatactggataaaagtgattttgagtgttttcagttctgaaagttggggagtaggacatgttagtgattctgtttgcatggttaaggtgcaggttttctgcaaagagcactgtagttactgtgttgacccaggaagaaggaattcataccacaaaagtcattcaagtttgtacaacattgagagaaatgttcacaattggcatggacagtcctggaaggtactggcttttttttctctactctctatatggtgacttctcagaatgccacctggtctgcccattgctgtcagtgaaagcctgttcttgtaaagtgcaagggcctgtatgctgtgcaggctgagtgtgtgtcatctcctggcaggaaaggccttgtacttgtgtgtcttctgagctctgttgttggtgagcagaagtacaaccagcagtggttctctctaccatttccacgctcaggagtgtgtgctcttgtcttgcacattctgatcacaccctacagcttcacctttgtgagatttctttccaggaaaaactgccactgaggtctctcagtctgcctgagaggcttctcctctcctgccagcagctctccaccctcattgaaagggcctgaagacaggccgacagcagctctcctgagagacctgctctctgcatgggaggacatgccccttactgaatgttgctcagcagggtggcccacagtttcctaaaggcacagtcttaaaatggcccttctgagtttaattttccccttttggccttttaaggatgggagttggctttgagcagtggactccttgcgagctcttctgtgactgacgcatctaccttcccgtacatctgatctgcgtgctactcctccgacagacttgaaatgttttcaagaagcgatggctgtaacttcctgtcccaccctcacttttggatggagagtttctttcaagaatttgctagcccttttcagaaagatttctagatttttagttattttaatgtgattatttgtgtctgcatctctatttttaaagtgtcaatcatgccttattggggaggaatggatgtggcttgagtttgctcagatctggggacttttaacctatgctctgtttttcaggttgttgtagggcaggcagctctggggtctcataaaacaggctggtgaatactgagtggtgctctggttccctcctggatgctgcccactagccttgcaattctgggctagtgagcccagcccaattaccctcagcttccgcatttataatataagaggcttaaaggagatgatccccagcggatgctctaatccccttgctgcaaaatggtatgagctcatacgtttaagaaccttcccctggactaacaggtttattgagatataatttacacaccatccagtttcctcttatagatgtacagtagctcctacttgctagacttacggatttgtgtcgtcatctccacagtcaggttgtaatgttctcacgctgcagaagaaccacatactgtctgtttatatcccgcccatgcttcctaactccctctagtactgggtgaccatgatggacttcgtgactctctttgcctactgtgggtattgtatatagatggaaacacataccgtgtggcccctattcactcagtgtgacttggatgcgctacaacatgcatggtagaatgcactgccatacctttccttttctcgatgcccaatagtctctggcacagtcttgccaccgtgtatttctcagggggtgacattttgactctgagttctgtccagtgggtctttacctgggagaggagtcgctgagtcatatggtaacgctaacttccaggcgtggccagactcacaaggtagtcacactgcactatgctccgaccagtagccaaatagtattccagttcccacctccgtggcggcattgttgccgtctgccattttgattataacagtccagagggatgtgacattatccatctctttgtttcgatttgtgcttccctgatggcttgcagcgacaagacctggtccttatgcttattgtttatgtgcttgtttggggagtgtccactgagagcctttatcatttagtgattgggttatttgtattttttgttaagctgtgtaagttctaaaaaaatacatcctagatccaagtcttattgtatgtgtgactcacaggcactctctcccattctgtggctgcccccttccttccccctcactgtttagatgtcccgaggagatctatttttttccctgcttgagcttttggccatatttaagcaagctttgcttagctcaagttagaaaagatccactcctattttagcacctttatctagggccaatggttctcagccttcctaatgctgtgactctttaatacagttcctcatgttgtgctgacccccaaccatacagttatttctttgctacttcataactaattttgttactgttatgaatcttaatgtaaatatctgatatgcaggatttctgatatgtgaccccctctaaggatcctgacccacaggttgaggacctctgatctaggcctcttacaagtctttgaatgaatttttatgtgtatgtgagtccacgttcacccttgtactcatggacatctgattggttaatttaagtgttctttacatggaactcatttatgtttggagccaggtcctgggaatcctagcagcaatgtaggtggggatgctgtgctgggttctcctcagtgactgcgagtctgaccttggaacctatgtttttaacaaagcaaattcacgttctttctccatttccttttcccctacttacccattgatgagaaagaactatcttgaaaattatcagctatgaaaactgtctttcttgcttcctatggttttgatgaagtgttgctgtttcttaatttgtacatgattggtaaattcaatgagttgtaacactagctagtacaatgtcaaggtcccagttaacattccttttggctgagctacaagggcactgccactagcctgctaccttattcttcactatttagccttagtcatgtgagactaagttagggagatgatgtttttcttagggtttctgttgctgtggtgacacagcatcaccaaaagtcaatggggaggagcggtttatttggtttatacttccacatcagtgtctgtcatcaaagaagggtggggctgggacctgagcacagacctggagcagaggctgccgagggaagctactcactggctgcatggtagaggtgtagtcagaagcctccctttatcactacttaggggtgtgctttagcagttctacatcttcttgtgcactggcccatttgtaagactttcatgtaatagacagaaatagaagtaatttgataattttaaaaaatgtaaatgtatgcttccacagcttttaattatttctgtcttctataaggtgatttttggttttgtctacttggtttatactcatttatatgactgtcacaacatcagtcactgtgccatggttcagcacagcaaatcggatgtagagtccatagtagcttgtggttaggaaagaagagagcaaggcatgattgaagtctgtacccaacaaatagggcatctgcctatcactctgtggtaccccaggatgtagtgtaaatagaatgaggaaagctgtaagagatacgttggggaatgcaaatgtttggtcacacagtgcttcaaatacgtgctcactggccactcttcttagagctgacagggcttctcttctttaattcagaaatttggtcacacaggaaggaaagaaacttagtgacagtgacagagaaccaccccacagggacttagggtgagcctagtattttagagttgcagacgtgtggaagacaagccatgaagccttcacatggagagaggagcaggaagtttggaacactggcagttctagtcactaccagtgccacctctcccaaagcctgtgttactgtggaggactcttcctgatgtggcacttaccagtccagaaaggcaggctgggcaggtgtgttcagactccctaccaaatgaccgacgctgactcagagtttgtaatgctgtgcagtgaacagcttcaggtggggacgctgtgactcagctctgctcttcctacctcaagctcagtgtctcccctgtgtcctcccacccaagtcacctgtgtagttttggaatcctctgacctgttgtccaagaaaaaaaaagagagagacttaaatcttgttgttacaacactgttttctcctccagtttatttgttcattaaaacatttttcttgggttaggtaaaatttaagtccttgaagtattttcattccttcttaaaattagcgtgtgaaagtgtgggttcctttttctatttcatttggttgatcttctccccatgtgccccttacccgcctcccctatgtgaccctgactggccttccatgcttgcccccaacctgccatttcttctcacttgcatgcttttaggtccagtgctcctcctttaggtccagtgctcctcctttaggtccagtactcctcctttagctccagtgctcctccttccccttctcagaaatgtccggtttccctctctccctctcttttctccctcttccttccctctcattcccagcttcctccctctcttccctccaatctctctctgtccttttttttgtggaactggggcctatgtcctctagacaagcactctaccaccaagctctatgtgcagcctcaaagacttaattaatcattgattgattgagctgttctttttagtaatctagacaggagcttcggaaaatccaataccctggtgtttggaaccagttaatggttgtccaagtatacatttgtcttctctgattttatttcacagaaatgaatgtgaggtaactatgaacgcaagaggcatactgaatgactttcattgtctagctgtgcttaaggccaaagagtagaggactgggtatttcttgtgcagcagttgctgggatatgcactgaaattgcaaagcaggtctgtcctgtgaccatgtcctgctagtgagagcagaacactgtgttgtgagatcctcattgtcttttgttcttctttgatcaggttttgaagggagcacctgtgagcggaatatcgacgactgccccaaccacaagtgtcagaatggaggagtttgtgtggatggtgtcaatacctacaattgccgctgtccccctcagtggactggtaggttcagggtagagtacggcacgtggcagacgaaactcttagcaaagtgggtattgtgttcatgttaccataggatgcttagctgtcagagtgtgtagcctggcttcaattcccaggccttgagtgggactctcccgtgattctttgcccactctgaagtgtgttcacaggcacccctgggcaagaagagctctgagctcagagctgggacaagcactgttctgggttggagagcagagcttagcatctgtcagcctgtggtctggacacagaacgtgctctgtaggtatttgagagggaaaaaaattgtactttgatgcacaacaaactgtgcatatcttaagaacccagagcttacggtttatcttggacagacagctgtcctttcacaatgccaggggcaatgggcagggactcttggtgacatcatttctactatgtctttctccttttttgtatcttttttgcacagtggtttaaagtaagttttttccctaccactgacatgagtaggtcagttgtgcttaaatccttagccgttttgaagtttcttgtgtttcttaggtttgtaacccattttttaaaaggtgagtgatcttatgtaggtatttgtctttagattctgctcatgttgacctgtttatgactgacacagagataagtagaaactggttaagaaatgaagagctgaataaatagtctttaagttaattatgtccagatggtggtacacagttttaaccccagcacttgggaggcagaggtgggtagatgtttgtgagtttgagccagctggtctcatagcatgttccagggcatccataatggcacagtgaaactctgtcctgccccggccatcaagtttctatttgtgtacatgtgtgtgtgtgtgtgtgtgtgcatgtgccttcatgtgagcacacatatgtatgtgtgtgtgtgtatgtatatatgtatgtttgtgtatgtatgtgggggtgcatatgccatagcatcatctggaggtcagaggacacatcctggttgtgtctttatgctctcttttcaccatgtgtctcccggggattgaactctggacacggcttgtgcaacaggaacctttcttctctgcactgtctcaatggtctacactgaccttgttttgaaagaagttgattggcttaatgcggaagagggaggagtgagttaatgtgaccagagaaacctgaactatctccttcaggaaacagccagggctctaggtctctgaaatgtataattatttagagtgcctcagtactatagactatggatagaaaagtctaaagaggatttaaaacttagtgctgtgattgttttctggaagagcccgtaattctacttctaatccccgttcttctgagtgctttcccacaggtctagagttggacttctgcagtttcttcatgacgccctggtcccgggacatcattcctaacacctcctgacaggttttcttctctctagcttttaccactcctgtggcacattttttcagaaactgttttctcttccagcttagaaatttatcagaaagttaattacatgagaaatagtcactgctaatattggaccttattcttctgaagatgcagtatacagggttgggagaaatgcttgccagctgtggctctgttctaacctctgcttgttctgtggagtgtgatgcataggcattaggctgctgtcgccagggctcagtaactggtggtgtaacttcataactgactcttctgatgctgcatcaggctgcctgctctaaccttggttaacctggaagtgtcatgttagggaagggttctctgagaaccagtgtttaaccctggtgtacaggcagtgctttcctgcaatagcggtcttctatttggagtgccattctcccagttccttgtgtctgtagaaagggcagcagaggtcatggagaagtttcctcaggcagagtttatttctgctgatcactgtcatgctatgaccctcagcctctcgcttgcctcctccttcactcagaccagttctttgatttccaatgacgaggctgtgtctgtccttagatgaaaatccaagctcttccttggttgtgtgaagcaccacgccttgtgtctgtctggtttctagtctccgcatgcgtgtgtcagctcttctcaccctagcaattctgcccaacagtcctgtctgcacaagcaagcttccacatccggtcctcagccaacttccccttcctcaggtctcccctctgttcctctccctgcctcactcaggtgctctcctcccaggaagccttcccctccctccgtccaggctgagtgaggctcttgctcccctctggctgcctttcatttggatgtgtctatatagctgtggaagcatgctgtggtggagaggtggagtcacagggggttgagccgctgtggcagacattggtagctgcatttaatggctgccttctgctgatgctgagaaggcagaggtagttgtgtttcccaggagccctgtttttattgctgctagtgctctgagctctacataattgacaggaatgagcagagcttcaactcacgacttagatgtgtcagcatcttaatgtgctaattgcatattttctattagcggtataacctattgagtatccttcttattagatgatgatgatgcacaatgcatacctaaaagaattaaattatctgcccttggtaaataaatcgtgattgggttcatgttttaatctagatttattgagtttcaaatctgtggtctctttttttctgtatcaagagggctctgtgaggtggccttttattttttatcttttacggataaagaccattgaagtgcctttaatgctcaaaaattcaatttctgatttcattattctaggatttcatgatttgttttcccttcttgggaacctcaccggtgactctgaggttaggagttcacaccgcgtgaagggttcattgccagtgcgctgcctcttgcctgtacctaagagcctgctgcaactgatcataacccccctcggctcccagctgtagttgaagtctgcgctgcttggcctgcgtttgataggcaaagagggctgtacgggactagtgggagaggagaggaggtttctagcctgccccaggagagtggcagaggttacttggtagaaggaaccggcatgggtttgcacatccatggggaaatcgggaggttgcctcgtccttcgtgaggacagcaggacagttttgctccataagtgggttagcaggaaacaccacccttctcggctctagacctccaggtgaatagaagcatctccagttcggttcatcgttgatttgcagtgaagagtttctttttcttgggctttgtttatggcctgttataccccgtgtatgttacgtactctgtgggggtcttgacaatcagggtgcagcagtaggtcttgtagcctttgtgtttcttcagcagcatcagttatgatgaacactctggagcaatttgttatgatagctgctagtcatgtgcctgagagagtctgacgtgtgacatgtctgaattcaggggtgttgtaagtgctgcacaatacctgatttctgaggaggttgataggaaaaggttaaatattccatttgggaatgtttagagattaagtctcacagttacagtgttttagatgtattgagtttgaagggttaatttcacttttttttttaaagtggctgttaggagttttagaagcacccgtgtgcatctctgttgtttctgtgtgagaggtgctgctacagcttcaggggctgtgcagagctggctgctgctggcccctcggcttagggcagagcaactctgcctctgggtactccatggtgagcaagccagcctccttctgaccttgtttggcggtagctcctccccaggggctgggtggggctgttgtagctcagtacagagcttttcatcttcagtcactagtgagggttttcccaagtctacaggcccccagaactaggcagctctgctcacgtgtgttgggggtgggttgactgatggagaaagtgaatatgcagatattccttaggcaggaaagtacagagggttggtgcaggctcagcacagttgcatttattatgcagccgttgttggactcctgccttcttatcaggatagctctactctggcaaatgtccacggaagggaagaactttaaaaagccccaaatttatgagggcagtgtagattaatgttttgtctacatagatggttatttgaattttcttcttaaaggttcatttccttcagaattaaagttgactctaagctcaactcacaaattcctctgtgtggctgcttttggttttgagttcattcccagggcagatgtgattgattttcctgctctcattattaatccagaaatgtaatttcaacttgggcttggaacactgctttgggacacgaagcagaggcaagcaatgaaagttaggtaaatttgagtcaatcaagtggaccacatcttctcttcactctcctatataataaaggcagtgagccttcagtgggggttaggattgctcttgctctggtttcagaaagaacatctggcctgaatttgagtgcttgtgccagaggtgggccgcgagctccagggttttcgagcagagtctgtgtgctggagtttggatgctgagtgaggtggttctgctttggtcactctgattggtgagttgccctggaaacactcaccaccctgtgtgtgtgtgtgtgtgtgtgtgtgtgtgtgtgtgtgtgaagactatagggatggagcgggaacatatcttaggctgagacactctgtctgagaagatgggaaaacactcctcacacttcaccttctttgttcaccggttgttacaacttgacctccagcccaccttctggaatgctgccttcccacccccagttttggtttcctgtcagttgacagatcacccgggtgatcacctgaagcatccacatcctagaggcccctttacagctgataggaagccatgtgggtggaaacagctgcgaaggcatgggctagaccaggaaggcctcctgcccgtggttccttattcatatctagcttgggcctcactataggccagcagtgtattccaggtttttaagcccttacggaatgacagtgaggaaactcagaagcagacacctactgaacaactcacagtccagggcgctctgtgagtctataaagagcacaaagctaagacaagtcctaccttgtaagttttgtcaaaagaagatgcaaccctgcatggaatcactataagagatagaaagcatgaacaagacagagtcagaaagaggtgcggtgtgggttagaattaacacacccagtgaggactgagaaggcaaacctatgctttgactctctgatgttgactttgaattaagttttcagaaaacattagcagaatagaggaatagaggcaggtagagggagatagaggcggatgaggtaggtagagacaggcccagagcctcagatctagagttgtttttatttgggggggggggcagtgagttttcatgagaatctattacgtctgtgaggcaaacactgtccagtgagtaaaacaagattgaagccagaactgtgacaagtgttcagactgaagaaaatggaggaggaagttggaatgaaggaggaagttggtgcagagaaggaagctaagaaacggggatggaagagattggaagagagctttgtctgaggcaccactgagtcacaggctatcccacaagaaggcttcacctgctcacctctgcctgcctctgctgcagcctctgcggtactctgtctgctccatctggcttataggttcagcttacctggtagatcactggtcttactatatgtagcacactcctgggaccatttttaataagtgacagctcctggatgagtgagtgaaaaccaggagaggcaagagtgacaagatcccactctcttttgttgttgttgttaagaaaaccgatatgtgggtatgtgcacaggagtgtatgtgcatgcgaggggcagttgcctacagagtccagaggtgtacgatactcgtgttgctggagccgcctatgtgggtgctgggacttgaactcaggtgctctggaagactaatatgtgagcttaacaactgctgtctctccagctctgatcacatgtattctttacatggttgaatcatggtctgtgatgtgcacatagcatatttttgtatgcattgtccgttgatagaagctttcgttgtctctgtctcctgactgatgtgaatagtacttcagtaaacatggaaacagatgtctccaggatgtattggcttcttttccccatatgggattgtgtgtgtgtgtgtgtgtgtgtgtgtgtatgtgtatgttccatgtgcatgcagtgcccatagaggccaaaagaaagcatcgaataccctggagctggagtttcaggtggttgtgagtcaccatgtaagtgctgggatttgaacccagttcctctggaagagcagccagtgctctttaactactgagcggtttctcccgcccctggtagttctgttttcaaactgtgagcagcttccatcctgataggcattcctatcaacagggtgtaggagcccacttttccctcatctccacattatagtcagcgtttgctattggtgtgtttttgatggagcagctcttctggggtgagagtatctcctggctctggttcacctttcctgctctcatgggttttccatttgtaatctgggttgtaaaaattcactttatagtgtagttatgacttttgaaatcttagtgcatcttaatgccttgggctgtgagtgcagctttggtgcaacacatcagttataccacaggcatctcatgtgtgtggcttcttcatcttggctgagtttcagtcaattaggtaactgtgagtgatgtgacgtcttcagggatgcactctggtagccatcgggagctggaagctcttggataggctgtcttcatgtgtgaaagcattttgctggtatagaattcttgggtctccagtgtaagctgggattttaggcatgtctcctttgcatctggtgatgagtcctgggtgggatgtttcttcctccttgatggtcagcatcactgctcttgatgttctccctgtaatctcttgaaggccatccttccctcccacagagcgcagctcctctcccttgctatttcagcctgtcttccttttcctttacatcttaggagaacatttatagttccttgtcttctgttctgtccttcacagcctgtgaccctgagttttatttgcagagcatttttgttttcttgtgacacacagttatctccatccttcctgtctcttctgctgcttctcagccccttccactgaccctgctgttcagtgttgttttagaacccgagtttgttagtgtcttgagagcggagaaccaactctttctcagtgtgctagttcctggcaatggatatttttacagtgtgttctttatctgatcgtatgtggcacacatccatactttatattgcagaaccttataatagccccatggtggagttttccactctactcattctgcacaaagtaactacttgtctgtgaatagagaaattctgggctgtttggatcccctcaccctgaacctccctgtgaggtgagggctctcccgtgtcaattggcttagaagtgaggagcctaaagaagtgggtatggagccaacacatgggccttccagaggcgagagtgaagcttggcattaccttcctctctggagaagcctctgtgccaggggtcagcttcctgaatgccagctttggctcagctctccacagaggccaagcccggctgtgctttggtgctgttgcatccggagtttgccccagatgcaccacagactctcttgttgctatagtggccacagtggccttcagctcctctgtgctttaaattgctgttgacctggaggggtgaggtggagttcagcgcattcttcctgtagctgggcaggctttctgaaacacaaatcgcatgtgctgtttctttccttaaatgctttggtggtgagtccttggtttgggatggagttgcagagtgctgcatggaaccagctctctgcatctccccactacccatgcacgccttgcaattcagctgcaccctctgcttctcattgcctcaagtgagccatggtccttcttattcgaagtgcgtactccatgtcattctttgagaaatgttctccacgccttctttccacccacacatacactcgtagacagcctgccctgcccatgtgtccctcgggctttcatttcccagttttgttctctagctctctgttctcctgaggcaacaggtacccattaaaatacttgacaccctgtattatcgttgtttgtgtgggatacccactatttgcctaaacgtctacagggtaaaaaccagggctgctttgttcatgggtaatcccagtacaaatagtccagacatgacacagcatgtgtgcgtgtgtgcgtgtgtgcgtgagtgcgtgagtgtgtgtgtgtgtgtgtgtgtgtgtgtgtgtgtgtgtgtgtgtgtggtgaggcaatgaatgaatagggaaattagattttctggtgtttctcatgccatttcccccctggattctttgttgagaacgtttgtaaattgagctcacctcttggaaagatgatgtttggcagtaaatggaaagagcttacagagatgtctggcatctagaaataatttaatgcatccatttttactgttggaggtcagtaattgtgagacgggacctctcttagtgcacccttacaaagatgacggtgctcttaggaggactgcaggactctactgcaggccgctgtcttggaagatgtctttagggatggggtagacttcagttaggaagaaaattgtcatcgctgcatggattggtcttagatctagtgaagtagattaggacagaggcaaggggaacttggtgtcacattgagatgtcgtttagcaaacagggtaagggacttggatgaggagttcctgagctgattggtggatgtagataaggacagaaggagactgaggaatggacagaatcgataccctctgttgctgttggaaaagtaaggttgctattctattgagattatgataataagagaagacagatcaatcacttacttaataaattaacattcctggatattattagctgggttttttgctaagctgtggggattcagcaatgaggtagatggctgccatcatttctctataaggtttaaagtcctgaattaaacaatagtgagaaataataatctatgtataaaatctgatctgtagggaatggcttgcaaggttagtagagggtgagaggaggtctattaatggggaaaactaattttgttttggcagaaaaggtctctgggggaagatgacatttcagatgtagactgtgagtaagagttatgtggggaaggcagggtaagaatgtccccaggcacagggaaccacgtgtcctaacgtcaaggtgaaggacctcgaccactttgaggtatggacaaagaagtggagaagctggtacagaaagcaggacaagtggcggaatcgtatcccaccagagacaccatcagagggctcagagaagaggtggctcaatccggtttatatgttaagatcattctggaagctctctagaaaatggcattggtcatgatgtaggaaacaaggttttgaggagtcctgaaggagatggtggtatggaattagctctgtgaacttcccttcttccttcataccttagccactcccaccctcctagggagcaggtacttgggcttccatcaagtgcatgtacactgcaaaggactagttcaatcaccaggagtcctgcaggcctgtacagccatatggcttttcctctgctctttaacttgagaaataaactagagtctgcatagagaaagtctatagaataaaactggagaaatgctctctgtggcctggactcgagtgattgcgggcgggaaggatgtgtcagaggtgaatttaccatagaaaggaagggaacagggtcagggacagtctaactaaactttatgcttcttgtgtggggattattgtcaagatgtgtgttgactcttaatgtgcttgaatattaagagtcaaaatattccctgcagaccttgaagtccacagattggggggggggcgggggggcgaggcatattcagagctcaggtctctgtttccctgagtggcctcccgatctctcatcccatcttgtaactccaagtcagagagatgttttttgtgtggtgcattgagaagtaccctggcctgttatagttgctaaatgttttttgtgttaatggactgtggctcatttggcatggcccaactcttacaaacccagtgtagggccttatttacaaatggtgggctggtgctgtcttcacctgcaaccctgctgagctctcttccgagcttctcaatccttgctgtccctcaggagtcagctcagattcctttcccattctgaaagttgacttctgtagcagtctgtcagtcccacccttttaagcacatatttccattttgaatctgtgtttctagttcttctgtaaagagctattcacagttgggcaggttagcatacttctctggccctactcctcatctcgagcataattggatttgttgctgtctaaagtctgtttttccaccaaccccaagtgtatctggcataccttctgaagcagatggtagatccagaccctctccttgtgaaacctgtagcctaatgggaggagggatgagagtcgtgggataaagtccagctctgccagattccaggacagatgactggaacagtggcagtggtgagtctccgggagatgggcatgtagaggtatggctgagtcacaagcaacgtctgagggatggtgagtagctaaccctgcaattggaaggggtagagagcataggatgtgcggagccctgccataggaaaaaaacccagcattagatgagctgccagaagctgttgttggtcagagaagatgtctgaaggggagggctagtcttgtgtgacgtacagggacaagccagaaagttttcggtagcttcagctggtgtccgtgtttagagtatctgccagctgcagactggtgagtgtgatgtctcagaccaaatggatcagggccccctgtgactgtgttagaaagacaagccctactcttttccttctgcccgagggagtcggagagggcctgagcagcccattgctctggtcccaaggttaagtggtggcagcctgcagcatctccaagtgaaaattactacgaggtgattattgtcctctgaagacttgcctcactgaactctgcagtctactcagggagttcacagcgtggtttgtgttgacccagatgacagggttgccaagaccggggccgggcaacaacacaagtctcccttcccaccgcacactttgatttgctaggtagctcaggacttagtattctccctctcttcctgctaagcatcacttgtccttgccctccctgtattcacagatgatttactgtcaatcatgtcttcccccaactgttctttacctgttacatcaagtccagagttcatattcaaatttaaagtcttaaaccatctctggccttttaaatctccagtaggagagtacaccgcattcatttgctgtcttctagacctgcctgtgttgggtctttcttctgaagtaagcctccttcctcccacaaaggcaagcactgtgttcctgaggggaacgagaaaagtcgaatgagcagagagcatgcacccagtgtcctttgagtgccgaattttcccatcctaatctctcctgacctctgctctgctgccttcactaggatggtctttatctcagacagctgcgccttctcactggactttaggaactgggggcagggatgaagatgtagctgagaggtagagcatttacttagcatgtgcaaggtgctgggttcaattccctggtactgccacagaagcccctgggctgggggaggggctggggtttagagttggcatggtaacggttttggtgacagcgctccctgagcttgggaagcttccttgatgctgaaccccccccccccccccactgtgggcttctttctgcctgggttttctcctgctcaaagcagatgtggacacgaagtgtggtatcctaggaaacgtcttttggaagttttggagcaaggggttgtagtaactacccaggctaccgttttcagcatctttgaccatagagcttggtgacagacttgtatgagggagagggaaagaactatcagaaaggagtctaggaggttcttgttctacaacctaagagtaaaaatgatgtggtttgcagaaaatcacttctaagctggggtgtccttagctgtctgtttttgtgtctagcagtgtcaaatggacatatagatgcagcctcattgaagcagccgtgagctgcccacccctcaagcatgtttccatttcaggcagtgcattgctgctgtaagttccccctaatccagcagagtgactcatggccttggtcttcacatnnnnnnnnnnnnnnnnnnnncagcccaccccccaccctaacgccaccccttgcatgcctgtgcccttggaaagatgcagcctgtagcgctggtccgatcctgtccgactcacaccacgagtctgtgttaagtttagtgcaaggtggaccagttacagtcccagcttccctgcccttgctgcctgccagtgactcctctgagcccgttgttcagttacaaatgacatggtttgggtggcagctcacaatgtctgcttcattgtagacaatccagctattactatcgtttcccaggagtgtcaggtttctttcccaaggaaatattattttacctactttttatttcttactcagtctctcttacgatagtatgtataaagtatatttttaaacacaacagtgtctcatacccagatttatctcagggcctcactaaagaatggtgacacggaccatgctagcattccacacgtcagggaggttcaggggcagcacagccgactgtgttagtgtaagtgcaatggctagactcagcaattacccaggttacaacagctctttacctactttgtggtcatgtatttatttctcagccccgcctgaatcctaataacacagctgtcattctttgaagtagcatttttgctagaagcgtaagggagcaaatgttttgtaccgaatgacgtcatctatcctggggtgggtgtttgcactctgagctcttcagccttcgatctgttgcccgctctctctctctctctctctctctctctctctctcctttactcagctcctcctcccttcattctctacaccttccatcttctctcctctccctccctcctctcccctcccttcatcacttcctccttccccttcttccttagtcattcactccttcaatctttcagcacgttgcttaccacctcactcattcaccccatcactcactcaccctatcattcattcaccccatcattcattcaccccatcattcattcgctcactcactcattcattgcttttctctttcactcgttagcccccttactccctcccttctcaattagtctggctggagtcattgatacttctggtagcaatcggtagaacctcctttcagatcaagaagcttgctgtacaccgagagcctgctcagaactgtgtgctgatgggtgggctcccagccagcttctcaggagtgacaggagccagtagtcttagtgctgtgatgatagtctactttgctctacactttaccatttccctgcagaccagccttagccagtcagtcctgtggcagggtggtttcagtccaataatggaaagagacacagtgatgtaacttggattggatgccatcctgcatccagcagtagggctagatcatggtagtcatatgcattctctcagaggccctgcaagtgaagcaaggggaggaacaggaaggtctcttaggggagaccccaaacatccacatctatcctgtcaggcaaggtaatggcctctgctgcaacgacacagaagccccagacagattgtttgcagcgagggagcaggagaagaatatgtaactaagcaagtgacagttatattgcttctatagtagagaggctgaaggccaaaccaggctgaagtgtgggtggtcagactcatttagcacaagcatgaagggaagcggccacagctgggcacagtatgggccttctgtagatatatgacttaggaggtattccggggactgtggggagctttagtattttttaattcattaaaattaatctaataaattaataaattagctttggagacagggtttctctgtgtaatagccctggctgtcctgggctcgctttgtggaccaggctggcctcaaactcccagaaatctgcctgcctctgcctcccaagtggtggaattaaaggcctgtgccaccaggaccaactggctttagtatttttaaaattcaagcagtctatgctttttttttcataagtagattcctaatcagaatgccccttcaattgatcattgacggtttatttatttacttacaaagggggaatgaatgactttttgttgttgtttggttttagaatttgttatggtttagagaatttagatagtctaattttaatagcctttgaagaaaaagctggttttaaaatagttccaagaagacctgcttattaatttgtttataatccaggtggtctgagaccaaactgcttttgtggatcatgaactccttgttgtaaggagcacaaaacatcccctctttctgtgcccaggacccttccagcagttcagtccccatggtagccagcactcatagctcatctgtaggagcacatacccagcagtggtccttcagtgctctgtcggacgacacagtgggcctcactcagctcctgtggcattgggtggaccgtgcccctggggtgagacacttgggtgaactgtgccccttgggtgagacacttgggtggactgtgcccctggggtgagacacctgggtggaccgtgcccctggggtgaaacatctgggtggaccgtgcccctggggtgagacacttgggtggaccgtgtccctggggtgagacgctgtgctccattttcattctttgtggctttttctttcacatctgtactttatggaggcttttgtttattcttgctcatccacacttttaaaattgttatagtctgttttgggagaattcatgagagataccggggaccctttcctagtggtctttgctatgtgaggtgtgtgtaccgtgtggaagccagggcactgacacaagcaccatccatgtctctccttgctctgtccactttcaattgcttacctgcttgcattctttccttcctctctcctttccttcttccttccttccctccctccttccttctttcctctctttttatgtgtatgtttgcatgtatgtctgtgcaccacatgtaaaccctcagaggccagccagaagagggcatcagactccctggaactgagttacacacagctgtgaagtgggtgctgggatcaaaccctggtctctcagagagcgcagtgagtgctctgaatgcctgagcagcctctctagccctacttttctatttcttggcccaagaaattggctaagacaaggcacctacagagtttggctagttggataggttttcatgttgccagagcttcgagaaaggccatttctgttctgataagtgttatttggataactcagggtcaccttaaatttcataagaggacacagattgctgtaggtaccatttacatcaggctcaggcagctcagtgaagggctgttagggtgccagtcatttatgacctaagggtcctaacccagcatctttccccccacagggcagttctgcacagaagatgtggacgagtgtctgttgcagcccaacgcttgtcagaatggaggcacctgcaccaaccgaaacggaggctatggctgcgtgtgtgtgaacggctggagcggagatgactgcagcgagaatatcgatgactgtgcctatgcttcctgcacgccagggtccacctgcattgaccgcgtggcctccttctcctgcctgtgtccggagggaaaggcgggtaagaccaacagcacagctgagctagaggtggcggaggccggagtgtgcacactctggccttctcttccctgtggcacctctgaggaccattctggaatgcagtctggtagtaaagggcagtcatcttccctagacattctgttccagtagaattccccaagactctggccggagaaatccagactagatggccaatccgtggactcagggagacagtttaaatgaaatacccatttattcagaagagtgtgcctctaggagtctcttaggaagaactctttagagggcacaggtcaccttgttttctggacagcatctagttttaggagtggcggagcactgcaggcaaacccactagaagaagatagctcagtcaagaaacctgtacctggcagtcttgagacatccttgtgtttctgcctttcccaaagccacacctctagctttgtggaagaagtcttggccaattgcagactggaaaatccggttcccaccagaactctgcagagcagggagcctgatgcctccctgcttggcttcctcatgcctgggcacttggcaggtccccacccccctccccctggcacctgatccaggaatgtgctgatgtgattccttgggtgctggagaacagacaggtggtgctcagctctgaggctcgtgagatgccagcgagccgtgctcactagggagtgtgacactggagaaggaagatgctgggtcaaactctggaagcacggagtatttgacacatacttacatgaacacttaccagaaatccagatttaactggacacctgcaatttttgtttgctaatgctggtactctccacaggatagctccattttcccgtgttcctccacaaatacatgcccggccctgagagctctggcccagagtgctcacctatgcccaggttgtcagcggcagctgagggctgtggcatgtccctagtgtagaatcaggtgaaggcaatgttgcctctgggtcttaattggtttgtttggttctgcttttgacaagaaaaagcatttctctaagagagattttgtgtgtgtgtgtgtgttttctctcgctctaccctgagacaggtctcctgtgccatctggatgatgcctgtatcagcaacccttgtcacaagggggcgctgtgtgacaccaaccccctgaacgggcagtacatttgcacctgcccacagggctacaagggcgctgactgcacagaagacgtggatgagtgtgctatgggtgagtgtctggcatctcttctagacttggaggtgtgtcgtgtcggctcagaaagtgctgcagcgggagtgttctgtacgttagcgactgctacacccaaacctgaatttctgtttcctgttctacacacgtaatttacaatcaacctttactgtacatgcattctgggaattcagtgcaacggcaagtctagacttgattattaatagacgctcctgagctgggatgatggctcagctgttaattatgtactacgtttgtagaggatccaagttcaattcctagcacccacatcaggcagctcacaattccgtgcaactccagctccagggaatatgacctcattttctggtttcagacatatatacatgcacatagctaaaaataaataaataaaatgaatataaagtcctacctcagtaagagtttaaaaaaacagcacacatttggagaccactcttgtcatttcttcttataagttaacaaataaacctgaaaacagagtgatcttgtttaaagtggggccttgggttgtagattcctgactgccctgtgttatctgtctttgtgggaactctggcaagcgctcggtcctggtaactggttcttatgtgttacagccaacagtaacccttgtgagcatgcaggaaagtgtgtgaatacagatggcgccttccactgtgagtgtctgaagggctacgcagggcctcgctgtgagatggacatcaacgagtgtcattcagacccctgccagaacgacgccacctgcctggataagatcggaggcttcacctgtctgtgcatgccaggtaaggagggctggtcagctgctgacaggactcactgactccatgcactgagccagcgcggggttccccagctgactaagagagctgagcccgggacccctgcaagccccatgattgcagagaaagtaggagacaactggggtggtcagagcagagcagaccaagtcagacaggagctccacctcaggctccagcttcacacagtgggaagcctccggagccgtttcccaccggaaccctctaaacatggagtgtcctgatgctctgaaggatcccgtgtgccatcccatctcacttacagagctagtcgttagccacacttaatgcaggcatctgctgcttacccagaatgagcccctagctcagttgtgttctggagcgactcctcagtggacaaaaacagaacgacgacgtgacagcacaggtcagctgttctgttaatgactgaagccagcgctatagcctcggcaggagctccccctagtcctgaccggcaccccaagttgcaccacttcagttggtcttaggaaggcagtggggaaggggtccagaaactagaagttatccaaaatgtgggagtcttggtttgcatgctgtgtcctggggtgtacccttgcattggccttttttcttgtcgctgtggtgatgtacctgacagaacgaattaaagtcccacaggcaagtcagtccatcgtggcagaggaagacatggggcagggcatgtggctgcagctcctcatattttggtgggttgggaagcagagataacagaaacaaaagcaaagctattgtcctaaggtcccattgccagtctaccatctaggccccgtctctctcccacagctgtcctcgccgccaccagctgggactgggtgttcaagcacacgagcctgggaggggatttcacacctgtaccataccaaccctgcctcttcctcacattggcaaaaatgtcttacggcatctatgttttgtccactacagcgactactctatcatagtgaagactcgctttctttggagagctgctcatgcttgcggaggtttttagctctctctgcacatttttgcttccttggctggaatgcccctttatttctgtctgaaccgcatgtgtggtccatttgtgcaggtttcaaaggtgtgcattgtgagctggaggtaaatgaatgccagagcaacccgtgtgtgaacaacgggcagtgtgtggacaaagtcaaccgcttccagtgtctgtgtccccctggtaagcgcctgccacctgcccctgtgctctccaaaaccccaagccagccaaccacaggaaggggagggggagcgagtgcgtgtgggccgagcatgaggaagtcattaaagtggctacttgggaagagactttgtgtatgctgaggtggggaactgtttcagccagcatgtcttccaagacttttgtggcctgaagtccaagtctgttctcgaacggcccctgacctccctgtctgtgtgtatatttcagagtgctcacacctcacagaagcgcaggattttattttttcctcatgagtcatattcctaaatcccaagacattttattccattaagtccaggccggcaccacacatcagatttttttccaaggtcctgtgcctctgctgatgttgaaggcctgccagctgtctgctgtggacggtggcttttctacttaatctccaaagagaagatcctttcagtctggggatacagttactggtttgagactccatcttcagtagtgtctcagttcctcttgctttccctggagatggacctgagagtcaggggtagaaccccagtacctctgacctccgagctttgccttggtgaccccttggcatacactctgccagtgattcaaccactgtttcagtaaaggaagatgggtcagtctctgatatgtgtcacctcggtgcctcttccaggcttcacaggaccagtgtgccagatcgacattgatgactgctccagtactccctgcctgaatggggccaagtgcatcgatcacccgaatggctatgaatgccagtgtgccacaggtaagtgtcagcccctcccatccctttgaggcccctctgtgggcaaggcgactgtcttcccctagctgctcggaggtagagcataaagggtgctgccctcctctaacagccaggggctggctcatgctttcgctgcagacctcctactgctgcagacctcctgctgctcttacagtccttacctgtagcccctggctcattgtcaccacacagtagttctgcccacatgttcagctggtgtctgtgtgtttatggaaagggtttgggcagcagtgagcttctagcttgcttccctggtaccttgggaataggagaattctagaagaaagctgttcttcactgaggctctctacagggtctctgtgtctctgagtccaacctttgtgcagtgtagatacagatgtccttgagagttggctgtgtctctctaggaaggtgctccctgcatgatctgattctgtattctgagaaactttggtaacacatttctgggtcttggaccatatttctcacatgggaatgggctttattgagctgaatgactacagcacacttgctgtgcagatgcatggctcatcaatatggagaaagccttaaactattcaaaaaggaaacctcttccttatgtgattctgagatagaagctatagggagagagggctggagcaagagcatttgctgctcacgcagaggacctgggcttggttctcagcacccacatagcaggttccaaccatctgtaactccagtctcagggaatctgacaccctcttgtggcctctgtgggcatcacacacacacacacacacacacacacacacacacacagagttcgcatgcatacatataggcaggcagactctcaaagtcatgagtaatgtcagagcataagttagaaacaggtttttagcatgtaggccttgtgcctctgatttctctcaggtctcaggaaagcacactctgttcccatagtggtgcagagctgatgtctgttgtaggtgtggactctgctgagctgccttttcctcgtaggaacgttgcctcctgttggagatgctccagacgtttctagcctgcttctgtggagcgtgacttcacagcagtgaggtttaagtcctagatctcatgtttaagggacaggagggtgctgaggtgctcagtgggtactaacacctgccgcacacccctaaaaacatgaattcgactcccagacctcggggagcaaggagggaacctactcccaaaagttgtcccctgacttcaacatgtacacacccacaccacccatttgaaaaataataatttaaaaaataagtttaaacaataaaagggaggaaagacctccttggaccctttttaggaagaggtgggacatggatcaagttacacctcagttgtgggatgcttacttctctcattgtctttcagagagtcacaagtggatcattcattttatttaatgaatacctatttagaaattagtagcataacactcttggacgggctctgagactctgttctccagactcagatctgtaagacggaatatgtgaagtcatagtcagtgcctgtgtgctgggaggagagctgctcagaggcagcatgcaaggaggaagtgtggagtgccttccttccctgcaggccaggaagcaagcacactgagaagagagcagcagaccccaggctcaggcacaggggcatatccgttctgcagactcctccaagaatctgtgagcacggggtccccaagctcgaattataaatcagacaggcaaggccactgctcaaagccacctgtgaagattgctccagacgtggggcatgcagggcggctgggcaggccgcctttgggtgtagactcagcgtgctccctggtttcaaaggctcctcactaaaattctttctgcaggtttcactggcatattgtgtgatgagaacatcgacaactgtgacccagatccttgccaccatggccagtgccaggatgggatcgactcctacacctgcatctgcaaccctgggtacatgggagccatctgtagtgaccagattgatgaatgctacagcagcccttgcttgaacgatgggcgctgcattgacctggtgaatggttaccagtgcaactgccaaccaggcacatcaggtaggacagtccctccttctctcagtccctccatccagggcctgctctttggcattgtcagctaaaagtgacagctttcttcctgctctgtgtctggtggggcctcaggaatttcaggcaaaggtaagaccttggtagtttcgaagtcaaatgcctcaggctcctcacaggccacctgagcctagagggaggctgcttgctagacgagggcctgctctgtcctattaggagttctggagctagttcactgggcagctacatttcccagatttcccagaattccattttacctgtgagaggaacgatcttggacacagctttagctggagacagagggatactgtgagagatcaaagggaaatgtctgagtggaagattaaccagtgtgagccttgcggagcagagggcctactggatacacggggtgatttgtaggggctcatcctggacttaaggaagtcggcctatggagggggcagaggcaggggagtggggagctgccctgatttcattgtgttacttcaaatccatttcttcaaacttgtcaaaggtcctggtcttcatccagggcctcacacatgccaagtttgaaaacaaagtcctttttgaattgctcaagcatacgaaaaacatcccatgccttcacagctgagaatgtgggtcccctccccacatttagataactccctcaaaggactgaatagggctttgtgaaaccttccaaaagcaatttgcttccgggctggtccccagacatgagaaattgcagtacgaaggaaaagtgagagatttacaagcagttgaataggggcctttagaatggaggggctgtgttaggcttgctgtctccctcattgtaacaaacacgctggaaacctggcgagtggtgggttggcaagaacttattttcctctgggattatatccttgtgccagagtgtatcaggtatactttccttcagggacagaggcaagaagttaatattcatggtttgcagcaggcagcatgcagagagaggccagacccattgctgcagctgtttgaagagttagagcaaagagctgcaggcaacatacagacttgctggtctgtgttcagtagaaaggagctggcaggtgctgccggcctggctggaaagtccatttaggggacagtgtggatagactgtcacggagtcacgatttctgatcgatccaggtatcatgcagtctctgttggtagtttgatgtttggaaggaaggaatcatcatagcttgctcaccgttcctgtggtttccactgtctgggtgctcaaagggagagacacgctcactgttagggtcttctctcatctgtcctttataatgataaactcttggaataattagttctcttgagtttcaagtcacctaaaatggcttgatctagcataaggaagagaaaacagaaaagcagccaattcagcaacagcatagaagtctcctcgggctctaagaaacagtagaaccccagaccttgtcagaggagagctgcagacctgaggccccagagggctgctctgccagtgtagacgcttgtgggcagctcagctgaaccaggacctcagggtctggagctgtactggcatgctaggacttcatggactgggggccggaggctaaaaggcccacccctgcatacaggaatatggaagcttgtctctcattaatggtcattgtggttagcctcagcgacataggagggctgcatgacattctggagctagcatagaggtggtaattattaacaaatgtctgatcacttacagataggacggttggtgagtgactcaaatggtgacatttggtctaggagctttatctgtattcttacatgagattttacttttacactttttataccacaaaacagtctatggaccccacatagcttgcttagatgcactttaatgattgcagtatgttttcttgttttgtttgttttgttttagttaaaatgggattctagaacggtaggctgccgctgtttcagttcatggttcaggccatggctgctcctcctggctgtgatgctctctcaacctgagggctgagagttaacaagttacacagtgacagattttattgtcctcaccaaagccatgaagcgggcatgtgtttgtttggctgtgggtatgtagatatgtgtccatctggttggggcctgcagcctggatcctggcagagatgctgacagttttgcctatattgcctttgtaccgtttccatgacaacagagtagaagggacaaatcatggctaagtatgagtaatccagtcctcttggcttctcagttctggcttctgtggactgtacttggcgatgcgtcgctttgttctgatcggatggcctggatcccctacagacttctgactgagtagcaccacaggcggaagtgctgacattcctgtggtaacacagaatcatttctctgggtctctttacaggccttaattgtgaaattaattttgatgactgtgccagcaacccttgtatgcacggagtctgtgtggacggcatcaatcgctacagctgtgtgtgctctccgggattcacaggtaacactccttgtctttggagggggcctcctttagccccatcaagctgggaaaggggtccctcagtgaaaatcactttttcacctgtttcctgtttctcatcgtctctggaaggtttgcagtctgctctgtacttctctttctgttccagaccttcctaagtggaaacacagcctttcctttagcgtttcaggccacgcgtgtcttgctccctgagacttcctagcagatggtaactttccatccccgtgcttgggttaatgcctgcaaagccacctttgcttccccacaggcagaggccagtgccttctgtaaggctgtgtccaaggtaaacgtgcatggaaacactggctgctcaccctggggtctcgcctctcccgggagcctgtttggggagggcataacttgaggagaccaccacatagtttgtctacagtgagcaagatctttttgcccatgaaaagaaagtagattagaattattctgcattgtgactcttccttaggtatgaacctctagagagtttgcacatgtgcccataggtgaagtataatccacacattctctcttcttccttttccttgttaacattaactttgtcatttatgtttctggaaaaattatcgtagaggctccagaggaagcctgggccctcactgatacctcatatcggtgacagtcccattgttaggatacactgtgtgttctgctttttctggacattaccacacatgtgcagacatatataatattaccctttagtaactgccctatggtcatctgctccccaggtgtgtagcccacttcagagcttttggcagagcctaaggacagtcagagccaggtgaagagagtgctaggtacccagttcctctatgccagcggtatgacatgtcaggaacttttgtggctttggtggatctcagttcttcctggtgactgagacgccagtgtggtgaaggtttcatgccctgacccactgaggtagcccgatgaatttgggcatcctgaaaactgttctctcaaatacgtgggagctgactaaatacacagacctgttaagtgtaacaggaagaaaatgcccaatttgtatgaacggcttattctgagctaggaaccaaagatgctgtctcacctcacttagttgggatagatgctactgttcctgtggtactgaggagagggcagagagcgagagacgcagggtgatgttcccagtgccctgcaatcagggtctttcccaggcgtctacgccagagcccaggctcattcccattacatggccaagggggagcctgttacggtttcttctgggatttatgtaaggcttctcaccggttttagtttttttaaatgtcagggaatcatattctgtctgtttttaacatttagcaaatcaacggggtcaaagagggggcacataggctaaaaatactctaaaataaacataaggtgtagcatgaaaccacataaccaagagatggaatgttttggttgctgggtggtgcccccttcttgggaactgttttctggtccaagaggctgttttgtaaatcggttgctggaaatgtctaagagtcatgagccataactgtgaagtatttggggcttttccttctattttattttaatcatttcccctgctgttttcataggagctttagaatatccgagggaggcctttgtctcttctcttcctaaggctgttctttattctcacaggagctctacatgttctgattacatgggagaaagtcaggcatcatgtgatcctataaactccttttcattttctaaagcccctggtggtgtttgggttacagcctggtggcagacacccataatcctagctgttgtagaagctcatgcaggatggccacaagtccaaggtctgcctggaccacggactgaattcaagtcagctgcccaacttagtaagagcttgtttcagaatgaaaagtgaaaaggcaaacaacaaaagcaaacaacaagaacggggcagagaggccaagcgcagtagtagagtgcttacccagcatgcatgaggccctgggttccaacccaagtaccaaaaactaaacccaaactacaagaacaacagaacccaaaaagtaaaacaaaccaaaaacaaactaagtcttccagaaaacaaacaaaaagcccagcctaccccagatctactgtcttcctacatttcctcaccatccataaatggagttgtgcagtgctcagttaacgaatatggctgcagagatggtgctggataagccagtgagctacagagagcccatgcactcttcccagggctgggaccctctttctcatcctttggcagtagttatcgcaggagaagttctcaggacacattggcaaatgaatagacaacttctgctgtccagcctagacccgtggtccacactgcagcatgctgtcatatccagcctagaacccgaggtccacactgcagcacgctggcatctattatacactaactaatttactgtaaatagtaagaaacatgcagtaattctcatgttgatcaacgcttagccccacaaggtgcagagctgacactagccatttctgatacccagtggacactgtgtgacaactatagaagaacactacagaagtagctgccaacctacacacaggctgcacaagtagggatggtgcaaatgcacatgaaaatggcttaaaactttatctttgaaattgtttaaaggcaaatgaggagctgggaagagtgcttgcagatcctaagttttatcccagtaccacaacaaaaagaaaaagaaacagaaaaaaaaaaaaagataaaaaagaatgaggtggctcatgttgaacacttggaagactgaggcaagacatacagaggaaaatggcagctatcccagactgtgggtctttaccacaggagccaccagagatggttcactgtgcatggaggctggcagcctgctaatgccttactttaaagggtgtgtctcttttatttggaactttttgaactaaataaatatagtgttattctttcttaaattaattttagaaaaagacttttaaacctgatttagaacactgtgtccttgaagttcataaattccttcataatagttgctagatttcactcccaatactatagggagaatgttaattctcaactattagaaatataaaaagacatctgtatgcttagtctatatacatatacagcataagacaacggtgatgaaggctatagcagacaggccttcaaaatttagccgcaggtgtgttctggcaagatcacgtccacttcgatttcaggtactgccaggacctatatttttagagactctggtgtctgaaccacataaatcgtatgaaatgtggttggcaggccaggccatcatagtctatggcaatgcggcctagaaatttgttgtcactgtttcaaaaaaacatacatttattcattcatttatttatttgtttgtttatttatttatttatttatttatttatttatttatttatttctggtgcctacgaaggccagaagaggacattggatttcctgagctggagctgagcacttttgagccatctaacatgggtgctgggcgctgaactctggtcctcagtatgaacagtcagcattcttaaccactggaccataaaaccacatttcaaagagacgttcttacagtaaagtttgaaaaccactggtctggactgggagtcaccaaagtgttttctcagtttctggagggcagtaaattcttgcttacagactacttacggaggaagaaagtgagtgggctctgttctaaggatgaaaccaaagtgtctattttttaaaatcagtttaacattaaactagcagtccattcatatcccagctaattgcgattaactagagatagaaacgtaaaaccttgactgaggaaaagtgacagaacacgtgtgaggcagagctctgcacacatacatggcagtgccaggaggggcagcagtctctggtgacagaacacgtgtgacagaaacagaaaagtgacagaacacatgtgaggcagagctctccacgcacacacggcagtgccaggaggggcagctgtctctggtgacatctggtgttctccttaatgcctgtgaagttctgaagttctaagctagatgcagtctacccgagagtgccgtggcttcgatctgctgtcattagtaacttcccttccttattaatagcaagtgctcctcgagccttccttgcatggtgtgacatgcttctccgtgttagtccttgaaccttacagcctgcctccgtgaagtgtctgcatatgcgtctcatcgttctaaccccgtcccttgagaatttaagtttgagtgacatggcccctgacccctctacaggccagaggtgcaatattgacattgatgagtgtgcctccaacccctgtcgcaagggtgcgacgtgcatcaatgatgtgaatggtttccggtgtatatgccccgagggaccgcatcatcctagctgctactcacaggtgaacgagtgcctgagcaatccctgcatccacggaaactgtactggaggtctcagtgggtgagtagctaccctgtgctagctagtagttactgattggcccagttggcctttaaaaccaactgaaggaaacactaacacaatagcttcagtttgtcggttgggaacttgacctgatatttaggtaaaggttttgaaggtctgtgtcaaagtctttcaaatcaccgctctgtctctagaagctggcctgtctcctaggactgagagcttacttgagaaataaacactgtctcctttacatgagtaatcaatgaggaccccacaggagggtccaggaattcatacatgtagcagttgtgttttacactacaggattgagatctgacgagtgttctagagccacgggcaccttaacaccgtctattcctgttctgtcatggagcctgggataatgcatttgcagcctgcatgccctcagagttgtgcagcatgtgatggttttagaacaagagtgtcttagacactatgaggggcatggccatgcctcaagcctaaaagaatggagagtgtgttagataacttccttttcttactggcttaagctagatttctgatccagaacatgatgatctttaaagcaccctttcacggctctcccctcctccactctctctccatccttcccccacttcccagctccccttctctgcctgatctgatattatacttacgtactaatgatgttgaagtcagatattatatgtgttgcagatatcttcagctttttggctttttttggtctgaagaaagtgtgactgacctgttaagactccagtcaatcctcagcaggcttaagtggcttattttctgatgtctactttgtactagcgattctgagctttgttcatgttcatgtttccttcagattgccccagtatatttgacaagccatagcttgtgcttgcaattcatcagcttcctcatgatccagggaagcactgtgtaggtctcccatctgaacatactagatggattcatgactcttaccatgtggtgatgattccagtatagatccataggaatatagaaatgagctaattcctgtaatctttgtactagggaggcttaagcaggaggattaccatgagtttgcagcaagccaagaccacatagtggttctaggccagcctgggcaacagagtgagactctgtcctcaaaataccagacaaaaggaaaggtgaaactggctttcacctatctcttatgtgtctcttatgactcagttgtacctttggaccacatagtcacacctctctcttcttgcagctataagtgcctctgcgatgcaggctgggttggtgtcaactgtgaggtggacaaaaatgagtgtctttctaacccatgccagaatggaggaacgtgcaataacctggtgaatggctacaggtgtacctgcaagaaggggttcaaaggtgaagtgaagtctcggcttgttatacccgctgtttgtcttcccttgtggtacacccctccacatcttggtttccatttctttttgttgtagtttactaatacagtaccatgctgagcagttagtatgtctgagatatgtggggaataaaaacaagagtagatatctttctactttcagcttagcagagaggtaaattgttgggacaataatacttaaacagttaagactcgacttaggggcgtgtgggtaaaagtgcgtgctgcctgacaacctaagttccagtgtttgtgtaattgtaagcttcctggccaaggcttgattctataataagcttctcagaagtgagatgagagtgttgtacttactggatcgagccctgtgctatgctcaggacctttccagcaaatcctcacacatgagctattctggacactcagtttcctgtgctcttttgggaaaatacatagtagaggaacatgtctcaacaatattttacagtcagttttccccgagttgggctgtttgacactttggcatcttttagaactactcattttgattgcaggttgagtatccctaactccaaacatggagtcttccaaaatcgggaactttttgaatatcagcatgaagtgcaaggtcgtgacgctctatttcttgtacagtattactctaacagattgcattaagtcaccctcagttgtgtgcaggaggataactggagagagacacaatgacatccttcaagtagcttgttatttatttgtaagaatcctcactctgtcctacccctaaaaaatcctaaacagataaaacaccatgaccaaaagcaagctggggaggaaagggtttatttagcttacacttccacatcactgttcatcattgaacgaagtcaggaccggaactcaaacagggcaggaacccaggggcaggaactgatgcagaggccatggagagtcctgccttgcctcccatggcttcctcggcctttcttcggcctttttagagaccccaggaccaccagcccagggatggcaccacctataatgactgggccctctgtcatcaatcactaattaagaagtgctctgtaggcttgcccacatttatttattgaggttccatctgtcagatggctttagtgtgtatcacagtaacataactgtccaggacacatgctaagtatgtcagagaaaggagattttttttcccaagacgacaccagacagacttagaaagtctctacatcagatactaatgttattacattttctaggaaacttgtagattcaaaagctcttttcttttctttcctctcctctcctctctacttccnnnnnnnnnnnnnnnnnnnnnnnnnnnnnnnnnnnnnnnnnnnnnnnnnnnnnnnnnnnnnnnnnnntaaatctcactgtaacttaccatttatctcatgggaaatgagaatatacaatcaaaccccgtttgttcagtgagctatgagcccctctgagcccgccatctccctgctcccttctgctaacagtgctctggctttgccatctttatggtccttgttgggtcacattggaggtgcaaagacaggtggattctggtcttgccttagtcccactctgttctttttctttttgatcttttagtgggaataaattttctgccttgaaataggagaactatttttaaggctttggaacctagctcactgatagcagagactataccggtggaagagtgggcaggcacttcagggcttttcttcatgagtttgccctttttctgacgaaccagagacttctcttaaagggtgcatgtttaggtagagcagcatgcttttcagcatagcgagtgctcagttcattatgcagaatccagttccataaggaggagcgttaggcctgagtcaggccctccctcacagttttggccaaccgtcaaactaaaatgaatgagcaggtgctcccatgacccaaagaaatgagtgtcagtctgtgacttctaattttcacaaccaccaggagagctggtgagtaactgaggctgacagtttgagtgtgtatgtgtttctcctcctcctcctcctccaggctacaactgccaggtgaatatagatgagtgtgcctccaacccgtgtctgaaccaaggaacctgctttgatgacgtcagtggctacacttgccactgcatgttgccttacacaggtgggtactgcaggtgccagcatggctgggggggggggggtgtgccctgtgacttgggtaagtgacgatactctgaggactcagtttggtgtcactcgtggtctccaaggcttccttcctttatgctttttagtgtttggggttttgtttgttggtttttctggtgctgggggttgatcccagggccttgcatctccttagtattgttttgttgttgttgttttcatttttttacttattcttctctcagcagttgccccttcctcctctcctgtaagttgttcagtgagcttcaggggcgcagctctcctgagtcaccacccatgttggggtgaacttttagatgacatagccatgctattgtgggtcatcctcaagggctctgtgactgacctccacccccagccctgtgttttactctttggggttttaaatttatgtatgatatttagaaccagatgcctacttggtccagaggcatctatccttttgacattgtaacataaaattattgagaaaattcatggtaatgtgtttttctttctatatacaaagttttaagatgactgttaaagttgactttgttgtcacttgactttagaaacaactcaatatcctgtaaacttcctcagtaagtaaaagcatttgccaccaatcctaagaactggagcattgagtctgcaattcaccttctcaaaaactaatgtgttttaaaacataccttgatcctttttttagtggaatcatttttaattttaatttttctctaagtgtgaattcagtattctaaggcaggaagcacccactagcaggcagctgttagcacctggtgatagcagtagagattgcctggcaacagagatgcaggtatagagccggccccagtgatagcaggggaggaagcagccagcagagagactgagttcactaggtgctagacaggacttagagtgtgcttcccacttagtccgcagaaatcctccctgaggacaggctagggaagtctcagggagataaatgagctgcccacggtcaccagattagctgcagtgggccaatattggaaggagcaggtgtggttatgtgcatatcagataccctgcacatcagatatttacattaggactcataacagtagcaaaatcacagttacaaagtagcaatggaaataattttatggttggggtcacctcagcatgaggaactaactgtactaaagggtcatggcaccaccaagctagaacctctcagttgctgctgtagcctgggattctgagcacacctgtgtttgcagtcttgggacgccatcttttcctcggttgattctttatcacagactgtcatttgttttccaggcaagaactgtcaaacagtgttggctccctgttccccaaacccgtgtgagaatgctgctgtttgtaaagaggcacccaattttgagagcttcagctgcttgtgtgctcctggctggcaaggtaatgatgctggatgcatcctgcactttaaacaaagccatcggccctcagatgacatgggagaccatgctgacacctgtaatctctgtagggagcgactagctggaagggctcataacaccttctcagattccatctttatagtcctcaagtagctgagaccctccaacccaagtgtttcaagctgtgagtagcagttgggaggagtttccgaaggacctcctgcatcggaccaatcaggtggcctcctgcaccaaaacaccctaagctcacagtggactgaaactcacacccacctaagcttacaccctgccttgatttctatgggaattttcttccaaggactggctgttcattctcctgtcttcataggtaaacgatgtacagttgacgttgatgagtgtatctccaagccgtgtatgaacaatggtgtctgccacaacactcagggcagctacgtgtgtgagtgtcctcccggcttcagtgggatggactgtgaagaggacatcaatgattgccttgccagtgagtacacctgccctcagggtcccagagagagagggccacgttccctacactgacatcgatgtcccacactccaggatctttaagtcttccttctgaagctactgtctttagaaatcaaaatagtagaatctgtcttgagcatctctctacagcatcttaaatgctgacaaactacggacagtgctgtggtagctttgtgagaacatagatttttgaaaggcagtaaacagacaaaagctacaagtattttaatacctggtagaattcatccaattttggcaaaatgatagagaaaaccatcaaccatcatgaatgttcctctaaaagtcgcttcgtagctttacctgttctacttccttgtctcacgccagcacagaccagcctctgccaccatagataaattaatactttatatagatgcatctatataggcatgctcttgtcagtaatatttcaggctggttcatgtccatatcaccactagggtcttccgtcttattgctgagtggtctccactctggttgtgcacattgagcatgctcagccctgaaggacactcacccgttccaggccttttggttttagagtattcacatcttagggatgtgacccaagtgggagcatgaggtgtgttcatgctttcatatgtaccgtgcatgagtaggccgaaggtaacttgatgcaattctttcaatgcatctgaatgctgactgtgcaatgaattttagttgttcttgtgacatggtgctgaccctcatagggtttcagactttggagagctttgcattttagacttttggattattttgacctgtgctattgttacttgtttgcttttccagtttttaggcattatagataaaaatgttatgataggagtttgccttctcttccttcttaaagatattgtgcataatgggtgtatactcctcccaaacagcaagaaatggactctttatcatcgtcatcatcatcattgccaagttttaaatcttttttaagatttactctttttgagtcttaacttttgactattttagtttggtttggattgagctttggtgaaatgtgtttcagagattccatctgtcttagttaagtttctagtgctctgatgaacactgtgactgaaagtgatgtgggagagaaggattcatttcatcgtactactatagtcgttactgtggaagtcagggcaggaacctggaggcaggagctgatgcagaggccatggaggggtgctgcttactggcttgctccccatggcttgctcagtcttccttccttccttccttccttccttccttccttccttccttccttccttccttccttccttccttccttctcataatggaaatccttatcccacattattttttattattattttattgatagattgtgagtttcacatcatgtactccaaccctgcttctctccatcccttcatattcaccccattacccttgcaacctccttcctaaaataaaacacacacacacacaaatgaaaaaccaaggcatagaaaacatctccttgtggaaaccgtagtgtgtcacagtgtgtcccacagtatacccacccctttgtccacacgtctttacttgcaaatgttcattacagtcagtcattggtctggtttgaggcctccagcttctgtgacatcaataatattgtatcctcgcctggacttctcctggttaacctgttgttgcgcagggtcatggaggtcctgcagctttggttcaacagaactggccccttttttgtgtccctgcgattcacagatgatatagattttgttgtaggccaactcaggccctggatctgggcctgggtggtagctgagctggttagcctacaggctctcccttatcctcatcactggggcgagctcttcagcactactttggctgggccacctatgtctctatctgcaggaggcagggtcacctctcctgcactgaactcagctcctttgtgcttcctaggcaaggtgcagggtgcgctcccctaaatgctgtagccactgagggggcagggctagctctcctgctctctcccatgccctcctgccagctcactctgcgagctctcctgactaactaactgcaggtggctgggaggtaaggaggcagggtatcacactcacacccacaccctagggggctggctcacctgctttaccaccaccagggtcagatctgctgtttagcctgctttctcatagaatccaggatccccagtaggctggggtcctcccatgttaatcattaataaagaaaacgccaacacagacttgcctacaggaaaatctgataatggcgttttctccagtgactgtggtttgtgttgagtcgaccgaacaaaacatgaaaacaagaaaaacatgcatggcacattacctaactgacttattttcaattttttggcacaggttcattaataataagtcttattttaccctgaatagctatgagatgtatgctaattttccctcttggatctggtagggaccatttcttccttctctcttggagaagaatctgggtagaattcagtccctcattctcagggctcagcctgccctgggagtccctgtgcagccggtgctggcctcgaacttatggcagttttcccgccatttaaatgctgggcttacagtgtgaagcaccaaggctgactcttttcttcttgaacatgttttggagtgtgttaaatggctctctgataaagcagagcgcacttgacctttcaattcactgcttaaattttcatttcatatttgtgatggtttctgccactataacttaacactctgaatgccagcagcaatgtcacggttttcttgatttagcccctttgtcattagattgtgtgaggccctgctgtgattataactcaggacctgttgacatttctccgactgaagcaatttacaaaaaaaagaaagtaagagagaagtacaggaaagtcgattgatttatgcagtgttcttggaacagactgagtttataacctgacccctcagcctccacaaacatgttttgaaaatacttaccaatattcccaatattgtatgtgttaggccacataattgatttacgtatacgtggaggatcaatggaagttttatgactattaatgttataaaatagtgttaatatagattagattggtcttgattttcaaacagataaaaaatctcaggcaaacgataactgaattaattttcatgatagggttcatgtcaggataaatgaaaggggtcaaatgtgggggatggaatgcgcttcttaagggtgtggcttggcctgggtcatctgccttcacagtgctgctgtcctgagtcccacttcttttgtcctgtctcagacccctgccagaacggaggctcctgtgtggaccatgtgaataccttctcctgccagtgccatcctggcttcataggggacaagtgccagacagacatgaatgagtgtctgagcgagccctgtaagaatggggggacctgctccgactatgtcaacagttacacctgcacatgccctgcgggcttccacggagtccactgtgaaaacaacattgacgagtgcactgagaggtgagcagggtgggcctgggcaccagtagctcacaggacggggaggcaggggaggtaacatcacagcatatcacaatacaatgccaggattgtagggcaaggatgaaccgcacttgaggccctttctttccacagtcctctctcattgctcagtttttgaaagacatgtaattggaaggtcaaaggtcagaggttgaaaggctttagtgggatagactgaatagacagcatcgcttctttcttgccatggagcagaggagccctcagttctgttctgttgccctgtctctttgttccagctgtaagatttctctttctttgtagatctgttaccactgtctaagtagtttttagaaggtttgtttgatttctttttattattttagcaatgtgtttattccctttcataaagaaatctagagtgaaaagctatttaggacttttcctgtaaggctgattgatttaatgataaaataatgttatggaaaacaactctcttcaggattctaggcagatctgtctttcaaatgctcctaagatggatattgggaaggaagttgatactgcaatctctgacctccagtctagtttagaagactttaaaacttactgggcacaggcattggagtctcagaggtgtttgtccagttaaatcctctatttctctgctttttttttttaagatctatttattttatgtatatgagtacactatagctattagcagacacaccagaagagggcatcggatcccattacagatggttgtgagccaccatgtgattgctgggaattgaattcagaaactctggaagaggtcagtcagtgttcttaaccgctgaatcatctctccagccccgacatcctacatttcagcagccagactttacagtagcagctcagggcctcagctcacacagctgatgttgtctctcatttgctcctcagctcctgcttcaatggcggcacgtgtgttgatggaatcaactctttctcttgcttgtgccccgtgggtttcactggtcccttctgcctccatgatatcaatgagtgcagctctaacccgtgcctgaatgctggaacgtgtgttgatggtctgggtacctaccgatgcatctgtcccttgggctacaccgggaaaaactgtcaggtaatcagcctccctcccgttcacccgctcacctggctccccacagtagccgaggactctgtctagtttccaggtggggtgaaccatttgagaagagagaacagcatctcaggtggtccctgaggtggctgggtcaccttcttgatagctagaagagtccagactggtgacaccagcaatgccatatgggctaacaagcttctgtggaaactgtgactgacagtgagcacgtacacaccttcacagtgcatatgcaggaagaatggatgtgagcttttcattgctaacctaaaaaacaaaacaacagcaacttaataggaggttggtttgggtttgtggttttagagattttaggcttcactggcttcttttgtttatggacctgagacaagagtaagtgtcattgggacagagccggtgtagaactcttcatggtggcctgaagcagagagggacaggagaagaggagggggagggaagggaaaagacaaaggaagagagggagagaggaggcaggacagacagatgaggtagggaaagccaagaacgagatgtagctcccccagacatgtacccagtgagccctgtttccagctggcatttcctctagttctcagaattgttcagaagtaataccatctttgagaactaaaccactagtgcacgagcctctgaggacatttcatattcaaacacaggacagaacaatcgaagtcaaatcagtaaataccagggagagccaccagggtactgctttacagtgttataacatagccatcaccaaactgtgtattcttaaaactcaaatatagaaatatgaatctgttataatcttaggatggaagaagccatcataggaaactgactttcaattcatggaggagaaacagcctccaccttgtccccagaaaggatagtttttaaactatccaaggtcacatacaaattgtaatttgtgccgctttacatcttctgtaagagtgacggaactcagagctcatgaatacgagactaattagagaccacattggatgacactggacccagaagcagccaccccagccccgctccccacatgaagcagcttggtcttgccccatcctccactgaccatctctcagccagcagcagtctgtgtcaggaaggcaggcccctctctgcctcatgttatttgtgatcctggagttgaaaatacggttgtggaccgtttaggcttttgagttggatcatttcacccatctccccccataggcaggagcggtcaaggcatatgtggtcctgcggggttaacataggaagcatgggcccaggcagcagctatagctcttgccagccttgcaaggaggccacatatgctcacatagtcatgactaatgctctggggataacagcttactgagcctctagagtggttaggttcctgaggtaagggcttttaaaatgacactggccagacaaacgaggctataaagtgacagagtgtgtctaggacagggtgcccagtgaaggcttctgtgaaggcgtccctttctttctaaaaccagtcctttcctttgacatctcgtgacacactgtaacttagagacttcatttatggcatctgggttttgatgcatgtacacccttgcctccgcttcagaccctggtgaacctctgcagccggtctccgtgtaaaaacaaaggaacttgtgttcaggaaaaggcaaggccccactgtctgtgtccgcctggatgggatggtgcatactgtgatgtgctcaacgtgtcctgtaaggcggcagccttgcagaaaggtgagctctgccccaagcatcaggtactgacatataggccatcatcttagggcacagtactgaaaggacaagggtctgaagaaaggctagaggaacatttagagatcccaaagagaaaggtggttgaaatgaagaactagacacagatgaagcaaaccctagagcagccaccagccaggctcacttgcttttgggttgaacctgccgtgggccgcactctctgatgcttctctctccacctggtgcccaggagtacctgttgaacacttgtgccagcactcgggcatctgtatcaatgctggcaacacccatcactgccagtgccccctgggctacacggggagctactgcgaggagcagcttgatgagtgtgcatccaatccatgccagcacggtgccacctgcaatgacttcatcggaggatacagatgtgaggtgaggagatggcttagcccagagggctccaatgacgtagtgccggtgttaaaaacactggctactgagttcatccgtctgtgtcctacagagtatgaatgtctactcgtccttatcatagtgtttgcagccagcatttttattttcagccatgctttcccatagctctggtaagatgtcttcatagagtctggaccatccctccttaactggcttgctctttgtgttggcatcctgcaggctcacctagtacagtagtccccttgcttcctgaagagcaacacagttcatcagccaatgagtaattctctcacaccaaaaaaaaaaaataaaataaaagtgtggtctcacctgctatgccacagcaccatgctcagggttactgtaatgtttaagaatgtgtcttttgctggatggtggtggcgcacacctttaatcccagcacttgggaggcagaggcaggcggatttctgagttcgaggccagcctgatctacaaagtaagtgccaggacagccagggctacacagaaaaaccctgtctggaaaaaaaccaaaaaaaaaaaaaaaaaaaaaaaagaatgtgtcttttttcagcgtctgggctgatagatgttagagccagtgttagacaaacaccagaatgggaacccgaaacccaccagaccaccgagcaacaacagaaggcttctctcctgctgcctccgttgtttatctccgagcaggccactctcggagcaggtcgcagtctgttagttcaaaagcctgccgctgctgaactcaaacttctccacagctgactttttttaatagccaaaatgagcagaattatagccatttaatatcgcttgcctcatgtggcctgcaaagagacacacagtgagtgtatcctaggtagtcaactctggaggccaaggagcctaaactcccccgggagctccctcaccgtaagactggtgttgctgggtcactgaatgtcaccacacacagttttaagctatggtatcccctctttcaaagtttgcttctcctcttactctgtcgtcttgtgctgtgagggacttcctctgcaggcactgttggggtagcagtgtctaaatgaaacttcccccacagttgtctgtttccttatcaagacttgtttcttccaattcctccattgcccaccaccctccattnnnnnnnnnnnnnnnnnnnntatctccccccaccttccattgcccactaaccctccattgccccccaccctctatctccccccaccttccattgtccaccaccctccatagtctccccctgccctccgtcgcccactgccttcagcctcattgtccattcacacaatcctgcaatgggcacagcctctttactcctgcatgcacgtgcggcttgagccttaggctacacatcatgtgtgaaggggtgcgcactacatggatgaggaaatccttacctggaagttttgcttgggggatgccatgaaaatgaccctcagaacatacagtcctcactttcctttaaagtggctttggggggcgaaggggctagaagaggaataggtaaccgtgaccctgcaccaggaagcagcagagaatgcagtggttatagaggggcggatacacagttgcttagtgggatggaagcaaagtcatggtaacctgacctctcgcttggccctgtggtcggtctgcagcagtgacccctttctccgtgtccttctatcctgacagtgtgttccaggatatcagggtgtcaactgtgagtatgaagtggacgagtgccagaaccaaccctgccagaatggaggcacctgcatcgaccttgtgaaccatttcaagtgttcgtgtcccccaggcacccggggtatgcagtcttcagtcttcgttactctttccaccagggacattccctctaggcatacattcttagtgctgaagcaacttttaaaatctgagacaatttaaagaagactagcttcattggagccacttactcagttatctgctctcactctgatctcctgccagcttccattcaggtttggttgtttcttagcttatgttcaggaaaacagaatgcagaatgaacataaccctagataaccaggtttttttggtgcttcaagtgaaatcaactgtcaaccttttaaaggaagcgaatccacataggcctgctttttaattgtttaagctagccaagtctgtccatagaacgagggaatctatgagatgtgtttggctgctgtcctgggaggcagcagacaggaggctgtgctcctgcacctgcacctactacacccctggactgtggaccacagagcatcagtgtgctctgggaattgccacttgctccagactgcctcctggagagagcattgcttgctaacattgcttgttagggacatctggtgctgaaggaaatgcgtagcctgtgagcaacatggcaaagatagcagtcgtgcgtttaggcagcaatcaaacagaggagaccctcatagctggctttgtgtttacgtagacttttgtgccagtgcatttgaataccttctttttcctagagatcaaatttggctaaattgaggcagaagaatactccattaataggtatgtaatacagaatgagtcttagggaagggaaagctgaagactagcctacaactaactgttttaaaattcattacatggtttctagtctagaaataggaaattccatggtgcaaagttccaggtgcttactagtgtattcctttgtatttacccatccatctacctgtccgtccatccgtctatccatccatctatccatctacctgtccgtccgtccatccttccatccattcatctatccatccatccatccatccatccatccatccatccatccatccatccatcttttgtgacagggcatttttgagtagtaaagctaaatgcataaggtaagaagcaaattgattctctgtcttctcctttgggaggttcatagccatccccacccccatctgatctccccttctctcccccaccccatctctctttgtctccctctgtcttctactctctccctcttcccctctccctttctacatcccccactccatctctctccttctctctttctccagtccctagtcccatctccctcttttcctctctatcttttcccatccctcctcctttctcccctcagtccctctccctatctcttcctcccctttccctcccccctcttgttcccgctctcttcccttctcccctatgtcttctcctctctttcatccctcttctctcttcttacctcttcccctcctctctttctgttcccagaattccaagtagcctcagcctcaaattcactataggcatgtactaccatgcccgagtggttaatgcctttaaataatggtattggttagaacaagctacaattctagtggtagctaattatatatatcaagtctcagatagcacaatagtggttttgttggggttttttgtttgctgttttggcactcagacttgcacaggtgttgggttgctgcctttctttctctgtgctttggggctgcaggctccaaggcagccacagcaaaggtggagaaactgcataggggctgtgcaggggcttttannnnnnnnnnnnnnnnnnnnnnnnnnnnnnnnnnnnnnnnnnnnnnnnnnnnnnnnnnnnnnnnnnnnnnnnnnnnnnnnnnnnnnnnnnnnnnnnnnnnnnnnnnnnnnnnnnnnnnnnnnnnnnnnnnnnnnnnnnnnnnnnnnnnnnnnnnnnnnnnnnnnnnnnnnnnnnnnnnnnnnnnnnnnnnnnnnnnnnnnnnnnnnnnnnnnnnnnnnnnnnnnnnnnnnnnnnnnnnnnnnnnnnnnnnnnnnnnnacacacatcacgctcccagaggtgtgtcagaaccactcattactgttcttccaaggcctgtggaggctgagaacccaggaaagggcatgcgtttgtactgtaccacagactaccacatagacatagatgcatccagtcccagagtggaacatctcctaagccaatgagatttttgtcttttctcaatcaatcaatcaatcaatcaatcaatcaactgatcaatcaatctctttttctctccccctccttctcgtctatttcctcctcttcctcctccttctttttctttgtttttgttgttgttgtattgagacagagtttctctgtatatccctggcttttctggatcttgttctatagaccaggctggccttgaactcagggatctgcctgcctcttcctcctgagtgctgggattaaagccttgtgccactgcttggctcctaaatacttctttgtggtagcttagaataataatctagtatatctattgatctgttgactgtttctgagccagctcctcagatgtgtcttctcgctgatgttcctgccgtggtcttcaccgagaacttagcagttagtcttactgatggtctctcacgatacctggctctcctttgcagtgtttccaagattgccttttaatggtctgttatagtgtggttctcttccagtgtggtctgtttgaatgtttgttggattatatcctgtgtgctgatctttccaggtgcctgacatagtgtatatttgttctgacttttcctctctggccatccaccctgtccacctgtgactgctcccagcgactctggagttctcttacagtacagtgagttattccagtgcttgttctcagcactgtactcccaggccttggatgttgcctgcgcatacctcctgctcccagtgcataggctaacctagaacacttctgtcatcctgtgtttgcttcaggctaagaatgaggtcacgctcacatgataagctgtgcatcactgatagttccgtctacatggaagctttatgcttattttactcctcatgccaaacaccaagtatcctgtgagactgggagcacgtcctggctttgtttgcttccactttctggttcccattttaatctaatctgtgagtagataaggtgatatgtgcatgtggacagggtaaacatgtccacatatgcatggaaagacatgcagtaaagacacactccccactgtactcacccccagcaccgcgccctccctctcccctcacactgcagacagcctcttgtgtgtttctagaggagttaaaaggctatctttcagaattgcattatgtatgtaggagccaaattcaaagatagttttaccccctccatttttaactctaaagatgtatcaaagatgctgtttttctcttgacctttttacttaattggaatattttcatatcaaaatagggaacttcttcagtattttctcatagcttcagaattcccctttatgacaacattatgtattgtgcttaactggtcctctagtgatagacattggtgtttttttttttaaaggacacatataagtgcacgttacagaatgtgttttcagaaatagagtctgctgggccactataccgaggttaagtgtcatttaagtggcaatgctggctgcatcctctctatgtaattcatcatctagcatatttacaagttcctgttttcccactgggatttatcccttcctcctttctgtagatgctgtctgtccttactatgtgcagaagttgtttgtctttgctgtgtgatgtggatattttcctgatgtactggggttgcaatctttcagacgtcttattctgaggtcggaatctttcagatgtctctggggattttttacatgcagattatttctaatcatattgaatttatccatcttttttatggctgcttgcatctgagtggtagttgattttatcctccatgcttcaagatttataaagacattcttctgtgtttttatcctggactagaatcctgaagtggctttcccatgtgactggatggttgatgttttctacaatgacttgagatggaactttgatcaaattctaagctccggtgtgcatttgggctgttgttctgtccgtcgattcacaacaaacttttaaccatgaaggactctttttcatgctctcctggctgtgatttggtttttctatatcattttttagtcagtttgccattaaaaagtattgctgatatctttttgagatcatattaccttcatatataatacagtgagcatgccttttcatggagtcgcataatcagataatgtatgtcttccatctgtccacgtctcctctgtctgtccttcagagcacttgcctgcaaggccacacagcttgctctgatgctctcagccatttgccttttgacactgctgctgacagtgaggtacatctgtgtctccttccctttttatgtcttgcttctcttaaagtataccaaagtgctatagaagtatcttcatttttaaccttttcaaattaccttgtggagtagtcattgattttgttgtttctaaacgtgttcacagatattttaactagatggctcctagatcttcagtgtgttacttagccagaataatcttcaaattcttagcaagatatttccactctgttgttgtcttaaataaaagatattagtgtacctatcctcttttaaagaaaaaaaaagtcagtgtttataaaacataaaatactattgcccaaaatctaaccccagcatagcctatgtagtgattagatgtgctccctgttgaactgtttcacagtttgatgggagttgataaggggtggaaaactcccacagtctcctgagctttgactcccgtgtgcttgcgatggcgcagttgtccctgctgctctggattgggtgaaacacaagtggagcctcagggtgcaacttcctctcctgttgctccccgggaagcagctgcacgagctgcatgcagctggcatgggctaagaatattttttgccttgcccaatttaaaagctcccactgtagattaaggattatactcaaattaatctctaaagcccacaagggcatttatcccttgctaatggcgggttcagtggatttttgtaattctgtctttcttctctcataggcctgctgtgtgaagagaacatcgatgaatgtgctgggggcccccactgccttaacggtggccagtgcgtggaccggattggaggctacacttgtcgctgtttgcctggctttgctggggagcggtgtgagggggacatcaacgaatgcctgtccaacccttgcagctcagagggcagcctggactgcgttcagctcaaaaataactacaactgtatctgccgcagcgccttcacgggtgagaacctctcagcccttgctagtctgatgtgcaggagtcttgagtaagcaaaccatgatctctatggaaatgtctgacctcctgcagcaagccaagaccagcttagggcaaggacgcagggcccaggtttccttaagtctttataccatgggcatcataactaggctcatctttacctttgcttttctgagagactcttttgtggtatatggattatatcatgcttggcaagaatatgaaaaataatctgttggggtacagggcaaaattaacatttttcaattgagataaattaaacaagacataaaatctgccatctttatcatattaagcttgttgtgcaataactttcagcactgcagtgaccacagtagcattcagcacacccccactgcagtgactgcagtagcattcagcacacccacactgcaatgatgcagtagcattcagcacacccccactgcagtgactgcagtagcattcagcacactcacactgcaatgatgcagtagcattcagcacacccccactgcagtgactgcagtagcattcagcacacccacactgcagtgactgcagtagcattcagcacacccccactgcagtgactgcagtagcattcagctcacccccactgcagtgaccgcagtagcattcagcacacccccactgcagtgaccgcagtagcattcagcacacccccactgcaatgatgcagtagcattcagcacacccacactgagtactacagagatcactgtatactctcaaacttttatgtgacaatacaagggctggcaagatggctcagtcaataagagcactgactgctcctgaggtcctgagttcaaatcccagcaaccacatggtggctcacaaccacatgtaatgggatctgacgccctcttctggtgtttctgaagacagctaccatgtacttggatatattaataaatctttgggcctcagtgagcagggactgagtgagcgggccaaccagagtgagcgaggttaactggagcgagcagaggtcctaaattcaattcccaacaaccacatgaaggctcacaactgtctgtacagctacagtgtgcttatatacatttataaaataaatatataaatcttaaagagagaaagagaaagaaacaaagaaaaagaaaatacaagacgtttatcttcaggagccgtatatctgagtctgggtggacccactaccctgcaccttttgacactctgtgctgagttactttgctgtgtctgtgcctgtcatctttctaactctgggaggcctgttaaaagatcaggtccaaaaagcagccgatgcgaaccccagggaagctgcagtaagcatggtcctcctgcatgactaaggcttggctgtgcgccgagcctgctcttcatagatggcgtgaagagagcaagcgctgcctcggaacaggagctctgtaggccacctagtcacttatggtgacatttggagctaaagtagttgcccgtacagagatgtgtcatggtcataggctttgaaatctgtcttgtgctttctggaacctgcttggacttcttatgctgggtgtgtcctcacattctagaagcctgggaacagcacagtcctctaactaactggtaatttccagtgtggatgctggtccatgctgagcccctgtccagcctgcatgccttccgtctcttttctctcccaccccccaccccttccttcttttcagtctgaaatacatgccacccttaaaatgcttggaattctacagagaatggatgggatttcacagtgtgaaagctgcctcagtgcagtaactcccaacaagaaactgttctttccagctgttatagacgctggggcagtgtgggctctgaggatgctcatatgtcaaacgctgaccagaacttaaaaaaggagaaaaaggcagaggggcaggacagggcgaggcaaggtgtggggacacctgagtgagtttcccaaagtcaggaaatgctgtctgctcgtgcccatgttggaagtggtccactgagctgtgctctgagatgtcccctctaatggtcagcgggggctcttgatgctgctgtccccatcagccgtttcaccttagtgtctgcctctgtgatctgagacatttcatattcttgtttctcaattctgaatggcaaaagcattgcactttaaagcttttgttagtttaaatcttcaaatggccacagggcagatgggaccctttttctacgatttgtcaagagaccccagcagagccccacattccctctgtgattccaagcacctgtccagtgtatcagggagaagcagccagcaggtgtcctctgccttagagctgggtttagagtagatgagctctgggcaaagtcagatgtattgtaaagcaatttggccagagtagctaagacaagatgaaaattctctccaaaattctctccaaactatcagtcccggttgggtgcatgctttggcctaatgttgctgcttctgtgaggtagctgaacaaaatgctaacaatagtcttcaacttaaaaacaagacgcgtactaaagctgaggtgtaacctccctttgcctgagaggatttaggttttttttttttttttttttttggtgttttgttttgttttgttttgttttgttttgttttgttttgttttgttttctgagacagggtttctctttgtagccctggctgtcctggaactcactctgtagaccaggctgacctcgagctcagaaatccacctgcctctgtctcccaagtgctgggattaaaggcttgtgccaccactgcccggctagtttttgtttttattggagtttgtttcacttttctgcctgtcactttgggggtcaggctgggatagatagttcttgtgtgcttgctgtcttagcaagacacttgagggactcgtctgagtagagatgggccctttgtgttgaggtccacagagtgtcctctcgctatcctgtaggcttagaactgccctgccctgccctgcctcttgctgcctctgaggctgcttcctatcccttagggtagtgtttagtgtctctgagttaatagttataccttgtaaatctgctgttcatgttctctcctaaggccggcactgtgaaaccttcctagatgtgtgtccccagaagccttgcctgaacggagggacttgtgccgtggctagcaacatgcccgatggcttcatctgtcgttgtcccccagtaagtggcctgctgctgacataagggatgcaccgccttccatatgctctagggagctgagattgagcctgtgttttcgtgcccccagaaggatgctaaggtgttagtgtcttgaaggtggtctgggtcttccctggctctagttgttccgctgcgctcagcaactaagcttcccagtgaagcctgtcagccttcagagcattaagtgggaaccacaagtggtctgctgtccccctgaaatggggccagcgcccttggcttcccagcctagccctggtgctgtggcatggcggcctccctgccccgctaggtgagcgccattctgctgctcctgtcctttagcagtggccattggcaagtaagcgcttctcaaacgagaaggaagcttgatgcagtttttgctgtgcagaggcctttgccagtgccaaaggccagaagtcccctcacacagagagtgccatgtagggcgatactcagaggacacctgtctagttaggaccttaaagtgacagcctgccacattcatcccgtgagccatcagccctcacctgttgactgatctgaagaggttatttctagaacactggtgaatattacccgtgggcaagctcttaagcccttctgccatcctcatttccttgccgtgtcatacaggggttctctggggcgagatgccagagcagctgtggacaagtgaagtgcaggagaggggagcagtgtatccacactgactcgggacctcgctgcttctgcctgaaccccaaggactgcgagtcaggatgtgccagtaacccctgccagcatgggggcacctgctatcctcagcgccagcctcctcactattcctgccgctgccctccgtcgttcgggggcagccactgcgaactctacacagcccccaccagcacccctcctgctacctgtcagagtcagtactgcgccgacaaggctcgggatggcatctgtgacgaggcctgcaatagtcatgcctgccagtgggatggaggtgactgttccctcactatggaggacccctgggccaactgcacctccactcttcgctgctgggaatacatcaacaaccagtgtgatgagcagtgcaacaccgcagagtgcctgtttgacaactttgagtgccagaggaatagcaagacgtgcaagtaagagccccgggcctcagaggccgaggggggctgtcactaacacactcagtctcctgttcttgctcctaactgctcgggtgcttcggcccaagccgcctctgcctttcagatggtgccagccttgtcccggtgcacgctgccccttgctgacagagggctgggactgctcactgcataacatcccctctctctgcctatctctgccttctcacatgctgctcttgcgaccgtgggggaaataatcttggaagtggcgttgccactctcaggcagcctccagcctagcctgctgcaggatggatggaaaggtctgtaccactgtctccctgctcatttctttccttaagactagctttcccatctagttaagaagcgtgaacttagggtgagctcgggcctcttggctctctctccttgtcgtcagtgttgtagacagagtccttgtggacgttcctattaactattgcacttcaccccaagagagtctcagcagctctgtgagcttaggtgttgttagtgatcttccctggaaggtaaagaacttgccacgaacatacacagctgttggagttgcctggttttagtcaagcagatggcaagaaaagccctccaaataacaaaggtctggggtggcagaaggaggaggagagagaatcagtcatgcctcagggggacctttgcagttctcattcttttgcctgacatgttagtggtagttgtgtatatacacaacactgtgtgtgtgtgtgggtgtgggtgtgggtgtgagtgggtgtgtgttgtgaggcagggttccatacagcagaagctggccctaaactcctgagtctagaacttctgatcatcctcctgccttcccaagtgctgacgttataggcatgcaccaccacacccagatttttcttagcatttgaaagagagtaaatgagctagatctcacaccctgtatgaacatctctctgccccttaccttctgtaattgtcttactccagaaagagaaagaaacagacagttttggcacactcttctgaatagcacttagatagttggaggtctgggacaagcttggactccttctgtttctagaaccctttgctctgactgagtcagtggggagagggaagtgtgagccacattgactttggcttcagatatgcattcttatacaaaattctgcccttgtagtatgattagttcagtgggacctactaaacacatgcaggatgatgggtataacaatattccccattccagggataacgtcgagtgccatagctgtatagcccatggtgttggagtgcatgatttatgggaagtttctctagacattgatgtgctgaaaatgagccagaaaagatgggtaggaaagtgctcggtcattctgagtggaagccgaggctgcagtgtgttctgatgccctcctcctctctcctgactaggtatgacaaatactgtgcagaccacttcaaagacaaccactgtgatcagggatgcaacagcgaggagtgtggctgggatgggctggactgcgcttcggaccagcctgagaacctggcagagggcaccctgatcatcgtggtgctcctgccccctgaacagctgctgcaggattcgcgaagcttcttgagggccctgggcaccctgctccacaccaacttgcgcattaaacaagattctcagggcgctctcatggtgtacccctactttggggagaagtcagctgccatgaagaagcagaagatgacacgcaggtctcttcctgaggagcaggagcaggagcaggaggtgatagggtaggtttgtgtttctggacttagaagttcccaaaggaccagcatttccaggccagttcatacagctgggcactttgatccctagtacagatactcagcccatccaaatgaaaagctcaagtagagtacccctcatttaaaacacacatcttggcctcttaaatctaaggatacagatctgccttgactgaggggtcctaaagatcagctaagcaagaaagatgcaggtatgagaaaggactcctcagatctgagattcgtaatgtttctccagagttgccgagaaccacattcataatgtgtcttttgggttcattattgcctcattttcaaggccccccttcacgcctgtgcttgacccgagcagtaatcctcagtgggtgggcctgtcgttcacgccccactgtgtgttgatgctctgtaactttcagccttttccttgctgagatatgagtgtagacacataggagaacaagggggcaccaatctgcgctgagcaggcggggctgggggagcactaggaccgcttccccagttacttgttatgtgtcacccagccaggggcttatgtcagctggacatgagccctcccaggcaggagtccatgttcagcatctgaagcatcctgctttctgagttctttctcccgaaggtggaaagcttgatgctgaaggaggggagggtggaccacgtgagcctttctgaccgagcctgccagacctgacccttcgtttcttccccccattctccctctaagctctaagatatttctggagatcgacaaccgacagtgtgttcaagattcagaccagtgcttcaaaaacacagatgcggcagctgctctcctggcttctcatgccatccaagggaccctatcctaccctctagtgtctgttttcagtgagtggcattagtgctggagtggggctgggaagggccttcactggggctcacccttctggtaggaagaggttgctgtttctacatcactgtccctatgtctgaactctcaggtgaactggagagtccaagaaacgcccagcttctctatctgctcgcggtcgctgttgtcatcatcctgttcttcatcctgctgggggtcatcatggccaagcggaagcgcaagcatggcttcctctggctgccggaagggttcaccctccgccgagactctagcaatcacaagcgccgtgaacctgtgggacaggatgccgtggggctgaagtaagagggctttacaataagacacagttcacagggagaagcagagatgagcagatgggcatattactgaatcataatctcaaattctaaattcacctttagtcaccttgaccacagctcctaatggcttgtctaggtctttgagtatggccgcctctttctgtgcacacctgacgaagtgccgctcaatgtttgagtgggagaacactcaaaagacatggtcttttagtgagaagagaaagaatgagtgctcagaagtgtcacatctcacattgcccatcagagttggtgtggtggccctgtaggtgaaagtgcccccgccacgtctgctgacctgagtgtgatccccagtgcccataagctagaaggacggaagtgacttcctcatgttgtgctgtgagtgtgtaatataattagagggctggagggatacttcagtagtcaagaaaggaactgacctgggttcagtgcccagcacccatgctgggcagcttacagcccctgtgattccagctgccacgggatctgtagacacctgaactcacatgctcagatacacacagacatagacacttaattttgaaaaatgttaatataattttgaaaaagtgctgtgcatcctatcccgttggacagagtgagaggatgtgtgggagtgctggtgaagtgcagaaagctactgcgtttgcccagctgtaacctctcctcttgtttctcccctgaatatcatcagaaatctctccgtgcaagtgtcagaggctaacctgattggttctgggacaagtgaacattgggttgatgatgaaggaccccagccaaagaaagccaaggtaagctgtcttaggaagccatgttactagcagtcatgtgaccacattctcagtgtgtgtctttcctggagccccatcatcggcaggggcccgtagagcacagtctttgtggctcatgtatgttcttcaggaagaccttttaaatagtaaagccagcctgccttctggctcaagtgtcacacttgtgtttactgagtcaggactggtggtgtagatgctcacagttccatttatgggtgcttctctgatacttctataagaggagatggagttatcccgtgaagaaagccaagaccattaacttctggggaggtcactgagcatgatggtcaagaatgttgctttaaaccaccattctagaggctgtgtcaagggaatccaagtttaaggccaacctgagctacctctaaaaccaaataaaataaacaaatgaaaacatatacagataacattgtacaaactgagcaggttgtatttagggatatataagcatttaacaacaactgataataaaagaaacctggatttgaaggagagcaaagaggggtatatgggaggacttggagagaggaaagagaagggagaaatggtgtaattataatctccaaaaaaatggaagtggtaaaagcaacaggaagcattgctctagtcaggctacttgattgcagctactttgtatttaaattaaacctttgtatttaatattccttgcctataagatagcaataataataacaacagtgatagctcttttctcgctgagttgccagagtacctctggcctatctgctttcacagatagagtcaagtaaagggcagatgctgatctctcgtcctctccgcggtgctcccctgagcactgtcccacagagtttattccccttctcaagaaccttccagttgaaagagaaatagtgtgtgccttctctcatgtgcagagtctgtatttaactatggagacggacaggacagagacagtacacacaaggggctgttaggatggaggacaggaaaggggtgtgaggtgaatgtaccagcaaggtacaatgatttgtaaaaacccattgtttggggctggagagatggctcagcagttaacagcactgactgctcttccagaggtcctgagttcaattcccagcaaccacatggtggtccacaaccatctgtaatgggatctgatgccctcttctggtgtgtctgaagacaactacagtgtacttaagatgaatagatgaatgaatgaatgaatgaatgaatgaatcttttttaaaaaacaccattgttttgcatactaaactctttgaaaggaaggaaggaaggaaggaaggaaaggggaagggaaagggaaagggaaaggggaaaggggaaaggggaaaggggaaaggaaaggaaaggaaaggaaaggaaaggaaaggaaaggaaaagaagctagcaaccatggttgacaggtgatgcagtgccaggtagcacataccacacggtcagctgagaagagagaaaccacttattaaagtcaacaagattaaaatttcatttgaagagcaaataggagtcagccaaacaaggtggaggggaccatcacaggcaggttagaagagatgggaggagaccctgccattcctcagccttgtctgcagctcctggagggctcaggttaatgaggggaacctttcttccctctccaggctgaggatgaggctttgctgtcggaagatgaccccatcgatcgacggccctggacacagcagcaccttgaagctgcagacatccgccacactccatccctggcactcactcctcctcaggcagaacaggaggtggacgtgctggacgtgaatgtccgaggcccaggtcagtagcggtccctgccctccatggttctggctggtcggtgagcgtttctccccctggccagctgcccctgccaattgcagacctcgaggaagctcgagggaatgaatatgtgagaaacattgtcatgcggaaattatgaacctgggacaatgacactggtggctcatgggtaaaagtatttaccatgaaagcctgaccacctgagttcaagcctcagcgtccatgtcaaagttggacagagtcgtcctctggcctccacatacgtgttatggacatgcacacgcacgcacatgtgctcatacataccataccagtaatttatgtgctaaggcatatgtgcacatatcatatacatacaataagataaataaatatttaagtgattttaaattatgggctggagagatgctcagtggtaagagcacttgttgctcttacagaggacctgcacccacatggtgccttactacctcagtgccaggggctccaacaccattttctggcctgtatgagcactgtatgctcatggttcaaaaatacatgtaggcaaaacactcgtactcattaaataaatccttaagtttttttcaactgaaaatgcagatttcaaagaaaaggaaggattttgcagtgcttcatatacagcatactgagaaaattaaacaaattggattttagggggatagaaaaatagtatctgtcttagtcactggtctgatgttgtgaagagacactgtggcagagagagatagagagacagacagacagatagacagacagagacagactgggcctggcatgggattttgaaacctcaaaatgcatcccccagtgacacacttcctccaataagaaccacctcctaatccttctcaaatagtgtcgcttcctgttaactaagcattcaaatctacgagttggtgggggccattcttattcgaaccaccacagtatccgacagcagactgtggggaactactataattcctgtcttacaggcagattaaaatattgtctgtctagtttgagatgtcataattgcacttaaactcaagcagaaaagtttgtcagtttgaggaagagcctcagggcagaaggcagctgcttccctacactcttcacatagctggtgctgtcatgtaaaacctgtcatagttctacaagcacggagagtccacagcccacagcatgatggcggtcagcagaactgttcctgtaatgggttaatttgaatgtgtttgcaatattccctccctacagatgggtgtactccactgatgctggcttctctccgaggaggcagctcagacctgagtgatgaagacgaagatgctgaggactcttctgccaacatcatcacagacttggtctaccaaggtgccagccttcaagcacagacagaccgcactggcgagatggccctgcaccttgcagcccgctattcgagagctgatgctgccaaacgcctcctggatgctggtgcggatgcaaatgcccaggacaacatgggccgatgtcctcttcacgctgcggtggcagcagacgcccaaggtgtctttcaggtaaagagccaagagttggtttgaatctgaaagatgaggtggctcagtgggtaaggtgtatcgtggtaaatcaccatgtttacggcaacttataatagagcaagtctagtggagcctatgctttcagaagatcagagtccatcatggcagagtgagaacaccgggctgggggaaggtgtgggggctgtgggggccaggaacagctgagagctcacatcttgaaccacaaatgggaggcggagagctactgggagtggcacacattttatttcaaacctcaaagtacgtccctgtgacatacctcctccaacaaggccatacatctttcccaaatggccaccagtctaaatcaaatgcccaagacttaactggggacatctcattcaaaacaccacaggtgtttgccaccaatcccgagaacccaaggacctaggaccttcagcccctaggacccacatagtaaaaagagagaactgatccctgaaggttgttcccaaacctctgtgtgtgtaccattgcacagacatgcctgcacacgcacaaaataaaataactattacaggcctgtggtggttcagcttaactaacacacttacccgctcattgaattcattcagaacttctgaatgagtgttatgcgggacagaaaaggggggaaggccagctgacctactgtgagtagccagagaaaagggggaaggccagctgacctactgtgagtagccagagaatgattcagtcagcaacagggttctgaatctaatcagcaatattttgatgtgcagtgatgcctcgcagatggcggtcatatgggagtagtaaatgacccaactccttggattactgttaactctctggatagctctgcctgtctgtgggcccacggctcatccctgacatgagtgggcagtgtgttccttgatactcgtattttaacctgaagaggaaattggaaacattctagctgtatgcatgattgaagttgtgacacctgtacatacctttccctatatagtggttcattcacttattcagcaaatgcctaatgattagccattatagctcctagggcatagaatagcctgcctcccagggacacctcatttggagtgctcttatttcattctttttccttatctaagggacacttctctgcttctcttctagattctgatccgcaaccgtgtaaccgatctggatgccagaatgaacgatggtactacccccctgatcctggctgcccgcctggctgtggaaggaatggtggcagagttgatcaattgccaagcagatgtcaatgcagtggatgaccatggtagggacaaggacgtggctccatctgcagagagcgtctctaaacaagagacttgctacccttctgagaggactttctcagatctgaaactggagagtcccttgtccttccccatcatttgcacatccttcagtctgcggggctcagagactgaggtgataggagccccacattaagatgagagggggctttagttgtagtttttttcagtaagagggttcttggacctcaaagaatgttcttgaaaagtttgcctgtgggttcctagtcataatcactcttactgtgggagtggattcactgggggttatgagatatcctcaatatgtacttggtgtatagtagcatgtttgctatcttcagtttgtgaagcttgggcatgtggagggcatggatgtcccacaccagggatcctgttagctagaggctcccagcctgtgccaaaatattctgagaacacaaggaaaggaaaatacaagtgtgctttcctgtgggctctcttggcccctgacctcatgctgctctctggggagttcaaggtttcttgaaaaaaacaaaacaacagcacagcactttccttagtgtcttacttacaaaatgtttcccctgcaggaaaatctgccctccactgggcagctgctgtcaataatgtggaggcgactcttctgctgttgaagaatggggccaacagagatatgcaggacaataaggtacagctcttagctcagagcctgagtatgctcacagcagtgtctctctcacttaggaggacaaatggggaagcttgtgcgggagctgggtccagagagcctgagggagggaggatgcaggccttgttgggaggcagcccctggttgtccggtgctcactgcactgccctgggaatcacttggcgcactccttcctgcctttttccttcagcagtctgtctgctctgggaggtgcttaccgacctctctcacgttcctcccttctctctgtgcggtagtttgtttctctgttcttggataccgaggtacacttgtgtttgagctgcctgtcgtggccccgtggccccgctcttgttgtggctcccctcctctccttacccctcctgttgtgcccccctcctttcctcacccctcctttattcctcttgcacttactgttttccttcttctcctcaagccccacccccaccccgcgcccctgccatctcatgttctgaattctttgtacactttggcttccctcctctttcttattggtagcccagtttccccttggcacttcgtgttgacaagcccatctcttttcagtgaggctttggctctgaggctgtctaaaaagctggtggtcctgggagcagactgggttctttggaatagagaagatcgctgtggaagtcaaagatacacaatatgtagaaaatgatactgtctgtctgtggcattttatagaggaagcacttaggaaaagcactaaaaaggttataaaagagtaaaggttagaaacaatcctgtgttctctgggtattaaaatgtattctacggtctttcttcaggaagagacacctttgtttcttgctgcccgagagggaagttatgaagcggccaaaatcctgttagaccattttgccaaccgggacatcactgaccacatggaccgccttccccgggatgtggctcgggaccgcatgcaccatgacatcgttcgcctcctggacgagtataacgtgactcccagccctccgggaacggtcttgacttctgcgctctcacctgtcctctgtgggcccaacaggtctttcctcagtctgaagcacaccccaatgggtaagaaggctaggcggcccaacaccaagagcaccatgcccacgagcctgcctaaccttgccaaggaggccaaggatgccaagggcagcaggaggaagaagtgtctgaacgagaaggtccagctgtccgagagctcagtgactctatcccccgtcgattcgctcgagtctcctcacacgtatgtctccgatgccacatcctctcccatgatcacatcccctggaatcttacaggcctcgcccacccccctgctggctgctgccgccccggctgccccagtgcacacacagcatgcgctgtctttctctaaccttcatgacatgcagcctttggctcctggagccagcaccgtgctcccctcggtcagccagctgctatcccaccaccacatcgcgcccccaggtagtagcagtgcaggaagcttgggcaggttacatccagttcctgtcccagcagactggatgaaccgtgtggagatgaacgagacccagtacagtgaaatgtttggcatggtcctggctcctgcagagggagcccaccctggcatagcagctccccagagcagacctccggaagggaagcacatgtccacccagcgggagcccttgcctcccatcgtgactttccagcttatcccaaaaggcagcattgcccaggcagccggagctccccagacgcagtccagttgccctccagctgttgcaggccccttgccctctatgtaccagatcccagagatgccccgtttgcccagtgtggctttcccacctaccatgatgccccagcaggaggggcaggtagctcagaccattgtgccaacctatcatcctttcccagcctctgtgggcaagtaccccacacccccttcccaacacagttacgcctcctcaaatgctgctgagcgaacccccagtcatggtggtcacctccagggcgagcacccatacctgacaccatccccagagtctcctgaccaatggtcaagctcttcaccacactctgcatctgactggtcagatgtgaccaccagcccaactcctggaggtggtggaggcggtcagcggggacccggaacacacatgtccgagccaccacacagcaacatgcaggtgtatgcatgaagagtctgcctcagccttagagatggaagtgcctatcacacatactgctgaggggcgagtgaaggttatccggagagaaatgaagagacgtcccgtccgtgaccatctttcggaggcaggagagagaggctccaaacctgaggcaagcgtgagaagccttctctccatcttccctcgctctctgtgcagttttaggggaggacgcagctcctactgaccttcacccatcctgcaagttcatggagatgcaagatgagtgacaagccttgagaccccttgctctcttttaatttggagaataccgtggatgccttttatcgcccagacattctcgcagcctgagtaacattttaagccccggggcttctgactgagtgccccgggactctgtccaggctgacgtgtccagtcttctcagccctggaagtggccttgacgtcactcggtgctttcctctctgcgcccgtctgtggttgatccccgtcagtgtgtcataagcgagatgtctgtgctcttaatcattcctgacctggaaaccgacttcagcctcctgttcccacattcccggcacctcacaggtgcctcacagggtttactctggccatgggtctcagccctggcctctgaagtatgcttctatggaaaatgcacacactagtcttcatgtcttattcctagaaggaaagaggaagcaaaatatttggggactagaagcctccttctgaacctgcaccttaatttctctcccctgcatgtggggccccatatacactcatcagggggaaggatctgaattgttcttctgtcagttggcctagtcagtataaaattgaactctaggaggcttaggtactgtgatattcctctcattttgttgtaaagtaggaaaagtgggtgagtgttggaatgtccaagaaataagctaacttgctcaagaagcaatcgcccccctccaggccctccattgactgccactgtgaagcacatttatcacctgatcttaggactcattgatccagcagatgaaggtactcttggctgctgcactgctcctcatagatgcccgcagaagaaaatgcctctccatttgcccttgccatttaggacagaacttgcctggggcacaggggacccagtgactgccaacttccttaggaccactttgctttccgatcagaagccagtttctttccacagcgtgtgatctgagagactggtgcacacacagtaggttctcagtgaagacgtggagtctgtatttgggttccagatgtggagaagggacagtctcctgagctcacgaggcagcctttgctagtcgatgctgcattctcttccttccctagagtccccttccgatgatgacggctccccattgtccttgtgttcagattaagattgtacctcatccgaacctgcttcctgcagtgtggtctcagtgacttctcagactctcaagagcagaaacatttttatctgtggtaatctaggatgatagttttctcctcagtcatagggctaataattgcccctatggccatgccatcagtcactgcttcctggtgccatggcacccaggacacaggaaaatgagttctgctggagcatttgtgtatattattagggggaccacctgggggtgtttgttttatgggttttgttgttgttgttttaataatagtctttattcctgtgatagttaaaataagtgcccttcgcctcattcatcagtttgtgaacttagtaagtctgtgtatctgttacacagcagtctataaacaagtgaggattttagtcccattcaagttcactgaatcaacaaaaataatttgttctgtcctggtctatggcagattaagtttgatcatttgactttattctcatgtggtgacatcatcttaccagcccctttcatggaatagagacattttattgccctaaatggtgactgtctccccacgcacccgtcagttagtcccagataaagagaacctgtgtgtggacctctctgccctaaagctctagtgccactgcctgcgaacagtaaccaagaatccagccactgggtctggtcactggacctaccccagacacagagaagaacaaacttgctgtttctccttcaaggatccctcaaagaggatcctttgggatttaggaggagggatgtgaaactgccgtgacagacaacagactacagagatgaagaagacaacactgccagtcatacatctatctgatcagtcccttaggtgttagaattcttgacctgtgtagtgtccaggaaaagaaagggggatgggcagtcccttactccgggacctgagtcaagaggccgaggttgtatgaggcacatcctttattccatacacagagccctgttttgggcttttttttttttttttttttttattcctatgaaatcttcctttgacttttacctgcctttaaggatatttttttttaatttgttcttttttgttttaagcataattttctgacttatgcgatggtggggggattgaaggaaagaaagactgagttaaagattttcaagaaagccgtcagcacgagttggttatatcattttgttaaacttggccacttgaagtcttgcatagaaatgaaccaaaggtgttcagtgttcacgtgtgatttcaggacccggactttaaccagcgcgttgaatgtacgaggactgtttggaaggacacgtgtctatgtcctgaggcccccacccttaactgttttggtactatggcaacttcctcgtgtatatttccctgaaaagtgacattatatctgtttgtatgagaaactcagtaaccagaaaatgacttcgtgttcctgactaaatataggaaggaatatgcacactgtttttactttttaaagtttcattctaaaagtagattaagatgaaatttatatgaaaacatttttatcacaaaataaaaaaggttccatgtcaaagctcagtgatagcctactgtgcccttccccattgctggggccctggttccacagtgatcacctcgtgacgtcacagttggcgagagagacttaaatcctcctcatcccgaatcttcagcccagtcctgggcttcttccattttcttgtctagtttgatcacaaataaatgctgctgaggggaaagttttcatccattcagaaatgccataatacagggtcattcctctacaccctgaccgtaggatgtgaccaacagacagctgcttgggaccaggtgccccccacagacgtggggaatgtgtgctggggcaaggattgggatagaaacacttactggttcatttgcccgagcactgctagtctgtgtgggcttgtgtaggatataatttacaataggattatatggtaatatcggggtatagatttgaaacaggtgcattagtttatagaggcaatcaatgagagtatgcacacaagtccctggggttggcacagaacgatgccagcagtaacacagcaaccgaaccatctagcttattttcacttcctggtgttttatagacacttctagatcgagtgtgcataattacaaaaagataacagttcggtttttctcccgaaatgacttgatttcaaatcttgggagatgctttggttaagtcgggacttcacagctcattcgcacacatcagttagtcctcaggttttataattgtacataagacatgtcggcctccacgtgggttttttaattggtgtgtgaagatcataagagcctcagagggatgccccaccgggccgttctcggagctggagttgcttcttgcaaacgtttgtggtgctgaatcttgcttggaggacacttccttccatggatgtaggctgaaggtcaccggtctgttgatctcctgcccttgcacctgaaagccttgcagccttgctctcaagtgtgcactgctgtagatcagcaggaccggatactgcccacaatcatggaggaaagggagtgaattgtctccctcagccaagcatcagtcaagcctcacagcctaagagctgggaactggcttacatcaggttggaatgaataaaatagaacagtctcctatagtaccagctttccaggatgtggggtgcctgggatctgtgagctgatcactgcctttagtgcctctgtcatggagagggtgaggaataaagaatacaatgtttctttcggtatagaatagttaacaacaaaactaccaggtgacagtattcccaggacttgggaatgaagtcatgtggatcccaaattttaagattatcttcatttacatagttcaagatcagctagggttagacaagactgtgtttcaatagcggagtggatgcgtgagtgttagaaacacaacatggagtgcagagaccccctccccccctgagtagcattgaccagtctattaatttttaggacaaaggaatggaagccaagaggagttactggaacctggaaagaaaactacctagcacaggtttcctatcaaggcaaaccataaaccttgcttgtctcaccccaccctgagagatagctcagagtcctgggccagagtttgaatggggaggagggtgtatttgaaggcacaggtcttcctcaatcgttgttgtccaaccacattttgggggaaacttccactgtcactgatgtgttagtccaggggacacaaagtaaaagggattctgtgttaattgtgacaaaactgctgctcctggcctgctgctgggtttccttagctgtgatggcacaacctggagacagtccagcagcaggatagaaaatggaaactcttcaagccctataaagatgaaatggctcaatgggtgaagtcacttgccaccaaaactgacaacctgagttccattccagggacccacatggtaagacaaagagaaccaactcctcaagttgtcctgtgacctccacatgtgtgccgtaaaggaaaacatgaagaaaattatagattcatcttacttctagatacacaaatctaaatcagctgttaccaaactaaaactacagtgctgatgtgttttgccccctatcaccgtggtaaactccataatcaaaagcaactcgaggagggaaggattgatttctgcttacaattcatgaagggagggagagcaggacagaactctggcggcaggaactgaagcagaggacatgggcaaacactgctgactggcttgatgtttgtggcttgccagggcggcaccatccatggtgagatgggtcttctcacatgtcatcaatcaatcaaggaaatgacccataaacttgcctacaggagaatccggtgggggagggtcttgtttgtttgttttgttttgttgttgttttttttcacttaagtttcttctctgatgactttagcttgtgtcaggtagtaacccaaattggcacaagtgggtattataacattccatctcctaaggaaacaactgcaaagaagtgtattgaaaggactgaagagatgcttggtggttaagatcacgtgttcttccagagaaactggatttagaatccagcatctgcatagtgggtggctcacagtgctctgaaactccagttccaggggatctaatgccctcttgtagactgtggggatcctgcacacacatacatgtaggcaaaacacccataacaaataaaataaaaacaaacatttttaagatgctgctccatcaagaaaacacaatcagcttcagagaaatcaagaatgtgctgataaaattacatgctcatgaaaaactatgaaataaattatgccagggaatgtcacaaaataaggtatcaactaccatctaaaacaaatgctatgctcattggtgaaagagtaatcaaaggggttaaacacaggttccagctgtcccttataccttgtactcaaaaggatcttaaagtggtacctgtgttaaggcaaacaaaaagaatagatattagtcggttatatacatttacacagagatagccattaaaccacactcccaactattgacatttgtctccactgcaaagagtgaacacaagaaatgtgacgatgtattttatagctgctgtggggtgaggactatgttgggtaggaaggctggtttgtggctgagcaaaaatttagagctgttagtaatctgataagattggggatcaggaattatgagtttgagactactttgggttatacagcaagaccctgtttcaaaagcagatgggtggctggagagatggctcagtggtcaagagcacttgctacacaatcatgaggcccaggtctggatcccagtaccctcaagccagcacatgcctgtacttccaggtttgaaagggtagagtcaggagctcaggaattgctagtcctctgggcctacctgagaacacaccaatctgaggtttggggagagagcctatgtcttagaaataggtggcatgatggaggacacccaatgccagcttctggcctttgcacacaaaggcacatgtgcacgtgcacgcagtcatacacaacacacatcttcttttggatattttatgtatttacatttttattttggttgaaatttgattttatttgatattagaatggctactccagctatttcttgaaccatttgcttggaaacttttttccagcctttaactctgaggtagtgtctgtctttgttgctgaagtgcatttcctgtatgtagcaaaatgctaggtcctgtatacatatccagtcttttagtctatgtcttttttattggggaattgtgtccattgatgttaagagatattaaggaatagtgattgttgcttcctgttatttttgttgttagaggtagaattatgtttgtgtggctgtcttcttttgggtttgttgaaagattactttcttgctttttctagggggtagtttccctcttggtggtggagttttccatctattatcctgtgtagggctagatttatggaaagatattctgtaaatttggttttgtcatggaatattttggtttctccatgtgtggtaattgagagttttgctgtatatagtagcctgggctggcatttgtgttctcttagggtttgtatgacatctgcccaggatcatctagctttcataatttctggtgagaagtctggtgtaattccttttttgttgttgttggtttttttttttttttcttcgagacagggtttctctgtgtagtcctggctgtcctggaactcagtttgtagaccaggctggcctcgaactcagaaatccgcctgcctctgcctctcaagtgttgagattaaaggcatgtgccaccactgcccggctgtaattctgataggtctgcctttatatgttacttgaccttctttttttactgtttttaatattttttctttgttttgtgcatttggtgttttgactattatgttacaggaatttctttcccagtcttatctatttggagttcttgtatgtctatggccatctctttctttaggttaggaaagttttcttctataattttgttgaagatatttattggccctttgagttgggaatcttcactctcttctatacatattatccttaggtttggctctttcattgtgccctggatttctgagatgtttggggttaggagcattttgcattttgtatttgtttttttttgtttttttttgtttgtttgttttttttgactgttgttccaatgttttctatggtatcttctgcacctgagattctctcttctatctcttgtattctgttggtgatacttgcatctatgacccctgatctctttcctagttttttttttttttctccagggttatttccctttgtgatttctttattgtttctatttccatttttagatcctggatgattttgttcatttccttcacctgtttcgttgtgttttccagtatttttaaaggaatttttgtttttcctctttaagagcttctacctgtttacttgtgttctcttgtatttctttaagggagttatttatgtccttaaagacctctatcatcatcatgagatgtggttttaaatccagttttcggtgtgttgggttatccaggacttgctgtggtgtgagaactgggttctaatgatgccaagtagccttgatttctgttgcttatgtttttgcacttgtctctcaccatctgattatctctggtgttagttggtcttgctgtctctgactggagcttgtccttcctgtgggctgtgaactggtgatcttaggtgtgtcagcacttctggggagaacagttctctttgagcaggatttgggtgcagagggctgtaggacagccttagctcctgggtacagatggagactggaagccacaacacacacattaaaaaaaaaaaaaagatctattaaactttttttttgctggcactctgctaagctttatcagcacactgagctggaaagaattttaagagtgagaacttttccttgttggttctaatagctccataaacaaactcttcctacattatttcaagcacattcccaagtgccaggtttccagagtgttttctttttaagggtgtatgtaagagagagatgtggtatgtctgtgtgtttgtggtgtgtctgtgatgtgtgtgtgtgatatggtgtgtgtgatgtgtgtgtgtggtgtaatgtgtgtgtgatgtgtggtgtatgtgtattgtgtgtggtgtnnnnnnnnnnnnnnnnnnnnnnnnnnnnnnnnnnnnnnnnnnnnnnnnnnnnnnnnnnnnnnnnnnnnnnnnnnnnnnnnnnnnnnnnnnnnnnnnnnnnnnnnnnnnnnnnnnnnnnnnnnnnnnnnnnnnnnnnnnnnnnnnnnnnnnnnnnnnnnnnnnnnnnatgtggtgtgtggttgtgatgtgtggtgtgatgtgtgtagtgtgtggttgtggtgtgtgtgtgtaagtgcatatggaagacaaagcaggagaagaagcatcctcctatctttccctgccaccttattgccttgaggcagggtttcttcctgaaccatttcagctgggctggctggcctgcaagctcctgggatttgccctcggtgccccacccctcggtgccccacccctcagtgcctggaatacagggacaggacagctgtgcagctctcaacgtgggtgctggggatcggaagtcaggtcctcaagctgcaggctcacacactgagccctctcccaacccctagaaatgttgatatttttgacaactaaaagcagattcactttcagttactaaatataccccaccttagtaacaatccaaggacgcaaggtaactattgaactacattctctttctagtgaaaaatcttagctattatacaatgtggagaatggctctcaggtgcctgtgttctctcaggtgacagctactggcacatgctgctaattagatggtcttaattctaatatgtaaaacccaagtgtgcagtgtggctcttagtttgtaaagaacaccatttctaaaggtgagtcaatattagccagtatgaacacgttcactttctttgatctattcatttcaattctagcaatctaatacaatggaagtagtttcaaagggcaaaaaaaaagtgtgtttatatataaacatacatcttaattgctgtacatattttgttcatgctcactagcataatacaggaaaactttaaaacaggataaacgcgaagtttttgactagcataactgtggcacacgagagaactggtcaagtcagagagcagtgcatgctgctagaataccatgcacctgtcgggccgttgaagtaaatctagaaaattatttgcagtatttgttgttcattgggaagagccaatcttacaataaaatgaacaacaggcactattttctagatttaagtcactttctaaaaggggcttcagaggacggggtagagaaggcaatagaacacatgaaataaggaagaaggagggagacttaccaggagcagaaacaccatgaggaagtggtgcagagaggtggctgtggggacggccattgaactgaactggtccattttagtcattatttcctaacactgtatttatgtaccacttatattgacctgaatattacagatgcaaaaataaacaataggcactcttctgagatatggtccacatataaattgctgcacatatttaatagtctgtctgtatacagactcatatctattacatatgtacatacatgtttgagatgtgtgtgtacctgtagagctgtcaccgttgagatcattagaagagccactgcctcttcaaagtttcttctgccccctttgtcatattcgtggggaaatacctaaaataatcaattgtaaaggaaagggtttattttggcttatgagtttgacatactctggtcacttgacctgtatcttttaggtcagtgctaaaacaacatcacagcaaagaatgtgagaagctgtcatctcatagctaggaagcaaagaggaaggggccagtatccccttgaagggcacaccctgggtgatgcaacttcctccaactaggtcccacgtctcaaaagtttcaatatcctgccagatgtggtggcaaatgtctgtactccctatgggacccacagacttgggtctcactacagtttgagcatagtagcaagactgactctgaaagagaaagatgttctctttataaaaagaaagttcttttaaaatagcagtcccgttataaaaggacttaataatcacagatataattttaggaatgcttgtaggatcatcattaagacttaagtcatctatttgtctatatagcatcactacaaaacagtacatcttcgtggatctgcagagatctgctccaaaggggtgtgctactacttagtgatgtcttaaaatgtaggatttctatatttcttatggtggagggagtctggggagcaatggtcaggggataactcagcctttccccagctactctgtctgctgccattgtttgcattcttgacagtgttctgcagctttcacagtagaggagacacaggttctctcctggctcctgggttccctttgccatgtcctcattctcactgccagaggctgagctcacagagcatgctgcggggggctgggggggcgggggggggctggcctgaccctcccttaccttcttaccccacagtgctgtgtacaacgtggctctgcctcagcagtgcccagcctcctgctggggagtcccacccgtggggcagctcagcccctgaaggctggccaggctctcagtctggcttcccagcagcagatgagaatggtcagaaccctgtcctttttaactttcctttctgtccataccagcttcctccttgcccagctaaagaggtgagctggttttgctaagtaatctccagttagttagttagttagttagttagttagttagttacctacatcctggtgtctgctttagctcacgagctcttgcctgaaccagctcacacggttacagtagccctcatttggctaaattcagcgttcctggacccctgcttagctccccttcaacctgcccttccttttccaaacccagtcctcagcccacccccaagcctcttcttttagcgtggccatgcatcctaggttttctggggtctcttatttggtctccttgcctgctttccctcacacagttccatggaggaatgtgatgggat

SEQ ID NO: 905 - DNA, 1714 bp, Mus musculus
gggagctccaggactcagcgagccgcgggggcagggtagagcacgcgagagccgggctcctggtcgggacccgctccccatgcggatctgctctggctgcggccccgaagatgcccgctctgcgtcccgccgcgctgcgggcgctgctgtggctctggctgtgcggcgcgggccccgcgcacgctttgcagtgtcgaggtggtcaagagccctgtgtaaatgaagggacctgtgttacctaccacaacggcacaggcttctgccgatgtccagagggcttcttgggagaatattgccaacatcgagacccctgtgagaaaaaccgctgtcagaatggtggtacttgtgtgccgcagggcatgttggggaaagctacctgccgatgtgctccaggattcacaggagaggactgccaatactccacctctcacccctgctttgtgtcccgcccttgtcagaatgggggtacctgtcacatgctcagccgggacacctacgagtgcacctgccaagtcggcttcacagggaagcagtgtcagtggacagatgcctgtctatctcatccctgcgaaaatggaagcacctgtacatctgtggccagccagttctcctgcaaatgccctgcaggcctcacagggcagaagtgtgaagctgatatcaatgagtgtgacattccaggacgctgccaacatggtggcacctgcctcaaccttcctggttcctacagatgccaatgtcctcagggcttcacaggccagcactgtgacagcccttatgtgccctgtgcaccctcgccctgcgtcaacggaggcacctgtcgtcagactggcgacttcactttcgaatgcaactgcctgccaggttttgaagggagcacctgtgagcggaatatcgacgactgccccaaccacaagtgtcagaatggaggagtttgtgtggatggtgtcaatacctacaattgccgctgtccccctcagtggactggtaggttcagggtagagtacggcacgtggcagacgaaactcttagcaaagtgggtattgtgttcatgttaccataggatgcttagctgtcagagtgtgtagcctggcttcaattcccaggccttgagtgggactctcccgtgattctttgcccactctgaagtgtgttcacaggcacccctgggcaagaagagctctgagctcagagctgggacaagcactgttctgggttggagagcagagcttagcatctgtcagcctgtggtctggacacagaacgtgctctgtaggtatttgagagggaaaaaaattgtactttgatgcacaacaaactgtgcatatcttaagaacccagagcttacggtttatcttggacagacagctgtcctttcacaatgccaggggcaatgggcagggactcttggtgacatcatttctactatgtctttctccttttttgtatcttttttgcacagtggtttaaagtaagttttttccctaccactgacatgagtaggtcagttgtgcttaaatccttagccgttttgaagtttcttgtgtttcttaggtttgtaacccattttttaaaaggtgagtgatcttatgtaggtatttgtctttagattctgctcatgttgacctgtttatgactgacacagagataagtagaaactggttaagaaatgaagagctgaataaatagtctttaagttaattatgtccagatggtg

SEQ ID NO: 906 - protein, 324 aa, Mus musculus
MPALRPAALRALLWLWLCGAGPAHALQCRGGQEPCVNEGTCVTYHNGTGFCRCPEGFLGEYCQHRDPCEKNRCQNGGTCVPQGMLGKATCRCAPGFTGEDCQYSTSHPCFVSRPCQNGGTCHMLSRDTYECTCQVGFTGKQCQWTDACLSHPCENGSTCTSVASQFSCKCPAGLTGQKCEADINECDIPGRCQHGGTCLNLPGSYRCQCPQGFTGQHCDSPYVPCAPSPCVNGGTCRQTGDFTFECNCLPGFEGSTCERNIDDCPNHKCQNGGVCVDGVNTYNCRCPPQWTGRFRVEYGTWQTKLLAKWVLCSCYHRMLSCQSV

SEQ ID NO: 907 - DNA, 9285 bp, Mus musculus
agccaaacttcgggcggcggcctggctgcgcggagtgcaggggcggcgcagcgggagctccaggactcagcgagccgcgggggcagggtagagcacgcgagagccgggctcctggtcgggacccgctccccatgcggatctgctctggctgcggccccgaagatgcccgctctgcgtcccgccgcgctgcgggcgctgctgtggctctggctgtgcggcgcgggccccgcgcacgctttgcagtgtcgaggtggtcaagagccctgtgtaaatgaagggacctgtgttacctaccacaacggcacaggcttctgccgatgtccagagggcttcttgggagaatattgccaacatcgagacccctgtgagaaaaaccgctgtcagaatggtggtacttgtgtgccgcagggcatgttggggaaagctacctgccgatgtgctccaggattcacaggagaggactgccaatactccacctctcacccctgctttgtgtcccgcccttgtcagaatgggggtacctgtcacatgctcagccgggacacctacgagtgcacctgccaagtcggcttcacagggaagcagtgtcagtggacagatgcctgtctatctcatccctgcgaaaatggaagcacctgtacatctgtggccagccagttctcctgcaaatgccctgcaggcctcacagggcagaagtgtgaagctgatatcaatgagtgtgacattccaggacgctgccaacatggtggcacctgcctcaaccttcctggttcctacagatgccaatgtcctcagggcttcacaggccagcactgtgacagcccttatgtgccctgtgcaccctcgccctgcgtcaacggaggcacctgtcgtcagactggcgacttcactttcgaatgcaactgcctgccaggttttgaagggagcacctgtgagcggaatatcgacgactgccccaaccacaagtgtcagaatggaggagtttgtgtggatggtgtcaatacctacaattgccgctgtccccctcagtggactgggcagttctgcacagaagatgtggacgagtgtctgttgcagcccaacgcttgtcagaatggaggcacctgcaccaaccgaaacggaggctatggctgcgtgtgtgtgaacggctggagcggagatgactgcagcgagaatatcgatgactgtgcctatgcttcctgcacgccagggtccacctgcattgaccgcgtggcctccttctcctgcctgtgtccggagggaaaggcgggtctcctgtgccatctggatgatgcctgtatcagcaacccttgtcacaagggggcgctgtgtgacaccaaccccctgaacgggcagtacatttgcacctgcccacagggctacaagggcgctgactgcacagaagacgtggatgagtgtgctatggccaacagtaacccttgtgagcatgcaggaaagtgtgtgaatacagatggcgccttccactgtgagtgtctgaagggctacgcagggcctcgctgtgagatggacatcaacgagtgtcattcagacccctgccagaacgacgccacctgcctggataagatcggaggcttcacctgtctgtgcatgccaggtttcaaaggtgtgcattgtgagctggaggtaaatgaatgccagagcaacccgtgtgtgaacaacgggcagtgtgtggacaaagtcaaccgcttccagtgtctgtgtccccctggcttcacaggaccagtgtgccagatcgacattgatgactgctccagtactccctgcctgaatggggccaagtgcatcgatcacccgaatggctatgaatgccagtgtgccacaggtttcactggcatattgtgtgatgagaacatcgacaactgtgacccagatccttgccaccatggccagtgccaggatgggatcgactcctacacctgcatctgcaaccctgggtacatgggagccatctgtagtgaccagattgatgaatgctacagcagcccttgcttgaacgatgggcgctgcattgacctggtgaatggttaccagtgcaactgccaaccaggcacatcaggccttaattgtgaaattaattttgatgactgtgccagcaacccttgtatgcacggagtctgtgtggacggcatcaatcgctacagctgtgtgtgctctccgggattcacaggccagaggtgcaatattgacattgatgagtgtgcctccaacccctgtcgcaagggtgcgacgtgcatcaatgatgtgaatggtttccggtgtatatgccccgagggaccgcatcatcctagctgctactcacaggtgaacgagtgcctgagcaatccctgcatccacggaaactgtactggaggtctcagtggctataagtgcctctgcgatgcaggctgggttggtgtcaactgtgaggtggacaaaaatgagtgtctttctaacccatgccagaatggaggaacgtgcaataacctggtgaatggctacaggtgtacctgcaagaaggggttcaaaggctacaactgccaggtgaatatagatgagtgtgcctccaacccgtgtctgaaccaaggaacctgctttgatgacgtcagtggctacacttgccactgcatgttgccttacacaggcaagaactgtcaaacagtgttggctccctgttccccaaacccgtgtgagaatgctgctgtttgtaaagaggcacccaattttgagagcttcagctgcttgtgtgctcctggctggcaaggtaaacgatgtacagttgacgttgatgagtgtatctccaagccgtgtatgaacaatggtgtctgccacaacactcagggcagctacgtgtgtgagtgtcctcccggcttcagtgggatggactgtgaagaggacatcaatgattgccttgccaacccctgccagaacggaggctcctgtgtggaccatgtgaataccttctcctgccagtgccatcctggcttcataggggacaagtgccagacagacatgaatgagtgtctgagcgagccctgtaagaatggggggacctgctccgactatgtcaacagttacacctgcacatgccctgcgggcttccacggagtccactgtgaaaacaacattgacgagtgcactgagagctcctgcttcaatggcggcacgtgtgttgatggaatcaactctttctcttgcttgtgccccgtgggtttcactggtcccttctgcctccatgatatcaatgagtgcagctctaacccgtgcctgaatgctggaacgtgtgttgatggtctgggtacctaccgatgcatctgtcccttgggctacaccgggaaaaactgtcagaccctggtgaacctctgcagccggtctccgtgtaaaaacaaaggaacttgtgttcaggaaaaggcaaggccccactgtctgtgtccgcctggatgggatggtgcatactgtgatgtgctcaacgtgtcctgtaaggcggcagccttgcagaaaggagtacctgttgaacacttgtgccagcactcgggcatctgtatcaatgctggcaacacccatcactgccagtgccccctgggctacacggggagctactgcgaggagcagcttgatgagtgtgcatccaatccatgccagcacggtgccacctgcaatgacttcatcggaggatacagatgtgagtgtgttccaggatatcagggtgtcaactgtgagtatgaagtggacgagtgccagaaccaaccctgccagaatggaggcacctgcatcgaccttgtgaaccatttcaagtgttcgtgtcccccaggcacccggggcctgctgtgtgaagagaacatcgatgaatgtgctgggggcccccactgccttaacggtggccagtgcgtggaccggattggaggctacacttgtcgctgtttgcctggctttgctggggagcggtgtgagggggacatcaacgaatgcctgtccaacccttgcagctcagagggcagcctggactgcgttcagctcaaaaataactacaactgtatctgccgcagcgccttcacgggccggcactgtgaaaccttcctagatgtgtgtccccagaagccttgcctgaacggagggacttgtgccgtggctagcaacatgcccgatggcttcatctgtcgttgtcccccagggttctctggggcgagatgccagagcagctgtggacaagtgaagtgcaggagaggggagcagtgtatccacactgactcgggacctcgctgcttctgcctgaaccccaaggactgcgagtcaggatgtgccagtaacccctgccagcatgggggcacctgctatcctcagcgccagcctcctcactattcctgccgctgccctccgtcgttcgggggcagccactgcgaactctacacagcccccaccagcacccctcctgctacctgtcagagtcagtactgcgccgacaaggctcgggatggcatctgtgacgaggcctgcaatagtcatgcctgccagtgggatggaggtgactgttccctcactatggaggacccctgggccaactgcacctccactcttcgctgctgggaatacatcaacaaccagtgtgatgagcagtgcaacaccgcagagtgcctgtttgacaactttgagtgccagaggaatagcaagacgtgcaagtatgacaaatactgtgcagaccacttcaaagacaaccactgtgatcagggatgcaacagcgaggagtgtggctgggatgggctggactgcgcttcggaccagcctgagaacctggcagagggcaccctgatcatcgtggtgctcctgccccctgaacagctgctgcaggattcgcgaagcttcttgagggccctgggcaccctgctccacaccaacttgcgcattaaacaagattctcagggcgctctcatggtgtacccctactttggggagaagtcagctgccatgaagaagcagaagatgacacgcaggtctcttcctgaggagcaggagcaggagcaggaggtgataggctctaagatatttctggagatcgacaaccgacagtgtgttcaagattcagaccagtgcttcaaaaacacagatgcggcagctgctctcctggcttctcatgccatccaagggaccctatcctaccctctagtgtctgttttcagtgaactggagagtccaagaaacgcccagcttctctatctgctcgcggtcgctgttgtcatcatcctgttcttcatcctgctgggggtcatcatggccaagcggaagcgcaagcatggcttcctctggctgccggaagggttcaccctccgccgagactctagcaatcacaagcgccgtgaacctgtgggacaggatgccgtggggctgaaaaatctctccgtgcaagtgtcagaggctaacctgattggttctgggacaagtgaacattgggttgatgatgaaggaccccagccaaagaaagccaaggctgaggatgaggctttgctgtcggaagatgaccccatcgatcgacggccctggacacagcagcaccttgaagctgcagacatccgccacactccatccctggcactcactcctcctcaggcagaacaggaggtggacgtgctggacgtgaatgtccgaggcccagatgggtgtactccactgatgctggcttctctccgaggaggcagctcagacctgagtgatgaagacgaagatgctgaggactcttctgccaacatcatcacagacttggtctaccaaggtgccagccttcaagcacagacagaccgcactggcgagatggccctgcaccttgcagcccgctattcgagagctgatgctgccaaacgcctcctggatgctggtgcggatgcaaatgcccaggacaacatgggccgatgtcctcttcacgctgcggtggcagcagacgcccaaggtgtctttcagattctgatccgcaaccgtgtaaccgatctggatgccagaatgaacgatggtactacccccctgatcctggctgcccgcctggctgtggaaggaatggtggcagagttgatcaattgccaagcagatgtcaatgcagtggatgaccatggaaaatctgccctccactgggcagctgctgtcaataatgtggaggcgactcttctgctgttgaagaatggggccaacagagatatgcaggacaataaggaagagacacctttgtttcttgctgcccgagagggaagttatgaagcggccaaaatcctgttagaccattttgccaaccgggacatcactgaccacatggaccgccttccccgggatgtggctcgggaccgcatgcaccatgacatcgttcgcctcctggacgagtataacgtgactcccagccctccgggaacggtcttgacttctgcgctctcacctgtcctctgtgggcccaacaggtctttcctcagtctgaagcacaccccaatgggtaagaaggctaggcggcccaacaccaagagcaccatgcccacgagcctgcctaaccttgccaaggaggccaaggatgccaagggcagcaggaggaagaagtgtctgaacgagaaggtccagctgtccgagagctcagtgactctatcccccgtcgattcgctcgagtctcctcacacgtatgtctccgatgccacatcctctcccatgatcacatcccctggaatcttacaggcctcgcccacccccctgctggctgctgccgccccggctgccccagtgcacacacagcatgcgctgtctttctctaaccttcatgacatgcagcctttggctcctggagccagcaccgtgctcccctcggtcagccagctgctatcccaccaccacatcgcgcccccaggtagtagcagtgcaggaagcttgggcaggttacatccagttcctgtcccagcagactggatgaaccgtgtggagatgaacgagacccagtacagtgaaatgtttggcatggtcctggctcctgcagagggagcccaccctggcatagcagctccccagagcagacctccggaagggaagcacatgtccacccagcgggagcccttgcctcccatcgtgactttccagcttatcccaaaaggcagcattgcccaggcagccggagctccccagacgcagtccagttgccctccagctgttgcaggccccttgccctctatgtaccagatcccagagatgccccgtttgcccagtgtggctttcccacctaccatgatgccccagcaggaggggcaggtagctcagaccattgtgccaacctatcatcctttcccagcctctgtgggcaagtaccccacacccccttcccaacacagttacgcctcctcaaatgctgctgagcgaacccccagtcatggtggtcacctccagggcgagcacccatacctgacaccatccccagagtctcctgaccaatggtcaagctcttcaccacactctgcatctgactggtcagatgtgaccaccagcccaactcctggaggtggtggaggcggtcagcggggacccggaacacacatgtccgagccaccacacagcaacatgcaggtgtatgcatgaagagtctgcctcagccttagagatggaagtgcctatcacacatactgctgaggggcgagtgaaggttatccggagagaaatgaagagacgtcccgtccgtgaccatctttcggaggcaggagagagaggctccaaacctgaggcaagcgtgagaagccttctctccatcttccctcgctctctgtgcagttttaggggaggacgcagctcctactgaccttcacccatcctgcaagttcatggagatgcaagatgagtgacaagccttgagaccccttgctctcttttaatttggagaataccgtggatgccttttatcgcccagacattctcgcagcctgagtaacattttaagccccggggcttctgactgagtgccccgggactctgtccaggctgacgtgtccagtcttctcagccctggaagtggccttgacgtcactcggtgctttcctctctgcgcccgtctgtggttgatccccgtcagtgtgtcataagcgagatgtctgtgctcttaatcattcctgacctggaaaccgacttcagcctcctgttcccacattcccggcacctcacaggtgcctcacagggtttactctggccatgggtctcagccctggcctctgaagtatgcttctatggaaaatgcacacactagtcttcatgtcttattcctagaaggaaagaggaagcaaaatatttggggactagaagcctccttctgaacctgcaccttaatttctctcccctgcatgtggggccccatatacactcatcagggggaaggatctgaattgttcttctgtcagttggcctagtcagtataaaattgaactctaggaggcttaggtactgtgatattcctctcattttgttgtaaagtaggaaaagtgggtgagtgttggaatgtccaagaaataagctaacttgctcaagaagcaatcgcccccctccaggccctccattgactgccactgtgaagcacatttatcacctgatcttaggactcattgatccagcagatgaaggtactcttggctgctgcactgctcctcatagatgcccgcagaagaaaatgcctctccatttgcccttgccatttaggacagaacttgcctggggcacaggggacccagtgactgccaacttccttaggaccactttgctttccgatcagaagccagtttctttccacagcgtgtgatctgagagactggtgcacacacagtaggttctcagtgaagacgtggagtctgtatttgggttccagatgtggagaagggacagtctcctgagctcacgaggcagcctttgctagtcgatgctgcattctcttccttccctagagtccccttccgatgatgacggctccccattgtccttgtgttcagattaagattgtacctcatccgaacctgcttcctgcagtgtggtctcagtgacttctcagactctcaagagcagaaacatttttatctgtggtaatctaggatgatagttttctcctcagtcatagggctaataattgcccctatggccatgccatcagtcactgcttcctggtgccatggcacccaggacacaggaaaatgagttctgctggagcatttgtgtatattattagggggaccacctgggggtgtttgttttatgggttttgttgttgttgttttaataatagtctttattcctgtgatagtt

SEQ ID NO: 908 - protein, 2451 aa, Mus musculus
MPALRPAALRALLWLWLCGAGPAHALQCRGGQEPCVNEGTCVTYHNGTGFCRCPEGFLGEYCQHRDPCEKNRCQNGGTCVPQGMLGKATCRCAPGFTGEDCQYSTSHPCFVSRPCQNGGTCHMLSRDTYECTCQVGFTGKQCQWTDACLSHPCENGSTCTSVASQFSCKCPAGLTGQKCEADINECDIPGRCQHGGTCLNLPGSYRCQCPQGFTGQHCDSPYVPCAPSPCVNGGTCRQTGDFTFECNCLPGFEGSTCERNIDDCPNHKCQNGGVCVDGVNTYNCRCPPQWTGQFCTEDVDECLLQPNACQNGGTCTNRNGGYGCVCVNGWSGDDCSENIDDCAYASCTPGSTCIDRVASFSCLCPEGKAGLLCHLDDACISNPCHKGALCDTNPLNGQYICTCPQGYKGADCTEDVDECAMANSNPCEHAGKCVNTDGAFHCECLKGYAGPRCEMDINECHSDPCQNDATCLDKIGGFTCLCMPGFKGVHCELEVNECQSNPCVNNGQCVDKVNRFQCLCPPGFTGPVCQIDIDDCSSTPCLNGAKCIDHPNGYECQCATGFTGILCDENIDNCDPDPCHHGQCQDGIDSYTCICNPGYMGAICSDQIDECSPCLNDGRCIDLVNGYQCNCQPGTSQCEINFDDCNPCMHGVCVDGINRYSCVCSPGFTGQRCNIDIDECNPCRKGATCINDVNGFRCICPEGPHHPSCQVNECLSNPCIHGNCTGGLSGYKCLCDAGWVGVNCEVDKNECLSNPCQNGGTCNNLVNGYRCTCKKGFKGYNCQVNIDECNPCLNQGTCFDDVSGYTCHCMLPYTGKNCQTVLAPCSPNPCENAAVCKEAPNFESFSCLCAPGWQGKRCTVDVDECISKPCMNNGVCHNTQGSYVCECPPGFSGMDCEEDINDCLANPCQNGGSCVDHVNTFSCQCHPGFIGDKCQTDMNECLSEPCKNGGTCSDYVNSYTCTCPAGFHGVHCENNIDECTESSCFNGGTCVDGINSFSCLCPVGFTGPFCLHDINECSSNPCLNAGTCVDGLGYCICPLGYTGKNCQTLVNLCSRSPCKNKGTCVQEKARPHCLCPPGWDGAYCDVLNVSCKAAALQKGVPVEHLCQHSGICINAGNTHHCQCPLGYTGSYCEEQLDECNPCQHGATCNDFIGGYRCECVPGYQGVNCEYEVDECQNQPCQNGGTCIDLVNHFKCSCPPGTRGLLCEENIDECAGGPHCLNGGQCVDRIGGYTCRCLPGFAGERCEGDINECLSNPCSSEGSLDCVQLKNNYNCICRSAFTGRHCETFLDVCPQKPCLNGGTCAVNMPDGFICRCPPGFSGARCQSSCGQVKCRRGEQCIHTDSGPRCFCLNPKDCESGCNPCQHGGTCYPQRQPPHYSCRCPPSFGGSHCELYTAPTSTPPATCQSQYCADKARDGICDEACNSHACQWDGGDCSLTMEDPWANCTSTLRCWEYINNQCDEQCNTAECLFDNFECQRNSKTCKYDKYCADHFKDNHCDQGCNSEECGWDGLDCASDQPENLAEGTLIIVVLLPPEQLLQDSRSFLRALGTLLHTNLRIKQDSQGALMVYPYFGEKSAAMKKQKMTRRSLPEEQEQEQEVIGSKIFLEIDNRQCVQDSDQCFKNTDAAAALLASHAIQGTLSYPLVSVFSELESPRNAQLLYLLAVAVVIILFFILLGVIMAKRKRKHGFLWLPEGFTLRRDSSNHKRREPVGQDAVGLKNLSVQVSEANLIGSGTSEHWVDDEGPQPKKAKAEDEALLSEDDPIDRRPWTQQHLEAADIRHTPSLALTPPQAEQEVDVLDVNVRGPDGCTPLMLASLRGGSSDLSDEDEDAEDSSANIITDLVYQGASLQAQTDRTGEMALHLAARYSRADAAKRLLDAGADANAQDNMGRCPLHAAVAADAQGVFQILIRNRVTDLDARMNDGTTPLILAARLAVEGMVAELINCQADVNAVDDHGKSALHWAAAVNNVEATLLLLKNGANRDMQDNKEETPLFLAAREGSYEAAKILLDHFANRDITDHMDRLPRDVARDRMHHDIVRLLDEYNVTPSPPGTVLTSALSPVLCGPNRSFLSLKHTPMGKKARRPNTKSTMPTSLPNLAKEAKDAKGSRRKKCLNEKVQLSESSVTLSPVDSLESPHTYVSDATSSPMITSPGILQDTPLLAAAAPAAPVHTQHALSFSNLHDMQPLAPGASTVLPSVSQLLSHHHIAPPGSSSAGSLGRLHPVPVPADWMNRVEMNETQYSEMFGMVLAPAEGAHPGIAAPQSRPPEGKHMSTQREPLPPIVTFQLIPKGSIAQAAGAPQTQSSCPPAVAGPLPSMYQIPEMPRLPSVAFPPTMMPQQEGQVAQTIVPTYHPFPASVGKYPTPPSQHSYASSNAAERTPSHGGHLQGEHPYLTPSPESPDQWSSSSPHSASDWSDVTTSPTPGGGGGGQRGPGTHMSEPPHSNMQVYA

SEQ ID NO: 909 - DNA, 88208 bp, Homo sapiens
tttgatttacatttccctgatggttgatgattttcaacatcttttcatatacttattagtcattatgtatcttctttggagaatgtctgttcagatcctttacctactttataattggtttatctttttaatattgaactgtaatagtttttaaaaaatatatcctaaatacaagtctcttatcagataatatgatttgcagatattttctgtcattctatatactgtcttttcacattcttgatgatatacttttcagcccaaatgtttttaacttgatggaatacaatttattttttcttttgttgcttgtgctttcagtcatatttgtgaaaactttgcttatcccacattacaaagatttactatttctaagtgatttataattttaccacctacctttaggtctccgatccattttgagttaatttttatgtgcgaggagggagtctaacttgattcttttacatgtggatatttagttgtcccaggaccatttgttgaattaagtgctgtttttatctaattcgtttaatctttacaataaccatttaaggtgggtcctgttaattccccaagaaagtttaagtatattgcccatattcactcagctattgcatggcaatgctgagagttgagcctagacagtttggccccagaagccatgcttttagctatgaaataactgtcttacctacctcccttcttacctacctatctacctattgacagggaaaaagtacctcaacaatagtcaatcagttataaaaagaaaacactttatttcttttctgttgtggttctgctgaaatgcttctgctttcttgtctgtggttggtgaattcagttagttgtaacattggctaatataaagttagagtcacagtttctattccttatagttgagctacaagggcttcgctacctccctgacaccctagtcaactgtatttagtcttactcatcagagagatcgagttaggggaggatgatcattgaccttctactacaccaccagacctctcaagtttagcagttgtaggccaggggccccattttccccaacaatctaaaactatgtctttaaattttccaaagaatatcttcatcaagagcaccagactaggggcaaagaccctagttcttactcaaggacctagtagatcccatagattctgtaggggtgggcttcaatggctcatcattttctggctcattggtctatttgtaagactcatatttctgtatgaataatatgaaatatgagtaatatgatacatttttgaaatttgagtaaattttcatagtctttttcaggcttctttagtgattcatctgcttgaatggactgagtaccaaatacttggagaaatataatttccttcaataaagccttcagtgatttctgtcttccatggagtgatttttggctaatgtttttggtcactcagtttatacttatttatatgactgccattgtatttagagaaatcagccatgttccagtgtagcagagcagatgtagaatgccacagtaacttatggtaaggaataaagcaaagtgtgattgatgtgtgtcccactcacaaggctgtaaatgccacaaaagcagggactcactgctgtatcaccagtgcctaatgtaagtcccagtaagtattttgagtgagagagaggaaccttaagggatatttcgaggaagccaaatatgtaatcatactatatttcaaataggagaatgtttagaatagaagctggtagtcttctatttaattagctcaggagtttggtagcaaggaaagagaaagtaagaggcccaacatataaactacaaaggaccacactgtgggcagttagagtgaagtttggtgtactagtttcatttttcataaaagaaaaagtcaagaggaaggaagcaatgctgtaagtttagagaagagcctgatgaatttgaagtgctggtaagcttagttagtaataatgccacccaattttcagataccttttaacatttgtatagcactttactcatgatgtggcacttataattagaaagacaggataggcaagtggaattagcctcattttttacaggtgaggaagttgatgcagaactttagcttaccatgtacgaatagcttgcaggtggtgagattgggacttgatccatatcttcatactttaagttcaatatttttcctatatcctcccccactcccttccccacctggcttggaggccgcctagcaatcattcaaagaaaaaaaataaaaggaacttaaatttaattaggtaatattttatctgttcttcccattagtctggtatggagctggggaaaatccaataccctgtttttttagaacccttgaatatctctgtcccaagtagacatttatcatccctgggattttatttcatgaaaacattttgaaatacttgtgaggtaactatgaaggcatgccattggcacaatgagtcactttcactgtctagctatgcttgaggccagagaagacagagaattggggatttttcatatggtgagtcctgggtgagcagctgttgaactgaagtcatgaagcgggtctattctaataaccatgttctgtgggaacagagcaggtcgtttcttctgtatgagatttcatcattttcatttgttcttcatttaccaggttttgaagggagcacctgtgagaggaatattgatgactgccctaaccacaggtgtcagaatggaggggtttgtgtggatggggtcaacacttacaactgccgctgtcccccacaatggacaggtatgtacagtgtggagaatccaccagaatgggatatggattggtaaccagaggcagactgtttttttaaaatatcagtaacaaatatcttaggcctgctctggaaccagtatgtgaactgagcaggatctccatgctagatcattgcttattgtactaacctcatacattttcctatgttcactcaaagacatattttcacaggtattattgggcagcaactctgaacccagcaccatgctagatgctgtggcagatatgagagaagagcactactgtaagcttattatctgggaaaagcaggacattacctggaacatagtagatgcttaataaatattaaagaggaaaaatttcctgaaatgctaaaataaattgtacaggctaccagagttcagagcctatttgttcacggacagagatctgtcccatcttaatgtcatgttctataactaggcaaagtgttaggcaggtactcttaatgacattatttttatgatacgcatcctacatttgtttttttcttctatccctttttgtacacgaacaaaaatagttttttctgcctctaacattagaagggtagtcttgcttaattttacagcctcttggaagtttctcatgtagtcttaggcaggttgagtgatttacgcagacatttggttctaatttctctttatgtctgtttatctactgaaagtagagacaattaagaactgattaagggactaagagctgggcctttttgagagaaattaatttaatgtggaaacccaacaggaagttagtattataagaaaaaattacagtaccagtagtgggctatctcctacaaagaatcttaatgttgaagtgcagccattactacctggtattctttagtgtctctgaattacttttccttatctgtagcatctaattatttacaatactctttagagctgtagactatgaatagaaaaagatgaaaagcatttaaaaactcaatcacaggacttactggggaggccaaacatttctgcttttaattcccaaactgtcccttttaatactttcccaccaggttttcctagaattgggacttctcctagaatttcttcatggtgtcttgatcctagaacttcacttctaaccctctgtactttttgtgacattgtctcttctagtttttgccatttttctatgatagacttttcagaggctattttttcaacttaaaaaattactgtaaagttaattacatgacatatagtaactggaaaaatttgtgttttttttctctttttaatgatccttacagtattggacaggatgagatacttgttaagaacttgaccacattctgatctctcccttgctctgtgagacagtaactgtgtagtactgaggcttctgatgccagtgaagattaaacaacattgtaatattgttgctggtttttgttcgatactacacttggtttcttgctttgatattaattaggaaggcctgctcttggggaaaacttccccagtgaaatgatttttttattcaaatttcttatcccaggacatttaataaatgcctcttttcgctagaagtctttataagatgtttccgtttttatattttccaaaaagggtggtggagatcatggataagtttaatgtggcagttttatttcttttgatttgctgtctgtcatttagagtgaccttcagttttttttttgttattcatcacaggttttcttcactcatgccaattctttgattcccagtgagaagccttgtttttgccctgcccatcatcaacaggagaaagtctaagatccttcttctgttatatgaagcctttcatggcttcagctctgtctgcttccccagtctccttctcatgcatctagcagcataccctagcagttctctgctcacagttttcctgtacatactgcatagtgcttcacatcctgtgtcttcattgacaccattccttttctctagggtttccttctccactcctcccccatttttctcatcatttttggcatgcctgactcagatcaagtggttacctgcttcaggaaggcttccctgatctcgctccaggctgagctaaatgttctactctggactcccttagtaccccatgtattctcctgtaataacacttaccacgtttgtattgatattattatatgcttgatgtgagggatgtaccgagttatgggggcggttggactattgatgacagcagttactagcactccttacagacctttgttctcagtagcatgtagctgagctatttaccatcccagcccctatcctattgtaaagagaaaaacagaaggaaaattttgtgtcatagggcttctgtttctactgatattagatgtataaattcagattagtcttttctgtgttacacaaattaaagaagtgaatggagcaggaatctagtaggagttaactaatgtttattagcatccaaatactgtgctaattacaatgttttatctgtgtaatctttgcaataactgtattagagatagagtttaaatatccttttttcagatgatgatgcgtattcaaaagggttaaataatttgcccaagacccgtagtggttgggttagggtttgaatctaggcttgttgaactccaaatctttgctcaaatctgtagtcttttttctatataaaattgattttgtaaattatcttgttttattttaagaacttggggtgttttttaatagactgaaaatttcattatcctgagatttggtgatttactccatgtgttttccctttttaagaacctagctggttattttgaggttagaagttaacattatgtgtatgctttagattcagtctgatgctttttcactatacctaatagcctattgcaactttgttcagaattccttttacaatttccacctgtagacttgaagcattaactatttggtctggcttttgacaaaatgaaaaaggaggggttggagtagtgaggtgagaaaatgaaggaaatgaagttgccagctatttgaaaaagaatggataagactatatggctgaaaaaagataggcattaattttaaataaatggagatttggaaatttgccatgcttttaatgagaagaacctgatagttacggctttgttttgtaactacatatacataaaaggcttggtgttttgtagcaagttctacacttcaagatgagcataaattccagctctattcatggtttgatttagggtaaatttgtcagcctccttttctcagaagccttcatttgctattatctctttcttgggatattgaaacaatcaaaaatgcaataaaaagtttattttttcatttgttctgccaacagctattatgctaaacattctaaattcatcctattctatatggtggcccctggtttcatcttgctattgagcatctgaaatatggctaatgtgaattgagatgtgttgtaattgtcaaataactgattttgaagacttagtatggccgggcacagtggctcatgcctctaatcccagcactttgggaaactgagatgaatggatctcttgggcccaggagtttgagaacagcctgcgtaacatggcaaaaccctgtctctacaaaaaatacaaaattagctgggtgtggtggcgtgcacctgtagtcctggtcacttgggaggctaatcacgccactgcacattccaccctaggggacagagtgagaccaagaacctgtctcaaaaaaaaaaaaagaacttcatatggaaaaaaagatatctttttaataatgtttaaatattgattagatgctgaaataatacattttggtacattgaattaaatataacataatattaaaattaatttcccctattcctttttaccattaaatattttagtagccactggaaaatttgaaattatatctgttactctcattatatttcagttggacagcattacttcagatgcaaagatggtctgtaggtattaccattgctgctgctttgtagaagcatctgttctagccctgaagtagaggaatagatggtttccccatggcctgtgggcagaactgtgttatataccccactacaggcgtttttacctactgtggctgtctaattagtgtttgtttgtgccttcaaaaactaccactcttgtggactagcttaagctcagatggaaaaaagaaattggtcttagggagtgggtgtggggagatgatttacttctttatagggaagtgtcttatagggataagcctgaatactggatattcctttaggaaatagaagtagacctgatggttggatgaagatagagcacaaacgtctttattatactgtatttggcctcaggccatcttatcagagaagttctgctctggcagatatccatttaaggaaaaaagggttttaaagggcccaaaatttattagagcagtgtagattaatgttttgtctacatagactgttatttgaattttctttttaaaggttcatttccttcagaattaaagttgaccctaagctcaactcacaaattcctctctgtggctgcttttgactttgggctcacttctggggcagatgtgatttattttcttgtgcttgttattaatccagaaatataatttcagcatgggcttggaatagtgctctgggacatgaagcagaagtgaacaatggaagttaggtggatatgagtcaaagaaaactgaccacactttctctcagctctcctttacagcatgatgagcctcaagagctgggggaggttttcattgctgtcagtgctcccaattcagtaaaaatgtttgatgtgagttggcaagtacatttgccagaggtggtgcatgagctccttgtgtctgggaatggagattttcatgatggtgcttttattttgagctagatcttcctgtctcagtctagcctctagctggtgatgaattattctctagagtaaggcttttctcacaaccatttttctacttttttttttttaggactatagggatggaggttttttgattgagagagaatactacttaattatatatggtatttcaaagctgctctcttttatattctacatggaggaatgggaaaatatgtctcacatttcaatttttctgctgtaagcctgattgtgagaagtataataagcctgttttctgaattctacctcctcaccccaaattcggtttcctatcagttgggcagactgccacagtgctaacctgaagcacccttgccccagatgtcccagagttgattagtggcgctgttggtggaaacaaggacgagtggatagtctagccccacatgcaggaggtgagactgcaggcaggatctttcctgccctgcagtccatgactcagggtgtagccttggctatgttacaggcacgatccagtttaacttcatggctctctaagcccccatggaacggttgttagtaggttcaataatttatctattggacctacttacagatatttattgaacaactactacatggaatatattatgctagatactgtaagagacacaaagaaaaaattcctattttaagagtggtaaaattgactaggaagacataagaaagtccacacataaccacactaggaagcagaaggtgtgtgtgaatgtgaatttgaaagaaacaatggtgggaatggggaagcatctaagtacttggtggggtaaggaaggtgatcgagaagagtgaacttctgttttgagtctgagtaatggatgggaactgttgacagagaaggagaaatagggtagaaatgatggtaagttggagatgagttttccaagtgaaaaacatgcagcagtaagacccaggagctcagaatacaggcagggacgagagactcagggttaccatggaatgtgtcaagtctgtgagggaaattggatggagtgataagaacagaggatttggacccgaagtatgagaaacatccacacttcagaaaattgacgaggaaggggatccaaagaaggaaagtgagaaaaggggaggtttgagaggtgggaagagagctcggccatgatagcatcctcaagttaaagggtacagccttagaagcttgccctgaactcaactccacatgccttggtggcagctcctgtaatattttacttctcttactgcgttatttgttcagcttgcctaagagactatcagcctctggaaggcaggaaactgctcttacttattttgacattcccagaactgattttaacaaaccatggttattaataactgacaaccaggagactcaaatataaatgataactgcaaaatattcattagaatatttgagtcattagaaattttctgaaatacagttttaatacagacaagactaagaagctagattgaggaagttaaaggaaaaagtaggctttggggagaaggaaggggcaaaatgggtttagatcactatgtaagattttgcacaactgaaaaggaagagcgagggagacacaacgcagggttatgggagacagaaactttattcatctcattgaccatagagcttggctacactaagagtaaggcagctcaaagggcgttggctaatgaagtggattattgggaggggtttactcttacagtttttagtggggaatactttaggtaagatgtctgctgggaatgggaaaggaagaagatgggaaagttatagtcagagagtggaagtaccaagtttgagatcttggactagaacaatgagtgtcttgtaacagaggtgtagaatgtgagcgtgcttgtgatatggaatggatgcggaggtctgtaaggttgagaaaagtaagaactcttgactcagatgaccttactggtcctcaacccagatgttgatatcatgcgagacaggagaggaaagagcgagaacataagccacatgcttgtcattctaggaagaggaaattggtccacgagaacgacagaccatggtgtgataatttatattatactatgtcttttttttaatttttaaaggacttcaattcatctatctacttttaatgtcagaaattagaatgtatttattgatttctttctctcgaagatgaggaattagcatacttctcatagctttcactcactcactagactttgtataaataatctgggtttcaatatttatattattgttatcaaatttataaacatatacatattctttaaaattattcttgatatttacaattttataacccaatttataatattttcaacttagttgtatgtgctacttgttttgtgttaactaccagtgcaattatgtcacaacattttcatttctgagttccttattttcattaacattttagctgaataagtatctttgaataattttatttcagaggagttacatgttggacccatttggttagtcaaaaaatgtcttttgatttagttgccttcatacacaagttgtatcttgactagatatcaaattcttgggtcacgaattaatctcatcaaattcttagacattgttcctttgtgtcttctggttactattctagggaaatgcaatgccagttgagtgtttcttctttttcataagtaacactgggctccctgccttctttttcatttgttgtagagttgtcaggaaaacctattatctttgcaattaggtcttcattctttcttctgcaaagctaaaatctctcttgatttttaatctgttcattttttgttttgtgttctgtgagagctctcttaaggttcttctttataacactgacttatatttcttcattgtcaggtcagtcctttatagcttcttctgcctgcctctcagcccctttgatcagagactaatgtcctatattattttttatttctttgtagaacgtaaacatgtctaaatgtcttgagtgtacaggagcagttctttctaaaatgtattagctcctgtaagtgaataattttcccagtgtgcttttcatcaatatcttaagcattacattctccatgttttatgttgtagaatcttttaataggtgccatgttgtttttttccattttactcattctgagcagagtaactgcctgcccatagacaggggaggtgggtgttcccctggatcccctcactctcaacctggctgcagctagtttttcctcctggtgcagtgaggggcttttatgtaaactggctcaacaacccagcagcctaaggtggggagagccagagagtggggcctcctagcaggagaccaaagcttggcaccactttcttctctgtggcgggggtcagctttctgaatgcccagtactggcccagcctccatggcaatccacccagtggctgagcctggatgcttttcagtgctgctgcctccggaatctgccccagatgcactgcagtatttctcattgctatagtggccaatagtggccacaggagcctggactctgcagttcttgaagtttttgttgacctggaggggtgaggtggagttcagtccattctcctcactgcagcagagtggactttctgaaacatgcattggatcgagtcatttctttgctggaaacacttcaatgggtcctccttgtctttggatttagtcccaaggctgtgcatgtaactccctctccagccacacctctcttcactcccctaatgcatttcttataattcaaccacaagaattttttttcattgccgcaaatgaaccatgctgtctcttcaactcaagcctatgctttctgcctgaaatactccgcactccaccctttctctacacactccctcacacacttctcccctctttcacaacctggcacgctcctcccaggccttctcttaaaagttacattctctagttcctctctattctccctactctgtactcccaaggcaataggtatctatgaaagcacctgtcactctgtgtcatcattgtttgtttggttataagtctgctgtttgtaagttctgcaggcagaagccatggctgttttgttcaccattataatcccattgtgtatagtcagagcctggcacattgtgtttgtgtgcgtgtgtgtgtatgtgtacatatatatattttagataaacgaatgaatgaattacagcattaaattttccagttgttcccagcccaacctcatctccaaattcacagctcttcttacctttctaagatactttagtatttttcttcagtgtgtaccgagtttgtactaaatctgtaaaattagactaattatatatgaagactatagttgacaatcaatgtaaagcacatatcatctggaacctagaaataactcagtgcatatgtttttactgctgaggttagtagtgacgttggggaataaaaagaaaacccgctctttctcccctagtttcctgtcagtggcagtgtttagaagaggaggactgcaggagctctaccgcagagggctgactgggctggtgtgtttagggaaaactcaggtttcagtcaaagaaggaagttgtacaccttaatgtagagttgcccttgaggcgtagttgaaggattagtgggcaaaggcaaggtgaatctgggtgtgatacaaatgagatagagttcagtgacacaggaaggggactgggatgaggggtttgcgtgtgaactggtggtgtagacaagggtgacggacactttgggtaggaacagaatagagatactgttgctatgagaagggtgagttgaaagataattattattttgggattaggataacttaaataagagaaccttaagcagataaacattcatttaacgaatatttatttaagcttgggattgtgtttcatgctggggattcagtgatgaggtaaacagctaccccccatttcttcatggcactgacagtctagtgagaaacacaggcatagacaatataattctccataaaattttgaactgtactaaatgccttgcaggaaacatagaatgtatctggagagcatattaataggcagaactaattgtgtttagtgacaagcaagtaaggtctctttgagaaagtaacattttccatatagacaatgagtaggagttggggagagtgaggataagactatcccaggcacaaggaataacgtgtgctagccactgaggagggaaagaatgtgatcattttgagaaatgaaaaaagcccagagtggctggagctagtgatatttcatggttagagcctaaagagataggcagaaaacactggtaggtgttagaattttatcctaaatgcaaaataattcatcaaaggatttgaacaagcgagtggcgcgttctactttacatgttaagatcatcctggcggctctttagaaaatacattggtcatgatgcagggaaaccaggcctttgagaagtcctgaaaaagatgatgctgtctagaattagtggaggaatttcttgcatttattctgtgtatgaatatcctttccacaactacattatccccttagccacatctatactcccagaccatcctctcagtaggcaggccctgtagacagcagtgtttatacagaatgtttcacccaactttattccgagcaggtgatgggacactcaagcttgttctttgttcttcagctccaacttcagcagcgtgatagaaagtctcctgtgtatggagctgaggttttgtaggatagaagtcccaggaatgatctgctctgacacagaaagagatgaaactccagaactcaggggcttgggtgactgctggttggaaaggtatataggagatggagctctcttgactcagccatagaggagaaggtagcagactcagtgcaagggccagccaagctcattttttatttgttcctcttgtggagattgttgttgcaatgagagttgacccttaactggaccagtaatgtgatcagactttttcccacagacttcacagttgagagatgactggaaaggatgagagtcgaggctcagcaccttacttttttcaattcctttctcttcttttctttctttctcttgttgtccccctctattttttacccatcacttgtagctccaaatcagattagtggtttgtgggtggggcccttgccttgagagagccataatgagctgtttgtgtccctgcgtgttacagctcataaatgctgactgtttcatggtctttggctcacttggctgaagcgtggtgctaatgaggcccaggccatggtttctatttcagcacagacctcttaggttcaccctgttatatttactgccacaggctgtgtccataattttttttttttttttttttgagatggagtcttgctctgtcgccaggctggagtgcagtggcacgatctcagatcactgccacctccgcctcctggattcaagcgattctcctgcctcagcctcccaagtagctgggactacaggcatgcaccatcatgcccagttaatttttgtatttttagtaaagacggggtttcaccatgttggccaggatggtctcaatcccttgacctcgtgatccacctgcctcagccttccaaagtgctggaattataggcgtgagccaccacgcctggctgactgtgcccataatcttacttgttcagcctgaagccagaggatggagcaacaagaaaagatcagcatggaggtgaccctactcctgcaaaaccaaaacagtatacttcctttgctaatggtggcttggtaatgccatgtcatcttcacttgtagcactctgagtttcttcctctttccctacatccctcaacagtcagctcagattggccttctttattttgaaaactaacttgatctgcagcaatctcacaccccaaagtctttatcagcactgagctattttcacttctaattattttgccaactaactgtgcaaagttgggcaagttgctatacctctcaggtcctagtttcctcatctgtaaaatgagcatgttagattagatgctgtccaaggtcagttccaccactgacaccaagtgtctagtacagtggctggcatagatactgaggtgaatggcagacacagtccctgccctcctggagcttatagcgaaatggggaagagactgtaaagagtaaataaatatgaaatcacagctcgtgatacattccaggatggattgaatggaatgatgcaatggtggagaatcatgaggagatgtgcatttggagacctactctattgataagacaggtacctcgccatgtgaataagcagggaaaaaatgtttcaggtggacagagcagcttatgcagcagcactgaggcaggagagaacttaatgtttgaggaatcaacaaaagttattgtggttagtataaactgtacaaaggagaggtgtagatttgagtatatttacgaggcaaaagtgatcaaccagaaaattgtcagtagttacaggtggcactcagtgtttaaggtatcagccaaggatatgctagtttgacatttcatttcagattattccagagtcattgtggcattagagagggtagtttttaaaaacaagttatcttctttctcttttgcccataggaaataagagcctaactagtccactgcctcagtcctgatgttaaaaaaatgacagtagcctgcaatatctggcaggtggaaattactgagagggataattattgctcttgaaaacttgcctaactgagctttgtgcaacattttgggagttcaccagcaaagtttgtgtgttgacacaggtgatgatacatgctgacacttgtttgtattgaagatttagtagcttggtaggacatggaaacaatacagctctcctgtttcaccaaaggcttttatttgctaggtagcctataacttagtgctctctcctgctttccctactaacataaagtcatttgcttttaatcccttctatgttctattggccaacttaccttcaaacacagtatcgatcatgtctttcctcatcctcctttacttgttgtatcaagttccgaattcatactcgaagtcaaagcctcaatgacctcccactttttcttcttctaaaaccccagccaaagaatacactgcagttattttaatatgtttaagacttaatcctgtattcctctgtaaatcttcaaccaccagcccaggctggtgctttcttgcaccagtgggataagctcaatgaccgtagagcatacacgttaagacctctaggtgatcgccaagaacttttcccactcaaatatctagtgaccttctgcctttattcctttctaatacgagtgttccttaactgtcttatgcacctatgccttctcagggtgctgtaagaccctgggatcagcgacctcatctgtagattgtgttgatcacatccagggctgaatactcaactctgctgcagtcaaagagcatcagatttgcagtcagatcaatccgggtttcaatgcagcactctcactcaccaaccgtgtgaactttggaagattttatttccttttttttaccttcctgaacctgaagttttttatttttagtctttagcattggttttctcctgtgccaggagggtggtgacgtgaagggagttgttatagcagatgttccactgggaattttagaataagcaagttttatggccaccctggttactgtttttcctattctgaattttagaaccagttgatagaattttaatagggagaaaataatctggcagaaataggactaggaggaaatgtgaatttgtagaaatgtgcctgaaccttagagaagtgtgatccatccagtagctaattacttataagccactatcttcttggatctctaaatttcctgtccctaacaagcactatcgaacagatgcatggtccaaaggtgttcagtgaaggcagctaatcttcaaaattcagtctcattcaaaaatcagtggactgtacctaaaaatacatttcccttttagacaggagtttgcagtcacaagtgtttccagtaaccaattgtttgagtcatgatttgagtcctcacctcctccatcctgtccacttccccatgtctgtgtgcccttgggaagcccgagacatgcagagatggcttgatatgttcaggttctcacctcaggtctttgttaagaattttagagtgaggcagctccagttcaaatctcaactgtccttcactcactggcttacaaaggcaaattattttacctctttgaggctgtttcctcagatataaatgagacaatttttatgggagcccaagcacagtgcttgcttctcagtaggcagtcaatggctactggtttcctctcccaagagtgccacatttcctttcctttatttacctagtttgtcttgctacattatttcagtgtctgtttattatggtgcataagaaatgtatacaaaatagctttaaacacattgtgtcttatagtacccaaaattatcacaaagcctcaataaagaaaaatgacatctaaattgttcacattcagcaagtcagtttggttggtgggcagtggatatttgagttagcataagtataatagatgagactcagcaattttcatgttgcagtagctcttcacctacttcttggtcatgttttcatttctcaatcccacctgcatcctaataacacagctgtcattactttgaggtaccatttctgctagcactataagacagcaaagtttctgtaataaatgacatcatctaccctgagggagattattgccggtgagctcactccctccctccttcactctctgattccttcactcactcactgactccctccctccctccctttcttaccttcctccctccctttctcacctccctccatcttttactctctcacgcattccctccctcgctcactcactccttgcaatcactccctcactcactacctcagtgttctcactttcttattcatcttctcccttccttcctccctcatttccctcattaccctcattacctcccccattcactccctcatccctcactcactctttctgtattaatactttgggatgcagttgacacagcctcgtttcaaattagaaagacctgttgcaagaggcatctctcagaatggctatgccactgagtaggcttactagtagttgggcttcagtagcaattggaaccaacaacttgaatgccaccatgtttttttctctttgtgcacatcttttctatttttctttttttgagacagggtcttgctctattgtccagactggggtgcagtggcatgatcatggcacaagtgattctcctacttcagcctcccaagtagtgcctgcaggctggtctctaacttgtgggctccagtgatcttcctgtttggcctcccaaaatgttgggtttacaggtgtgagccactgtgcctggctctctgtgcacttctgattcacccatatcactttctctgcagaccagcctcctcatctttttggtctatgtggcaaagtggtcctactccaataatttgggagagatacagtgatgtagcttggatcagatgcccatcttgggtcagtcagccatggccaggagggtttgatcatgtaaagacatggttgctccttcaagaattatatggctggagttaggagaagagcatggaagggttatgccgagcacggagttccggagacatccacatacccatcctgccatcctaggcagttggctcttgctgggaatacaaaagaacccctctaaactgcagccaagtagtgggagacagatgtgcaaccaaataagtgtgatagagtgatattggttctatagtaatggaggtacatgttagataggaataaagaacaggcagtcagttaggttaagtcagacacaactagcatccgcgagtaatgatggctaacaggccttctacagatacatgagccagtcaaattgctaggtattctgggtctagagatagccttggcattttccaagcacaaatattgtgttctttttttattaggaggcctctttatcagagtgccttttaaaattatttgttgagttttatttacaaaggaagaatgaaggacaccttgacatatttttattttcaacaacttgtcatgttttagagaattcggatgatctaaattttagttcctttgatagctctctaaactgtttttaaaagacctcaaacaaaaccaatcaccactttattttatagctcatatgatctggccctatactgtttttgttaatcacagattcctggttgtaagttgaagacattatcttgttctttgttaagggatgtaggagcctttgccttagtctccattgttgctatagtggtgacctgcaacctagccagatgtgggctcatgtttagcttcctttagtgtgatctttttcaggcagtgcataccagtcctttttccatctcctagtacattgggtggactttctttgtcttcttccacaaatccccatcctttaagtatgggtgcctcaggctgagcacagcttgctccagtctcattattcttggccttgcccttcacatccatacttcaccagagattttcaacatctttcatgtcttctctgtaccctatgttgcttgccctaacattttcaaaaattagactttttattttcagatacttgtagttttgtgcagttataagaattaatatagaaagatttcctgtaccctttatcaagggtctcccagtggtaacatcatcttatggaactgttgcataatattacaaccagtgtattgacgttgatacagtcaagatatagaacagttaccctaatgtttggcatataggttccttctcattattttttcttactcatttttatactcttctctccttgctcttcttacttatatgttcattgacccagggattagttaactcgagggtcctacaggttttaccttctctttgataagttggctaaaccctaatgttgttagagtttctaacggtagtaactattcatcttgaaacgatttgcctggaaaaaatatcatttagatggctcaaattggccttaaaattcatgtgaagacccagccttctggagctctgcttgccttaatttcagacaggtcacatgaagatgaagagtgtggggggctggtatggtactagtcctttgagactcaagagccctaatcaaaagtaatttccccctaaaaggacagttctgcacagaggatgtggatgaatgcctgctgcagcccaatgcctgtcaaaatgggggcacctgtgccaaccgcaatggaggctatggctgtgtatgtgtcaacggctggagtggagatgactgcagtgagaacattgatgattgtgccttcgcctcctgtactccaggctccacctgcatcgaccgtgtggcctccttctcttgcatgtgcccagaggggaaggcaggtaggtagcagaaggacggatctagaaacggggaaggggcagggggcattcaggactctgccttctctttcatcccaaacagcatattctttgagttaccatctatgggaacatatcactcaggactgttccagaaatgtaacctgctagccaaagtgctatgaagataatcttcctctttaggactttaggctctcttctcaactctacatactttagtttttcattccaaaaaaggaaagttagtaactattgtctttggaacatctgctgaagtccttaagatcttagactgaaaagcacctcagctattaagataaaatggctaataaatggatccacaggcttcattttaagaagaaaccatctatttactcagaagaagttggcaggagagaaacatttaagtgccttctaaccctcaatgtctatgaaaatattcccctcagggaagatttttacatgctacaaagttaacattgctctagcctctcaatttaacaactactagttctaggagaaggagagcaatgtaaggaggaaggtgatgggagaagataatttagctgggagaactttctgcccagcagttttgaaatgttctttcatggaggcctttccaaaagctctagctccagctttgtggaagaagctttagttacctcttcttaagttaattgcagactggaaaatccagttcccatgtgaactatataaaacaggaagcctagtaatatcttcagagacctggggccacctgaatcaggaatgttgatgctattaaaagattactctagtagaggctgatggtgttcaggtggccccatgatcatcaggtagcataatattggggaagtaggattccggataaaatataggatgtatggaatatttgagacatactaaaaattacttcttgtttatctaaaattcaactggacatcctctattttatttgctaaatctggcacactatctggaagatagctccactttcctgtctccgtcttcttatcttctggcctgtagatgtctctgtcctggaggagaggtctagctgagagctcagggtcagagtctagggttgcatctaggtgctttgctggtggccaagcatgtccccaaggtagggtcaggcaaagcagaagttgcgtataaatctccatgttggattctgaggaactgatcatgaggttttccctcctgggtgaaagagaaagctcttccccaagtgagagacattttctcttagttgtcctttgccccaccctgtgacaggtctcctgtgtcatctggatgatgcatgcatcagcaatccttgccacaagggggcactgtgtgacaccaaccccctaaatgggcaatatatttgcacctgcccacaaggctacaaaggggctgactgcacagaagatgtggatgaatgtgccatgggtgagtaagcagaactttttctgttctgtgaagtgtctgttgagctcagcaaatgtttaaactgaagcacattttactgtagaagcaaattacatacacccaaacctcagattactcttgctacatggccagtgtttacaagtgacctttcagcatagccataaccatatattccattctggggattaactgtatgaaacgtatgtacttgattcttaatataaagccctacctcaatgacagtttgggcagaaactgcaatagcagaaatgcataacagttgaggatactccgcttttatttctttttaaattaaggaaaaaaaaatagaaaattgggaatgatattattgaaggcctggccctgatgctataaccatcagatgctcttctattgttcacatttgtggaaactcaactgctttgatcccagtaattggtacttgtgtctttcagccaatagcaatccttgtgagcatgcaggaaaatgtgtgaacacggatggcgccttccactgtgagtgtctgaagggttatgcaggacctcgttgtgagatggacatcaatgagtgccattcagacccctgccagaatgatgctacctgtctggataagattggaggcttcacatgtctgtgcatgccaggtaaatgggcccatcagcatgttgggtctagagaggagggactgttctgaacttctcttggtagagcattcagtatactattgcagtctgatgagctctgtcagcatttgatttcctttgctgactggggactagaggaagtcagggttcacaagcaaaccttccttactcaaagagtaaggcagtgctagaattcatcaagctatgtagaccaaattaaacaagcctgttatatcaaaatccacatgtaatagaaaatttcaaaaatgatttactgtaagaatcctttaaatagcaagttttcctgataccttcatgtaattacaaataccataccattccatttatataaataaattttatccacaattatataggaagtttccatttatctaaagtgcagtacatgtttagttgtattctggagctcttctgcatagaccatgtctttaattttgagaggatacagccaaatccagcttgaaatgatggctaacattggctgctctgcctgattaaggctgccggccactccagccttgaaaggcactgctgaccttgaactgcaccctgaaggcaacaacagctccagctcagcttgtctttaggaacatagagtggggacattttgggccttccacagtccagaaagtatggatttatcacagaaaatgtggagcagtccttgtttatatgctaggtcttgccaatgtcttttaatgtaatcccttcccgcttttcacagtgacatgggtatttcacagtatgccctgtcctgcttgacacttggagtgactatttctcatcatggcagagttccttttttctctgcagaaatgtgtgtactcgcaaaggatgtagttatcattgcaaatttgtgcttccttgtctggaatacacctttctctctctttaagccacttgtgtggtctgttttgtttaggtttcaaaggtgtgcattgtgaattagaaataaatgaatgtcagagcaacccttgtgtgaacaatgggcagtgtgtggataaagtcaatcgtttccagtgcctgtgtcctcctggtaagtgcccacgacctggccctgttttctcttaaagcacaaagccaactgaccacagggaagagagcagggagagaatgtgtgtgggctgtgcatgaggaaatcattagagtaagtgcttggtgataggagtgtgtgtgtacagaaatagagaatttgttttagctactatatcttacaagtcctttgtggccaaaagtccaagtctattcttgaatggcccatgacctcttcgtctgtgtatatatttcagaatgctcatacctcacagaagccttagttgtaggctattcgggattttatttttttcccatgggtcatattcttgaaggccctctgtgagactgttatttttagacatttcacccatgagttcagaaacagacaacacatgccaatttttccaagattctctgtctctccttttttttcctcaagctatttttgaagatatgccaaattgtcctccatagattgcatcttaccccattgtatcttcagagagaaggtttctgttgcctctgaagctacagttacttgtttgaggttccacctataaatttcacttcctacatccttcatttagaagtgaagtctgtctgtgaagaagcaatggtagagacacaccacaagtgcctctgattccctgagtgtcacctggttattccagttacctgttggggagaataataaagcataggcttattgacccattggtataagccctgctagtaacctaacatcattctcatggtaaagggagacacaagataatcctttgactcatgttaccactgtccctttttgaggtttcactgggccagtttgccagattgatattgatgactgttccagtactccgtgtctgaatggggcaaagtgtatcgatcacccgaatggctatgaatgccagtgtgccacaggtaagattcttctcacttttcatctccttggtaggtccatctgaacaaaatagggtgattgtccctgtcctctgctagctgctgtgccaggccagtccactcccagaggctcctctgtgtttaggaagagctgtttctaacaaattttttgctgctctctttttctgcagcacctgcctcctccaccacaacagtggtctggcccagatatttccatttggtatccatgtctttctgggacagattttggcagcagtaagtttccagctggctagattgactcatttaggaaagagaagaaatccagttgaaagctatttttcactggggcttctcagcaggaggcctggctctgtgtttcttgaagcaagtgactgaaagaaggcccagaaatttaaaggctgaatgtgtacaagtgcaggggtattctgcataaaagacaccaaaataggattgagagtcaagtgtgtaaatgacaggagagagagctctcactgggaaagtttgggtcctctttgctgacttctgcaactagagtcaaaaacgatctgtgcacaaatattctgcatttctgggtttgtaatcacattttgtacttgggattggatttcagtaagccagatgttccctattacacatttccttttacacaggcaaatattatacagaaaggctagaaattattagaagtgaacttctttattatctgactgcttgagaaagaagttatttatgtaattcaagacattaattttagagaatggagtcttaaagattaaaggcatcatgcatataatttatttctgatcacagaaaagcaaatttaattgtgaaaattaatacaaaaagttaatattttaattattagacctacttagtttaggacaactcagatgagccactttctttctttttgcaaatagttaatgcttgtcagagaatccagattttgtcttcccctggccagattcttcttgtagaggataagtttcaaagagattaaaaacctttagctcaggtttaaaagtggggggaggactcctggagtcttttagggaaagatataatgtttgtctatttacacctcgaagaaaggaaatcttacttgtctctttttcttttaaattctcataacaggttcattcattttattcaaccagtatttatttaaaactactatatatgcatactactctcagaggagttgagagaagtaaaataaagctctcttacctccaaagtcagaattggggacataagatacatgaaatcattaacctgtatattggacttgggaagaaagaaatacaaagataaatatataaaggaaaaatattttgagctgttatacctgaagcctagtaagaaatgaaggtgcagttaaagcatctctgcaatgaaattattgatcagttgcgaaggtatttcaattctaaaatttgatttggaaatctttattttaagcacctctctccaggcatactttctaaatcaatgcagatcgtcgttttctactgctcaagacctgcagtattaattgaccacacatcgaatgtgtagagtaaatggatgtagctacacttgtgttctggtgtggaatatctgccttggtctttgagaatccttgataaaattctttccaaaggtttcactggtgtgttgtgtgaggagaacattgacaactgtgaccccgatccttgccaccatggtcagtgtcaggatggtattgattcctacacctgcatctgcaatcccgggtacatgggcgccatctgcagtgaccagattgatgaatgttacagcagcccttgcctgaacgatggtcgctgcattgacctggtcaatggctaccagtgcaactgccagccaggcacgtcaggtaagcccactctgtttatgtttggtatggggttttcactgtttctcaaatctgtttacacagatgtttcagactgttggcatatgctcagatacctaaaaaacagtcctgattctgagaagcacagccaaagccacaaacataaatgtctcaaggcaaatggccctagccagtggagaagtcagagacaatagctctgcgaatctgatgattttgtgtgtgtgtttgtgtgtgttttgttaaatagaggcataccacttcaaaaattaaaattaatgatttaaaattgaaaaccctcttttttgtggctatattatctttttttctttaagttccaccccacccagattaataaattcagtccttccttccttccttccttccttccttccttccttcctacctaccttccttcttcccttcttcccttcctttaatgtattttctctttcacagttcagtctctttattgtgacatgtttcttcagtcacttgtctctggtggggccttagccatcttgggggattctaaggaagaggagataccttacaacacaccacagtaactaaagtagaacgcagagctgtcatttcctatcctcggagttcatcattgttctctgaccttggttgaatgactccttgttggtcgtgaggacatgctgctcctttctggggggatgtggaattattttctcaggcagcagcatctcacaggtttggatggttctgttttacttattagatgaatgattatggtcacaactatggttagtggacagagatgtactatgttccagatcaaaggaaaatgtattagtggaagattaaccaatgtgtgcctttgttagaaggaaacctgccaatataaaggagtgatttattgagaactcattctggatgtaaggaaaatgacctatgtagagagcagaggtggagagggtagttagctaccctcattttcttttactgtttccaaatccatttcttcaaatttgtcaaaggctctggtctttacccaaggcttcatacatgccaagtttgaaaacaaagtcctttttgaattgctcaagcatacgaaaaacatcccatgccgtcacagctgaaaatgcctttccctccccacatttagataactcactaaaagggctgaatagatctttgtgaaaacttccaaaagcaatttgcttccgggctgttcctcagacatgagaaattacagtaggaaaagaaatttgagagatttacaagcaattgactggatgtctttagaatcgaggggctttagactttgctatcattcccatcataataaacatactggaaacctgggtgagtggtgggttggcaagcactttgttttctctggcattatatcattataccaggatatatcaggtgttttctggggaggacagagagggtatggtataagtagctgtcactgagaaggtgagaagtcaatatgagtgatctgtaggcagcatggaaaggaaggcccggaatctgtcagaacctgccaaagatgttcctgcagttatttggagaattaaagcaagcaacggtcagacaacattaaaaaaatgttgatctgtaatgggtggagaaagacctggcatgtatcagggacctgggtggaaaatccattaaaagaggcattatgaatagagtctgaagttctagagtaagaattcctgttccacttatatggcctaagttggtagtttggtgtttggataggggagtggatggaagaaatattttacagtttgtcagctaaaattgtggtagtcactcactgggtacttaaagtgagatatactacccagagttaccttcagtgcgttctctcatctgtgcttttatgatagtaaagttttaagtaagtttctttgtgtttcaagtaacagaccaacttgagctagtttaagtcatcatttacaaaaaataaacaacaacaaaacaaagaaacagaaagagcttagcgaaagcacccagagcctcttatagattccaagcaattgaataataaggctttggagaaaagaataggaaactgggcatttgtagaccagaggtcacacagtctgtgtttcagtgttgtaatgagagaatctcattggcctggcttgatccaggcatcttttcctactcaaataaaccatggacagggggctggagtcacattggatcatcagggcttcattgggagggggtgctgccttcttagtttgagggtaaagcagggttgtcagtcaagggttagaaacatctcctaaaggtatccactcctctgcagggaatatggaaatctttccctcatttatggctaattaggcagtatagcctcattaatcatgggatgacagtacagtgtggtggaaagaggatgctgtggagccacacaaacagggttcagagcccagctttcctgccctaatggtggcactgtgcaggtcagccctgttgtctgtaaaatgggtgtaacacagactaatgtgcagggtgggtgacagggttagagaaaacttacatgacaggcaaagcagcgtactttgctcatagaactcaataaactgttcctctgtaattattattaataaacattattgcagagtatgggcacagtggctcatacctgtaatctcaacattttgggaggccgaggtgggacgattgcttgcgcctgggagtttgagaccagcctgggcaacatagcaaaacctcgtccctacaaaaaataaataaaaattagccaggtaaggtggtacacacctgtaatcgggaggctgaggtggggggatagcttgagtcagggatattgaggttgcagggagctgtgctcgtgtcattgctctccagtctgggtgacagatcaggaccctatctctgaaaaaaaagaaagaaaaacaaagtatgagtgaatcacaagtatggcattttatcctggatgttttgttttcttatattctcattaccagtttttatttttagtctttttaaactaccaaaatattattctgtgatactcagaaagcatcactaaattcatacaaaaataaaaagtaaatattgttaccattatttgtaaagagatatttgtgaaatatattacaaatatatttcacaaatatctctttacaaataatggtaacaataatgattgtatactgttaatataaccaaactcttccattcatctgggcagtagagcaaaaataaggcagcttacctcaggaggaagttactagactcaagatttatcctgaaatttagcctacaatactgacaggcagtgtcaagctcacagtgatagatacaaattccaaaatcctaattttgatttgaaagcttaagttttatctttggcaaaaatactgtcaatttgcttttcctcaaaatgacaggtttgctgctttcacttaatatttgctaaatactcaattctgattaaccctggtttgcctgtcagttgctctttcaattaaaatggggtttcatgaagaaagcagctatttcaactcacagctcaaacaatagcattatagctcttcctggagacaactctcatacttggcatgccacagaaatgctttatgtatacttccatttcatcacatggagtagtagacattactcaaggttcgagatttattaaaattataaagttactaattttaacttccaacaaagccactcttgagtgaaactggcgtttttgcttgtttaactgtggcatgtggaggtgagcagtagaataattatagtacagtctggttctactgccttgattcatgctgatgtgatcggtttcaccccattgcctctgcaccatcagtttgaatgttagcacagtgaaaaggaaagatcatggctaagtatgattaataaaatcctttggacctcctgtatcttcctgaacgagtctgtggactgcattttgagaacttctgctttattctgtccagggttggctggaattcaccttagatttcttaccacgttgctgcatcacaagcagaaagccttagtatttctgtggtaacattgaatggtttccgttgggttttctcttccaggggttaattgtgaaattaattttgatgactgtgcaagtaacccttgtatccatggaatctgtatggatggcattaatcgctacagttgtgtctgctcaccaggattcacaggtaaagctccttttactgcaaggcccctccttcagccctatcactttgggaatatagcatccaaaggaatattgcttttcaagtgtttcctatttctttgtcactctggagggttagtagtctgtttctctgcttctctagatcagttttctgttcacagaccttttctaaactgaaacatacttttcattaattagagtttttcgattatgtgtttatttgctgccagaaaataattcctagacagaccataaattgcctttgctttgcttgagttacattgcttccaaagctatgtttattgattacaggtagtagtcaaggccttccgtaaagacatattcaaggtaaaatcttatgaaaatactgaatgcttgcttctgggtacctcctctttgacatactcaaggtagaattctgtgaaaatactgaatgcttatttctgggtacttcgtcttctgaaatattgttggatgaggtcagagcttggggagaccaccctaatttgggtagcatgagagagatctttctgcccaggaggaagaaagtaaatggctagaagaattttgaatataacttctcttaaagtatgaacagcctaggcatttacacatacacacatgtgcgtgtacatgcacacgcacacacagacacacacacacacacacacacacacatcttctctctctttacttgtcaatattacctttatcttttaccctcctgatcaaaaagtgctagaggctactactgcagaaacctgaggcccctcactgacacacctgagtttcttcttggcatcatcagaaggcacacactgtacattctgttcttcctggacagtgacacacagaagcagccactaacatgttaccctttaataatttccatgtggttgtttgtactcgaatgtgagaaacacccttcagagtttttgatagagtctgcagaaagcagccagagcaaagtgaagtgaatgtccaccattcatttgccaagaatgtactttgttctctatttcacaagaatttctcctatttggtatgattgtggacattagaaaggaaagtttgcacccaaatgggtcacagtgatccctgttcagtgaaagatcactgagaagcaaaatctgatgaaaactgtcatacccaatgcccagtgctgctgtagtagcctgatgttctgcatcctgaaacttgttactccaagatcaagtggcagtcgagtgaatacacaaaaatccctgctagataggataataggtacattgttgataagtgggtaatacaaagagaataggtaacatttatgaagaactaattttgagctaggcactaaattgtcaattgtcaccgacgttgagaatacctacagaataagaaacccagaacacagagatgttaagtaatgttaccagtgcacagcagccagaattacatcccaggcaatctgacccctgagcccatgctcattcccactacactggacatcctgattaggggcctgttgtgtgtgtgtgtgtgtgtgtgtgtgtgtgtgtgtgtgtgtgtgtgtgtgtgtttatataaggcttctactggactcatttttttcagaatgccaatgaatcatattctttctctttttaatattcagcaaaccaggaaggccaagaagggagaacataggctaaaaatattctaaaataaacctaaggtgtagcatgaaaccttataagcaagaaatggaatgttttggttactaggtggtcccctgttcatggaactgttgcctatgtctgagatgatttttttaatcagctgctaaaaacattagagatgactgtggtatatactcatgagtggtaaatgtgaggagttttattcttgctcttgttttattttaatatatttttcccatatcattctaataatagctttgacagctttaaaggggatttttttgttttaatactaagttatctgttctcttagaacctttttaaatgggggaatgtaaggaattatgtgatacttctataaactgcttttcagttttacaaagcaccttcatgcccattatcttcctgaattctcataacaatccagaaaggaagttctactatacccgtttaacaaataaggcaactgagagacagaccttgatgtatatactcatggcctctgccagtgagttgcatagtgaggactgtgagttcccagaaggcagagacctcgtttaatcatctttatagcaagtgtctaaagcaatgtctggcacgtaggaaacgcttagtgaatgttgctgaatgaacgaatgaatgggactcaaatatagcgcttttgctagctaatgccagactctgaagtgtggactataccatgttttcatttattaaacaccaatttattgagtgcctaagtcagaagaaacactgggtaacttctcattttagttacctagcccaaaaaatttcttggccttccactggactttcctcatgctcagtggaaactccttgagggtaggaccttcctgatggaacagctgtcaatcaacatagtggactgcatttaatgctttcagataaagatggcttgaaaatttattctgcaaagaataaatttaaaagcaaataaagaaaacttgggaggagtggcttctgaggagacgcttccaagaaaagaccaaaaatgaagaaacctttttcctgttatccttcactatattacgggccgaggctaactgtgtggttgaagagctctggttcatattttggtgccactgacaaacagctcaaagaatcagtggttgaggccaaggaaatagtatttaaaaataagctattaataaaacacttaagaggaaaacagcagccacttccagattatgggtttttaccacaagaaccaccaatgatggtttagagagcaatggagggtgaaaaaatgtgaatactcatacttcataggagtgggtatctgtttcatttggaatgtcctattctaaatacaggattgctctttcttaaatgagaaaaatgcatgttttcaaaatcagaatcagaacattgtgttctttgaaatatataaattcatagcagttgcttgatgccactcatttatagaattataggtaattttaacatttcatatcattttggaatatatagttaaatctcagttactcaaaatgtaacaaatggaaacacttgtataactgacccgtattactttattcagcctaagaaatatcaaggttatagcagacatctttttaaagagcaatcttggctatgtcttggaggagcaacatattcacttcaatttcacttactcccagtatccacattgtatgatgatgataagtaataattgtctagaacagaatttctcaaaatctagtttttacaccacctacatttaaaaaaatatggtttgctagattctattcatcacaatctatggtgatagggcctaggaatctccacttaaaataacaacttaaagtgatgattttgcacattaaagtttaagaaccataggtctgcagtgacagactgcattattttctctaatatcagaagacaacaaaattatactttgagactctacttcctgaggtcaaaaaaaatggattaatagactctaagaatgaaaacaaaataacctttctttacaatcaatttaattattgaattaagttactagcccattcattaagcattccagttaatttggatttaccataaatagaaatgtaagaggctgagaaaatgaatttgtgctaaaccggcacaaagcatgttaatgaatgcttctttgagttgtactcagggcagcattaagaagagaagccttctttggtaacatttgacattctcttcttagaaccttgtgaagtttccccatttctgagttgaaagaaaatgccaaattgctataacagttttccagccttttgttaactttccttgattatcaaaagtcaatgctctttgctcctttgcatggcattaagtgttattgggtgtctaattccttacatcttgacatttggtgcctcaaggcaccttatggcctgagcagatgaaggatgtcaacataacgtgtcttatagttctgggtctatttcctaagcatttaggatgtgactaacactgtcccccttctccacagggcagagatgtaacattgacattgatgagtgtgcctccaatccctgtcgcaagggtgcaacatgtatcaacggtgtgaatggtttccgctgtatatgccccgagggaccccatcaccccagctgctactcacaggtgaacgaatgcctgagcaatccctgcatccatggaaactgtactggaggtctcagtgggtgagtagctgccccatgtgatagtttcttattgacctgtgttaagccagttggcttgtagtactggtgacagcctgaagttgtcaaatggggctttgagctgaaactttgctgaagatttggtagtctgcatcaaagccttctgaattaccatttaatccatggaagctggcccctcccttccataagtgaggacctagatggaacataaggaggaatgtctcccttatatgggtcattagcaaggacctcatgggaggaacccatactcattgtatgaatctttggcagttatgtttttagtatgtattactggaatgatttctgaagaatgttctagcttttgattttttttcccctgcttaaacatagctcagctctgttctgtcacagtgccagtgtgtgctctgaagtagggccgcttcagccaactttagaaatgtccctgataaaacatttgcaatttttaagccccacagacttgtgtgatgtgttagtgattttctagaatcatagagtgaccttaggtctcacgagacgctcttatactcttgctgcatttgccataggatatggctttggacattttcctttgccaaactttgaaagatgaaaggataaagagtgtttagtggcaaatagtaaataaagttatttaaaaattaattaactcagtattggtgtttcagagtatagcagccttcaaggcacccttatccatctctcattttcttaaaattctcccgataagaaagctatcatttcctgatatcacattctaagtgttagtgatgttcaaattggagattatatttacaattcaaataccttcattcctgtgccttttcctgcagaataccctaggtgctttctgaagccaagtgttaggtcaagacaaagcatgacttagatatgaaatatcccaggagcatcttagagtggctcagggtccctgacagtgacctaggtatctatttggcaccaaaaactaatgatcttaatgtttgctttactttagttttatgtataataacatacattgtgcagatttatccatgatattgtttccttcagagtggcccaatatattgtagaaaccattgtttacataagaaatttcattataatttcactaacttagtgagccaggaaagcaccaagaaggtttctttactggatacacctgatagggccacatggtacacaccatgtgcaaggtgatgcaaggatagttccatgaaagtagaaatgagatcagtttaccccatttcttcaccaagtcctgtatttcactctatgactcaatcatacgtttatacctcctatagtaaaaagttttgtcttctttcagatataagtgtctctgtgatgcaggctgggttggcatcaactgtgaagtggacaaaaatgaatgcctttcgaatccatgccagaatggaggaacttgtgacaatctggtgaatggatacaggtgtacttgcaagaagggctttaaaggtgaaaacaaaagtacatctttctgcgtctgctctttgtcttcttgttgttgcatactgcttgactcacttcttagtttccttttctctttttcattcattcgtgtaacaaacatattgagcaattagacttgtaaggcacttggggaataaaaacatgaatagatacaatttctaccttcagcctagcagagaggtgacctattgaaatagtaattttttttttttttgacacagagttttgctcttgttgcccaggctggagtgcaatggtgcgtgatcttggctcactgcaagctctacctcccgggttcaagccattctcctgcctcagcctccctagtagttgggattacaggcatatgccaccacacccggctaattttgtatttttagtagagacggggtttctccatgttggttaggctggtcatgaactcctgacctcaggtgatctgcccacctcggcctctcaaagtgctgggattacaggcgtgagccaccgcacccagcctgaaatggtaatatttaagatgagcagttaagactccagttttacagcattggccaagtgtctaattataagcttcctggtccaggtttgagtctatgatagttcaaatagatatatggaagtagaatgaaaatattatgcttactataattaagatagtagtaatatcaaggaagaatccacatgttcagaactctttcaacaaactttttaacacattgagatattcttagttatttagtcatctttggtctacaccggaggtcctcaaccctcaggctacagaccagtacctgtgtgtggcctgttaggaaccaggccacacagcaggaggtgagcagccagtgagggagcaaagcttcatctgtatttatagccactccccgtcactcacattaccgcctgagctctgtctctgtcagatcagtggtggccttagattctcataggactgcgaaccctattgtgaactccacatgtgaaggatgtagattgtgcgctccttataagaatctagtgcctgatgatctgtcactgtctcccatcacctccagatgggactgtctagtggcaggaaaacaagctcagggctcccaccaattctacattatagtaagttgtaaaactacttcattgtatattacagtgtaatattataataataaaagtaaagtgcacaataaatgggatgtgcttgaatcatcatcctaaaatcatccccccaaccccggatcatggaaaaattgtcttccacgaaaccaatccctggtgccaaaaatgctgagggactgctggcctacccaacaaatggatagtcatgggaattgtgtaaaatctgcttctgagttatcactgttgtatttctaccatcagttttctcttggaaactcacaaaagagagccgtgtgggtaaatcattatatttgcactcatctgtctatttattcattgatttcctcactcaaatattgtgctatgctattgtgatacatcagcatgttttagagccactttatttgattacttgaaacatttctgagactgtatttcagccattaattttctgatatattgtattacattggcaaagaaacttgtagatttcaaaacacttttatttctttatcttctgagacttgcttatcagtgaacaaaataaaattcaaaaggtaaaatcccaaattatatgcccagtgggcagcagaatactccttgaacccatacctctgcattcctagaccatgttttcttttccacagtgccatagtttctctactttaaggctctgtgccaggccctattggagatgcaaaggtgtgcagtatttgggtactgtgctatctccactaattttttattccttttatccttttcttagtgggagaaggtttcatgccttgaatcaggagaaaacagctttgtaacttcaggaagtaccacatgggtggtagacatggtgcctatgaaaaaatgggcataaaccagaggctttgattaatgtattcaaaaacatcatcccttttcctgaccagaaatgttatatacaaagagcttatgtttatcatgcaacaagctattggctgggtgcgatggctcacacctgtaatcccagcattttgggagggtgaggtgggaggatcacttggccacagaaattggagaccagcctaggcaacataacgagacctcatctctacaagaaatttaaaaaatcaagtgggcatgatggcatgcacctgtggttctagctactcaggaggctgaggtgggaggattgctgagcccgagaggtcgaggctgcagtgagccatgattacacaactgcactccagcctgaatgacaagagtgagaccccctgtctcaaaaataaataaataataaatagatcctgcaacaagcttttgaaccaagaacttcattattgagaagttatttgtagttggaggggcattaggctttcagatcattagaatagactgtttttccattcatcttttcaactaattgctgtcatttactgactgtatttcagggacatggggctgaaatgaatgaacaggtatttcagtggcctgaagaaatgaatgcaatttctgatgtgttcagtttttacccctaaagagaattggttagaaattgatgaggctgtcagaaagttttactgtttttggttttttccttttgtctacaggctataactgccaggtgaatattgatgaatgtgcctcaaatccatgcctgaaccaaggaacctgctttgatgacataagtggctacacttgccactgtgtgctgccatacacaggtgggtcctggaggtaccagcagggaccagaggggatacttgaccttgctttgtcagtgcctgagtctcagtgcccaggtctgtggggctgtaatgctcctccgagggctcactcctcagttgtccttcctgcctttactgactggatcttgagctttgaggaaacattgtggcctcctaagatgcaagtggtggacagtcatttgcctacattgtactttagtatttgaaagaaatttttttttaattgtatgtggctggaaccaggcacatagatgatggttgtctatcatttgaatgtttccaggacattagctatttgtcttagtttcaataatacagctaccacttattggtaatttactatgtgccagacactttttgtactttggattatttaatgtattcctcaataattctacaatgtagaagttcctattgccattttacacatgaggaggctgaggcaaagggagcttgcttgctcaaggtcatataggtaagtagtacatctaggatttacctgtaggtctctttgaatctgaagcttttcctcttaatggcctttttacttcccacattcagtaccgctacatctcactcagaggtgtcaccccttcgatggctgttacaactgagaagacgtgagtgtgactgcatgtcacatagctgttctttgtttcagttgttatgtttggagtgtgcttgggacatttattctttgttttctactggcttattatcgccttcttgtgattggttatatttctatggcttgtttatctcctcttcatctatttttctcattcagagggaacaaaacacaaacatagacaataactttgcctgtttcatcaggttgcggcatgcagtcaggagcatggctgagttattacttccctggagtcttgagctgttaatagcagctgttaatagtgactctaagttgtgtagagtagcagaatagccatagcatgactgtgttacctgaaagacttgatagcacattgttactttttcccctctagaagaaatagtaggccaggcacggtggctcaccctgtaatcccagcactttgggaggccgaggcaggcggatcacgaggtcaggagatcacagccatcctggctaacatggtgaaaccccgtctctactaaaaatataaaaaattagccgggcgtcgtggtgggtgcctgtagtcccagctactcgggaggcggaggcaggagaatggcatgaacctgggaggtggaggttgcagtgagccgagatcgcatcactgcactccagcctgagagtcagagtgagactccgtctcaaaaaaaaaaaaaaaaaaaaagaaatagtagtgtagggaaactacatttaacaggcctagttcataaaatcacagttgtaggaggtccctaactatcttgcccaaggttacacagttaacaatatcagagccaatgctggaaagatcatgggcttctccattttcaaagcctcttaatcaggacttttgacttgaattcagagaacatccttgggataaggaaaattttcgttttcttacctgtttatctgtcataaactctgtcatttactttctaggcaagaattgtcagacagtattggctccctgttccccaaacccttgtgagaatgctgctgtttgcaaagagtcaccaaattttgagagttatacttgcttgtgtgctcctggctggcaaggtaagaacatgggtgtggagaagccaagaacatgcattctgactttaaacaaagtggtcaggttatcagatcatatggaaggccctgctggtcttatgaggcctgtccatcttgtcaagagcacacaggttttgcaaaggagctgctacttgaaatggcttagaaagcctttccattgtccttgtcttcggggccccctagcggctggaaggctgcaacctaagcctcacaagccatgatgttcattcttcagggagtttaagcaccttggcagcaacttcctaggccacagaagtcttcctggaacttcctaaagcagggggccaaccagtttgtctgtggaatagctccatgcaccccaactaagctcaggtcctgcgtagatttttgtgggaatcagcttccaaggactaggtcatttattggccctgtgttcctaggtcagcggtgtaccattgacattgacgagtgtatctccaagccctgcatgaaccatggtctctgccataacacccagggcagctacatgtgtgaatgtccaccaggcttcagtggtatggactgtgaggaggacattgatgactgccttgccagtgagtatgccagtcagctcttaagcccccagaggagaggaaaacacacagggagcagaggagagcccagtggaggctgccgcctttcacgcctgacattgggcataccggtcatttatccagcatatttaacagtagtgttttaactctttcttttgaagctagtgtccttgggaattgaggcagtggaatatattttaagcattccctttaatttgtgaacattgaaaatgtgaggacaatgctatgatagtgttttttaaaaaacagatttattgaggtataattaaggtacattaaactgcaaatattttcagtgtacaatttggcacattttgacatatagtaagtgaaactatcacccaaaataataaacatatttgtcaccctaaaactatcttcatcccattgcaatttaaccttctctctttcttgcctgtggagtcacagttttaccttctgtcactatagattattagttggcagattttatcattttatataaatgcagttagataagcataagtcaggagaggttctgacttgttttaatgaacatagtatttgagatccgtccatgttgtttatatcaatagtacattctagtttattgttctgcagtattccattgtatggacatattacagttcattggttgatggccatttgggtgttttccaatttggggatattacaaatgaagttgctatgaatgagtctttgtgtggacatatggttttagttctcttgagtaaatacctaggagtagaatcggtgaatcatgtcgtaagtgtatgtttcactttttaagaaattgccagaatgttttccaaggtggttgtactattttcattctcaccagaattgtatgaaagttctgtttgaaccatatgctcacaaactcttggtgatatcatttaaatttagctcttctagtgggtgtagagtggtatttcattgtgattttaatttgtattattctctctgccaatgatgttaagcatcatttcgtgtgctttgcccatctgcctatcttcgttggtgaaatgtctatttaaattttttgcccatttgaaataattaggttgtcttcttgagttgaaagagttctttgtatttttaaataagaattctttgacaggtatttgcttcccaatgatttccctccaatttatagcttctcttttgattttcttttgaagaggaaaatgttaacattgatgaaattcagtgtatgcatgtttttcctttatagttcatgcttcatgtatcttgtttaacaaatcttcacctaatccaaatttgaggtttatctactgtggtttcttctaaaagttgtgtaattttagctcttacattttggcctatgatttgttttgagttaatttttacatattgtgtgacttaaaagtcaagtttaattttgttttcttactgtactaaactaacttcttattagttgtaggttcgtaggttagcctctagatagtttagattcttaggattttctacagatacaatcatcctgtctataaataacccttatgccttttaatttcttttcaaccctgtatgccttttatttattttagtattattgtactaagatcttcaataaatacagaatagaagtggtgagagaagccttaccttgtttttgatcctaggggaaaagtatgtagtcttttaccattaagtgagatgttacctataggttttcataaaggccctttatcaaattgagagaccttgtacttctggtttttaagaggtctttttgtatttttataatgaatgaatgttgattttttggtgtgcaattgatttctctacatctgttgacatggtgatattattttttggtcttttaatgtaagtaaattgtcatcaactttatttaacattttgcaaatgttaaaagctaatcttaaatttatgggctatattccacttggtcattatgtgttattccttttatgaattattggatttgatttgccaaaatgttgttaaggatttctatatctgtgttcatgaaggatattgttctccaggtttcttggactaccattgtctggttgtgataagagggcaatgctgtcctcatagaacatatcaggaagtgtttttctttctactttctgggagagtttgtgtagaactggtgtgttttcttccaaatatatagacatggaaccttctttctgggaaagtttttaactacaagtttggttttcctaatacatataagtgccatatgggctatctgtttttaattgagctttggtaatatctgtctttcaaagaattagtccaattcacctgttttgtcaaatttgttgacataacatcaatttgttttataacatttccttactgtgctttaatagtctattagatctgtgatggtttccttctcttgtttctactattggtaatttgtctcttctttctttgaaagggaagaatgtctgttttgcagatttttttcatacagtgttctataaatgttattaattcaaattggatagggtagtgttattcaggtcttttatgtcctctatgactttctgtctacttattattcatagaatataataaggaggctttctgtttacttcttattcaagagtattgaaatcttttactatcattgtatattcatctgtttctctagtaattctatttgttttggcttaatgaattttgaaactctaatcttaagtgcataaacatttagggttcttatgtccttttgaggaattgacccatttatcattttgaaatggcctttttaaactcttgtcatatttctctctctgaagtctactttgcctgatactgatatagctactctagctttattttattattagagtgtgtttttaaaaatccttttacttctggcctgtttctctaaaatgggtttcttgtagagagcgtatattgggtcttgtctttttttctccagtatgatggtgtctatcttttaattcaggtatttagactgtttaaatttaatgtagtttttatatggctggcttcaaaatatgccatcttgctgtttgctttatctttgttcttctgtgtattgtttccattttcctttttctgacatcttttgaaataattgagtatttttatgattacattttatctacatacataaatttcaaaactttatctatattcactaccatattggttacatattttttagtagttattgtagggtttactggtgtgcagctttaacttattataatgtaccttcaatcgtaccacttcatatagaggagaagagctgtacactcacatttacattcctcctggcctctcttctattgttgttataaaatgtatatagcattaaacccatcaaatatgtaattaaaaggtcaatttttttcaagatatttgaaaaataatttaaaagtctttaagttacctacgtattttcaagtcttattggtctttattcttttatgtagatttgtgtttccatcaggtatcattttccttctgtctgaaaaaatcccttgaatattttgtgtagtctttgtctcctggtgatgaagtctttctgtttttgtgtgtcagaaaggtttttattttgctttagttttcaaagatattttcacagggaggagaattctaaattgactttctctttcagcactttaaagctatcctattatcttcttccttgcattatttctgaggagaaatctgctgttattccacaattcttttatctgttccttcatatataattctctctcctgtggctgcttttaagatatcctctttccactgatttttaccaacttgattataatgcctgttggtgtggtggtcttttttttttttttttttttttagactgagtctcgctctgtcgcccaggctggagtgcagtggcgtgaacttggctcaatgcaagctccgcctcctgggtttgcgccattcttctgcctcagcctgccaagtagctgggactacaggtgcccgccaccacgcccggctgattttttgtatttttagtagagatggggtttcaccgtgttagccagggtggtcttgatctcctgatcttgttatccgtccacctggacctcccaaagtgctgggattacagcgtgagccaccatgcctagcctggtgtagtgttctttatgtttcttctgtttggagtttactgatatttttggttatgggtccaagtctggaaaatattttaaccattatttggtaaatatttagccattatttttttcaaaagtttttgcgtctcccttttataatgttcattatgcatttattaggctgcaaggttgatttatttatttttcagtgttttttccacttagtgttttattttggattattttactatttgaagttattttgttatactttcaagtttactaattgtttcctctatagtttctcgtttactgttcatctcatttagtatatttttccctcagatattatgtttttatatgtggaagtttaattcaagtctttcttttaacgttacctccctctttgtcatgttcatgcttttatttccttcttgaatatattgagtatcgttgttttctagttgataataattgaccatattttattgtccttacctacttttctaccatatgagaaattcctgagtatgtttctgttcatattttttctactcattttgaatgtatttcctgcttctttgcctgcctggtaactttttactggatgctagacatccatcttacattgttccatgctgaatttttttaaaaatcttttttaaaaaaacatttttgagctttgttcaaatattcaattatttggacatagttcaatccttcagagtcttacttcaaggtttgttaattggttccaaaatagtctttagttgagggctaatatggctcactactacaacaggggtccctcaggactctacttactgccacgtggtttttttcattcttattgaataaacatgagctgttctcagcccagtgaaacctctagggattattctgcctacttctttctggtggttcttcccccagccttaatagttttattacatgtatgtactgaccgatccttagttacttgtatagtgatttaacttcaaatgagattatcacaatgcattaataatggcaccttaatttacaggatatataacttcagattatcatatagaggccaccatgctaggtgccggcagtgataagataaataagttttagtttctattttcatgaagctcatagtctgttagggaagaaagacatatagacacagttcaagaccagcctggccacatggtgaaacctggtctgtactaaaaatacaaaaattagccaggcgtggtggcaggcacctgtaattccagctactcgggaggctgatgcacgagaatctcttgaacccgggaggcggaggttgcagtgagccaagattgtgccactgcactccagccggggcaacagagtgagacttcaccaaaaaaaaaaaaaaaaaaagacatatggacaaataattttaatgatgtattacaaatagtgaaaaagtatccaaggcacaattgatggagaactttagggagtgagatcaagctgtttgtattcctttctcacattaagtaacatgtcattcaaaatattgagtatttttaaatttttctgtatgaagtgggaccaacaatatttacaatgagtttaaaataattcagtaaattatggatggtgagtttcctgaaagatgctatggaaattatagtagctgtgtactgtggttaagaaaaactgaaacaatttttacaattgctttaatagagattgcagatgagtcttataagggaattagttcaagagatgaataaagtatattaaatgtttcgctaataaaataaaggtcacattaccctttagtttagtatttagttttcattttacatgtatgacctgtctttgcaattatatttttaagttccttaagagccatagctacagcttatttttcttgttctgatttgtatggcatataattgtagagtgccgtggcatgactgtagcttaaaatttgttggttccttactatgagtataaagtgttccaagatcaagctatgtgatatttcaatttttatttaaactgtgtttcataaggctactgaaatctaaaagagagagaaaaagagagagagaggagatggaaatgaaagggagagagaagattatataattaatatgcctggaaaaacatgaatatgtgtattttgtcctcccccacacactccacaatcacatataccttttgaaaatattgattgatattctgtgtattggggcacatatttgatttccaaatgtgtgagggaccaatgcaagttttatgactattaattttacaaaactgttggtggtgacatagatgaagtttattccaattaataaacaggttaaaaacttcaagcaagtattattgaattcattttcataaatgagggagttggcaaaattgaatgaaaaagtcagaattatgctgcccccagcatgacttagttcaggtcattcacttttatgaatctaagattaaactgatgctactcttcagaggtctaattcttttgtaatggcttagatccttgccagaatggaggttcctgtatggatggagtgaatactttctcctgcctctgccttccgggtttcactggggataagtgccagacagacatgaatgagtgtctgagtgaaccctgtaagaatggagggacctgctctgactacgtcaacagttacacttgcaagtgccaggcaggatttgatggagtccattgtgagaacaacatcaatgagtgcactgagaggtgagcaaccagtccctcgggcatcagcatcttacgagagaaagggagaaagggaaggaaatttcagagcacaatgctagaattgtggagcagggatgaggtgtccacatggatcccagtccacagtcatctcctattgcccggttactggttcctgataaacatatataatagaaagttaaaggtcagaggttgcaaagtttatagggatggtttattatttcttgcttagggaacagaaagagctataattttgttctgttcttcccttggcctctcattcatttcaaaaatccaaaaattccagtttttctgcagagattggaattgttactagtctttaagtaatttctgggagttttgtttcatttctttttataatattatgagcatgtttgttctatttgtcttttataaataatctatagtgaataggacttttcaaataaattaaattgacttagagataaaatgaaatgtgatacatgggaaaactacagaaggactgggtaaaacctagaaaacttcattttctgtaggtatctatagtaagctcagtcttttaaatacttctaagcctttgattatagaaaggaagtgggcacctcagagcttctggcacccaatctagcttgtaagaaagtttaagggatatgggttgctcagaggtatttgcctctgtatgatcttagattccagaaatcttactttgtagtagtaagtcacaggcaccagatacatagctgatgttgctctgtttgcttcttagctcctgtttcaatggtggcacatgtgttgatgggattaactccttctcttgcttgtgccctgtgggtttcactggatccttctgcctccatgagatcaatgaatgcagctctcatccatgcctgaatgagggaacgtgtgttgatggcctgggtacctaccgctgcagctgccccctgggctacactgggaaaaactgtcaggtaattgacttccttcccattcactcagctcccctagagcagctgaatattatacctgttcactttctagtctgaataagttccttctaaaagagaaaattgtggatctcagggattccctgagataatctaggtaacttcttaataacttgcagattccaaaatggtgctggcaatatgatatagattcacaaacataagatcttgaaaagaggctaaccaagaactgcagaaaaatacatgtgggaaataaacacagatttttgttttgtgttttttgtttttttgttttttacattggaagcacaaaaagaactgaagaaaatagagaataatcaaaataaccttttaaaggtcagatgcaacatctaagtgtttaataatgataattgttgtatcttgcaatgtggtaacattctcaaaaccaaacaatttacatatcttttaagttcaaatatgtaaatacacacttccattaaattttagaatggaaagagcccttataggcaactaatctaaccttcgatttcatggaaggcgaaacagccccagaggggcaaagtaacttttccaaagttgcataccaaacagccctgtgtttaatttaatgttattctacctctttaatagtgatagaataataactccaaagaacataggaataaatggccaaacttaacttgacttacagggcgcacttaagtaaggcttaggctatattagacatgtgagcacccacctccacaaaattaagcagcttgttgctgattccatggatcacgagagcatttttggttgggctcctatttgttctcacagtgtagattggcagtgctggtgaagcactcctcccttcctccagcaaactgtctatattgtgaatttggccttcctctcctcaaggggccaagccactccgtgtgtgaattaagatgaaaggtgccagtccttgtgcactctttgcttcagatttttcataagtctgattgccttccttagaaataagctcttaaacggttttaggcttattaacaggcattaagtccttttacccatattcaccaaagatagatttggtcaagacccatgtggatttctcacacaggattagcacagaaagtatgaacctgtctgacagctttaactctttctttctagcattacagggtggctatacatgtaggcaaatcatgtctagagcattgggaatagcttaacctgttgggtttccctgaatttttaaacttttttggtaagaactttttaaatagaagacctaagaggaattagactacagcaggccctcaagtaactttgtttccttcggtgtcattttgttacaacattgagtgggggaaaaatctgtttttggccagagctgctatctgtgtggggtttgcatgttctccccatgtctgtgtgggttttctccagggactccagtttctttccacaactcaaagtcatgtatgttgggtgaagtggacatgtctacattgtcccattgtgccagaataggctctggccactcatgaacctgaactggagtaagtgagttagaaaataaatgaatggggccgggcacggtggctcacacctgtaatcccagcactttgggaggccgaggcaggtggatcacgaggtcaggagatcgagaccgtcctggctaacacggtgaaaccccgcctctactaaaaatacaaaaaattagccgggtgtggtagcgggtgcctgtagtcccagctactcgggaggctgaggcaggagaatggcgtgaacctgggaagcagagcttgcagttagcggagatagcgccactgcactccagcctgggcaacagagtgagactccgtctcaaaaaaaaaaaagaatgaatataccaattattataaaatgaaaacccataaagcctatgataatcatatgagtgcacaacaataaacaatgtggtacaaaaccacccagcaagcctgccatattggttagtgttgctttctgagctgtgtggtggtaagaggtgctgacggttttgctttgcaaacatttattccttgacttgacctgccaccactaggactgctattactcatggattcaccaaaaattggataaataattatcttgtttttattaatatttcttaaatgaatgtatagcttgtttattttaatgtttaatatcagaagtgggtgttaatttgaagtttagtgattttttttttaaccagaaataagtagaggaacttaactcttttttatatcaattagactgtggtaaaattggtttcgttatatatcgttgtccttaaagtcacagtttccaagaacctaatgatgacattaagtgaagacttaacggtacgtaaaaatggttaggtgtacctcggaacactgaatctagtttaagggctcttttactagatgaaggctctttttctttttaatcagtttgcttttctttgatttcttgtaacacaatataacttcttttcttcatttctagtatttgaattttgatgtatgtacacccctgcctctgtttcagaccctggtgaatctctgcagtcggtctccatgtaaaaacaaaggtacttgcgttcagaaaaaagcagagtcccagtgcctatgtccatctggatgggctggtgcctattgtgacgtgcccaatgtctcttgtgacatagcagcctccaggagaggtaagctttgctcccttgggctcaggtcattcactgcagtattgactgtccagtggcatttagagaaggtatcatttttttgtgggataagagggaagggcagatagtagtgggtgggcagggctctggggaaagggctcaagacagaaggtgtaagggtagaggaataggttcagagattcggagaagaatgtatttgaaatgaaactaaggtatattccactttcagggtttatttttaatatgcatctggtactgagggttgtgaagaactggctaagaataagattggatgtgtcagccagtttagatttacttgctcattggttgatttgaaccccatgtgtcacatgttcttctatgacatttctccctcactgggtttcccaggtgtgcttgttgaacacttgtgccagcactcaggtgtctgcatcaatgctggcaacacgcattactgtcagtgccccctgggctatactgggagctactgtgaggagcaactcgatgagtgtgcgtccaacccctgccagcacggggcaacatgcagtgacttcattggtggatacagatgcgaggtgaggacactgagcaagcagaggtcatggacctcccaggagattgtacaactgtttgagcactgatatattgaatttagctgcttgtatcttatattgatagtttatagatttttaccaatccccgtcataatgtttaccactgtttctttcagcctctctgtgcaataagttaacaggtccctagtatgatatttttataggcgtctggaaccatcccagctccttaggcttgcttttaggattcagagccaagagtcactaccagagtgcattttacaggcccacccaacatagcagtccacacttccctgaatagcagctgagataggaaaaactgctttgtggagtgtccctttggcccctgtcacctttgtatttagtcattaatcagtcaactagcaattttctctcaaaaaaaaaaaatgttgctcatcctgttccccatagcatcatgctaaacgttacatgtatatatttgaggaagtatgtgtcttcaaggtacatgtcactattttaatgtctgggctgataatggttagagcaagcaagatattagcaaaatgcctgagacattaatttgataccaattcaaaccatcaagcaacactgagaaaagctttgcttctctattgttatataaatgagccaacgatagcttctgtattttggcccctaggttgtttatttcttcacagcaggctggggctgggtctcattagctcaaaagcctaccagtgccaaacccaaattttgacacatctagttgttttaaacatagcccccaaataagcagatttttagctatttagagcttgcctgctttgcatagcctgtaaaactgcagccaaaatctgctagccatagtataagtaggacaagatataccctggggccatacagaccccaggctgatgctggcctttagagctctctgacccagagattcctgccactggctgttgagtgacatcacctagactccttctctgatccttctttcccagagtttacttgctgtcttccccttactcacctacccctctggaaggtctcatgctatttgggacttctcccaggtgcaaacctgtcaaagtgtccaaataaagccacctcacagccatatcttttttcttggtcagccctgaaatccttccaacccctacagccaccacagccagccagccagccccacctccctctacccctaagcctatctcaaccagtttctcacacatagatccaatttcctaaacctggagatcaataattgcatgtctgtactaccatccacatatgccttttgaccgagtcatagggtcctcatcacatacggaggaatgtgtattttaaagatgaggaaacctgtacccaggaggaacaaaaggtttgcacacaagtcaaatctgaaacatccttcattgtattcagtccttgccttccctttaaagtgcctttttcaactgaaagaggagtaggtaaatgccagtaagctgcaggttttctgtccctgcatagaatgattagcagagagtgtgatggttccagagaaaacatacaaaagctaaattaggaggtgggagacagtcacagaaatgttccagatctcactagctctcgtggtctgtttccagtaatggtccaatatttcttgtcctttttgtttcctcatggcagtgtgtcccaggctatcagggtgtcaactgtgagtatgaagtggatgagtgccagaatcagccctgccagaatggaggcacctgtattgaccttgtgaaccatttcaagtgctcttgcccaccaggcactcggggtatgaaatcatccttatccattttccatccagggcattgtcttaagttataaatccattcttagtgttcaggggattttataaaattaaagataggaagactagcttcattccaagcatttagttctacatcctagtaattcaagccattttattctcccatctcttgctagctctgatgttgtggtttatgttgtcagttttatctggttgtttggcatcttgatattccatgaaacacagaatatggaagggatacaacattagcataacattaaaaaattagcctggtcagtaagatttcttgttgcttcacagaaaagcaactaatggcctctaaaataaacaatttacatttacctgcttttgtatttttttaattagccaagtcttacctctataaggtgggggaatgaatgaaatgaaaatatctgcctattttcatagcttcaggggaggatactgatggtgtaaggttctaccttaggatgcagtaaggcctgatgagagatgcaaccctggactgttgagtgatggggccatcattcttctgtgggcattgccactgcttttgaactgagtggtatggccatcattctgctgtggacattgacactgcttttgaaccatcccttggaaagagctttgagtattgtttgttagaagggatgtagttatgctggggcctactctgagaaggctgtgaaaaaaatgtaaaaggccatccacactggtgagaaattcatccttgttagtgtcaaagagaatagaatgccagagaagtatttgtattgccttagagctttgtgtcagtaaagtttgataatttgccaccccaggtatcagagtttgactaaattaaaataggagagtaccctagtagtaggctgattattaaggaatgaggttaatgggaagaagaaaactaaggagaaacagtctttaagtatttgaagaattgtcctgtaaaaaggagaattgttctttattctagaaatcagtggttgagtagaaattaattccagttcattgttagtttgttcctttgagaaactgtactggttaggacaagctacgattctggtgatagctgttatcgtagttcatttatgttgctataaaagaatacctgagactaagtaatttatttttcgaaagaggtatatttggctcgcagttctataggctgtacaggaagcacggtgccagcatctgcctctggtgtgagcgtcaggctgtttccactcatggtgaaaagtgaagaagatccagggacccaaacacctcccattaggccccacctccaacattggagatcacattttaacatgtggtttggtgcagtcaaacttcaagctatagcagctaattaaacctcaaatctcagagcttaatataacactgattttgtcactcaaataaagtcgaatatgtgttgggctacctttctctgtgttttagatatgtggtttgaaacacctggcctccaaggcctccacagtacagggaagagggacagacttgaagggtcatacagcagcttccactagctcagtctggaagcaacacatatcactatccctcgcagtatattgaccggaattattaaatggtctctgtgacttcaagggaggctgggaaatataggagagtacatgagtattcatcaaactctaaaatcactactataccatgaacttttaattaataagacatgtccagtcctagaatggatcatttcagaaggaaacaaaatttttgtctcttctaaccatatggtaaagatggcttagaatactagttttgatattatcattgacagtctttttctttcagcactttgaatatatcatcccactgctttctgatatccatggtttttaatgagaaatatgctgttaatcttattgaggttcccttatatgtgatacattgcttctttcttgatgccttcaagattctttatcttttgatagtttgattatgatgtatgtaggtatgaatttctttgagtttatcctacttacagttccttggattattttactgtgtgtgcttgtttaggtatgtggaacagtatttttttatcctgacttaacttctctggccattggtaaacattccaggaaactctcaagtcccataaccccattgttagagtcatcacaatgtgtgttttggtcaccatatttctaagccttagatctttgcctgcatgtcccaccagtttcccaggtcaagggctaaatgtaacagttctgcctcttcctactactttgcttcaggctgaggttgagttctctctcagttgatagatctgtttatttctggtggttccattctgatggggaaatatgcatttatgctcattttactagcaatccctaaatatcaaatattctttgagacagggagcatatactagattttgtttgtttttacttttttgttttcaatttactctatgtataaggtgatatatgcatatatgcatatagaccaaaagtgtattcacacatagaaaagtatacagtgaaaatacttctcattcccatctctcttctggtgggcaaattttccctctcctgcaaacatgtaatcgccacttttggttgtttgtgtttctttctagaatttttcaaaaactgtatccttcagaatttctttatgtagagagaagccaaatgcaaagatattttatttcctttactttttactctgaagatagaatattagacacattttttgcacttgatttttttttacttaattggagatattttcatatcaaaatatagaacttcctctctctctctctgagatagatagatagatagatagatagatagatagatagatagatatttgtttgtttgtttgttttgagatggagttttgctcttgttgcccaggctggagtgcaatggtatgatctcagctcaccgcaacctccgcctcctgggttcgagtgattttcctgcctcagcgccctgagtagctgggattacaggcatgtgccaccatgcctggctgattttgtatttttaatagagacagggtttctccatgttggtcaggctggtcttgaactcctggcctcaagcaatccacccgcctcagcctcccaaagtgctgggatgacaggcgtgagccaccacacccagcctgaacttcctcaatattttttatagctacagaattcccttttacaggcataccatattttaaccagtgccatcatgatagatatttcagttatcttgcaggcatataagtatattggtgaaataaattttcagaaatagaatcgctggattggataatatgtgcatttatcattttaatcagtgattgcagtatatcagcatattggctttttcttaaggtggagaatatattttcatttaagaatcattttcttttgattttttttgcagtttctttgtttatatatatatatatgtatatatacatatatatatatatacacacatatatcttttttcccacattaagttgttgatgtaatgttttgtggaaattggctatgatataaaaaaacaaatatattcccagtatttttttatattttttctttatagtgatttttagtgcacacttttactttttaatcaagttgaatttatcacttttaaaatggcttctggattttgagttgtagttagcaacatcatatacacttgaagatcgtaaagaaattctcccatattttcttcaagtacttttgccatatgactactcatttgttaatacacaatttattgaatattttgttttttatatatataatgatttgagatggcacctttgccagattctaaattcccatgtgtatttttggtgttcttctggattttctttattttctgtgttattctattaattcaccaataacgttctatttcaattattaaggatcttcttcttcatagttttcctggttattttttttcacataattttataatcagcttgtctgttaataaattcctgttgataatttttagtggggtctcattaaatttatgaattatagtatagagaaaactgataactttatgatgaggagtcttgctaaccaaatcctggtatgtctttccatttattcaagtctcttttgtgtctgttaggacagtattaaagttgtcttcatttaggtgtaacacatttcttgtgaagattgttcctaggtattttatctttggtaatttggtaattgcttttgaaaattgggccttactttacatttaaaaaaaaaaatcttgcttttgttagtgtatgctacaatgcaagtggcaggaatacatacagaactgttttcttttgtaccttttttttttttttttttaagacagagtcttgctctgttgcccaggctggagtgcagtagcgcaatctcggcttactgcaagctccacctcccaggttcatgccattctcctgcctcagcctcccgagtagctgggactacaagcgcccgccaccatgcctggctaattttttttttgtattttttagtggagacggggtttcaccatgttagccaggatggtctcgatctcctgacctcgtgatccacctgccttggcctcccagagtgctgggattacaggcttgagccactgcacccagcctgtacctttttttttaattatgattattattattttttgagacagagtcttgctctgttgcccaggctggagtgcagtggcataacctcggctcactgcaagcttcatctcccggtttcaagtgattctcctgcctcagcctcccaagtagctgagattacagacatgtaccaccacacgcagctaatttttgtatatttagtagagatggggtttcactgtgttgggcagattggtcttgaactcctgacctcaagtgatccgcctgccttagcctcccaaagtgctgggattacaggtgtgagccactgtgcccagcctcttttgtgcctttttgaattaatcatagaataatttctagaatagtcattgatttcttttgtttctttgtaagacactatatgcagatattcatactagatggctcatttacatctatagtacaataaattagtcctgttttaaatggaataacttttgaactctcagcaggaaatttatcctctatttttgttaaataaaaagcattggtgcacttatacactattacagaaaaaagccagtgattataaaacttaaaaatgtatttcattcaaaattcagttccagttgttaccaatatttttacataacctatgtatagtcatgggtcacttaacagtggggatatgttctgagaaatatgcccttaggcaatttcattgttgtacaatcatcatggagtgtaattacacaaacagagagagtatggcttactacacacctaggctccaaacctgcaccttgttttactgaactgaatattgtaggcaattataacacaatggtaagtatttatgtgtctgaacatatttaagaagaggtacagtagaagatttaaaaggtacagtaaaaatacaatataaaagataaaaaatagtacacctgtatagggcatttactatgaaaggagcttgcaagactggaacttgctgggtgagtcagtgaatggtaagtgaatgtgaaggcctaggacattactgtacactactgcagactttgtaaatactgtacacctaagctacactgaatttatttaaaaagtaattgtgctatgacattacaaggctatgatgttactaggcaacaggaatttgtcagcttcagcttcattatgggaccactgtcgtatgtgctgcctgcattgactaaaatgtcattatgcggttgcataactgtatttattgttatgttcttttttggactgtttttatattttggattatactttggaaaaattactgagcctctcttgagctccagtttccttctctttgagatgggacaaataataggacctacaccatagggtgctacttcactggattgtgtgggagagtacatgcggagccctagtatgttctttcctttacttgtacaactcaccaggatgacagctgtcatgaataaagagtgtgctttgccctgcccaactacaaggtcccactaccagttgaggagtatactctgattcattgtgaaaatgccaacaagggtggttatcccttgctggaaagcaggttaaaaggattttcataattctgtacctcttctctttcctccaggcctactctgtgaagagaacattgatgactgtgcccggggtccccattgccttaatggtggtcagtgcatggataggattggaggctacagttgtcgctgcttgcctggctttgctggggagcgttgtgagggagacatcaacgagtgcctctccaacccctgcagctctgagggcagcctggactgtatacagctcaccaatgactacctgtgtgtttgccgtagtgcctttactggtgagaagctctctagcctcctggccactctgccttggaggatggttttagtgaacaaattgggccctgtgagttgtcccagacccaagtgaagcttttcttatataagaaaaacaacagcagcttaattttttaaagccagttttttcttagtctgtactttatggatgttataatcagtgtctacctttaatttttcctaagagattcttttgttgtgcattgattatatcatgctatggcaggaatattttttacaatgtatattgaaagtagttgaacaaaataacattttttaatagtggcaaaatatccaaaacctaaaatttactatctgaatcattttaaagtgtacagtgtacagttcagtggcattgtttagtacattgacattgttgttctactatcacccccattcattcacagaactcttttcatctgaacaaaataacattttgttttaaggaaccttacgtctaactccggtttcttcaccctgcctcctttgacatgtgatggcttgaattactgggtagttcctgccaccatgatctttccacccctaggactcagagaagcttaggaccctgcttagatacttaaagggggcaggtccaaattcaagtgtgtttaaccaaagatcagttgatgtgggtatgaaatgaaaagttgcagtggtcacaagtaatgccttgcccagtaaaggcttggccatgttcctactctgttcccaagcttctttctttcatcacagggcctgaagatgaccaagctctgcctcagaataggggtcttatcacaagaacttactagttacttctggagagggcagcatggtgacttttgggaactaaaatagttgtttgtatccagatgtggcaggatactcagatttgaaatttatcatgcatttcctggggtctgtagttgtatttcttatatggagggtgtgatcagattccttaggagtcagaaaataggctttaatagtctgtttacaaacaattcatcaagctgaactctgctacatcctgagcccatctccagccatctttccttccaactttaaagatatgctaccttacaatcttggaattttgtaaagaatgggagggattctgcaatatggaagctccctggatacactaacatcaaaaaagaaatagtccattgtgaacataatagctattgaggcaatgtggaacagaataagtatgaataatctgtctacagcctcgtattggccaaactgcactttgaaagccaaagcatcaaaactggctcctgtttctttcattgcccctgaggcttttttctctggaaacacaagcatttgcaaagtaagggggaagcaggagaaggaaggaatggagaccactttgaagtagtatcccacagccaggaagtagtgtttgtgcattttccacatttgtgaatgaaaaaaaaaaaatcccttgaatacattgagcacagttattgtgggatgctgttgcagagataaacagcaagggactggtggtccaccaagctgtgtccatgtggtggctgctcttggttagcggctgctgctgtgatttgaagagacaaacatttatacctcttgctgcttgatctcgttggccaaaaacattactatttttatttcatttttaaagctacctcttctttcccaagtgaccaccggccaaatggggcctatctcctgctgttggccaggagtcccagctgtgccctgcgtctcctctgtggttccagttgcctcgttctttatcttggagcagtggcccccaggggccttccgttttagaactattcctagaggaaactaactctaggaaaattaagctgtgttttaaggaatacgagttaggttacagaaaggccaaaaagtgattgaaatgaggtatcacagatgaaaattctctataccgcaaatcaccatttaaatgtattggcctggtgtagcctctcctatgaagtagataacattaacaaaatgcagtgaatagtttttcaactgtttttttgcaacttatgaaagctaaaatgacttcaaaaagctgaagtgtgatttctctttttttgatgggatttaagtcacttttctcacccaccctgttgtgtgagttggtacttactgtgtaggcaagacagagtaagggactggcctgagctggtgacaggccaatcatgttgagatgcagtgagtgttttctttctatgctcagattaccacaggcctagaactgaactctctcacacttgcttcacctatggctagttcccatcccagcaaagtttgttgagtaacttgcagtgactacttctgccttttaaaaccttttttattttttattttctgaggccggcactgtgaaaccttcgtcgatgtgtgtccccagatgccctgcctgaatggagggacttgtgctgtggccagtaacatgcctgatggtttcatttgccgttgtcccccggtaagtgccctgttgctcatctaagaaggggcattgtctcttccatacaatctgtgaacagaactgagattaaacctggttttaccaatcttcgaaatgggaagatttctcaattttagctctttcagaggaaagtgcttgggtttttccatttaaagctgtttacaagtgacaaaacaaaacaaaaacaaataaaagctgtttagacactcccagaaacagtgagcttcccaatccatgactgtcagtcttaagaaaaactaagggaaaaccacaaaaagtggtggagtgcccccttgaaaatagggctgatgtgtggggcttcttggccccaggctggagggtaatctcactgcccagattgggccagagttggtggaaatgctgctcttacattctttagcaggaaccatttggaagcaagttgtctcttaaagtagagggaagctcaattttagctatttgctatacccattcttttatcactgccagaggttgaaaccttcccaaaacaagagatccctatgcctcgggagataccaaaaggaaacctgtctagtaaccttggcttgggctgaacgggaagtacagaagggagtgagatgtggaggttttctagaaacctcaaacttccaatatgactgttttcctaccaatgccatttttatttcctcactgatttccacagggattttccggggcaaggtgccagagcagctgtggacaagtgaaatgtaggaagggggagcagtgtgtgcacaccgcctctggaccccgctgcttctgccccagtccccgggactgcgagtcaggctgtgccagtagcccctgccagcacgggggcagctgccaccctcagcgccagcctccttattactcctgccagtgtgccccaccattctcgggtagccgctgtgaactctacacggcaccccccagcacccctcctgccacctgtctgagccagtattgtgccgacaaagctcgggatggcgtctgtgatgaggcctgcaacagccatgcctgccagtgggatgggggtgactgttctctcaccatggagaacccctgggccaactgctcctccccacttccctgctgggattatatcaacaaccagtgtgatgagctgtgcaacacggtcgagtgcctgtttgacaactttgaatgccaggggaacagcaagacatgcaagtaagggcttcacgttttccagaactgaaggggactgtcactaacacacttcagtttctcgttcttgctcctaaccactccagtgcttcagcctaagctgcctctgcttttcagatggtgccagccttgtcccatcgcacactgccctgtgctctcccttgctgacaatgggccaggaatgctcattgcataatgaccctctctctctgcctatctttgccttctcacctgctgccttcgtgacctcctgggggatataacttttggaagtggtgtttcccacttcaagcagcctctcacataacctgcctgcaggatggatggaaaggtctgtatctctctcttcaccccattcctttccctaagactgtttttccccatctagatttatcaggaagcatgaattagattaagtctgtgaaccctcccggtcttaattgtataggatgctctatggtttacttaggaactttcctattaactagccattccatataatttaatcccaattaattctcagcaactcacgaggcataggtattactaacattctttcataggtgagagaacttaggcccaagggttaaagaacttgccaaagcaagttgtttctttgactcctaatcttctgattgagctagcatgaaaagttgtaccaaatagtataaatatcaaggggtaggggatgaggagaggagagtatagatggaatagtttgtacatcatttaggtttgggggttctaattccttttccaaatattgaaagagcctgtacaagtaatatctggtgtgctataaggacatacccatctgcctttaccttctgtagttgggattcactcttgaaagggaaagaaatgggtcatgttaatattgttctctgtatggcaactctcaatggttcagggccttgtatcaagtttctagaggcatctttcacttcctaaagcccgttgttaccttactgggggcaatggatttctctaaagtagaggaagcatgaaccaggttgacttttgtttcagatatgcagctttgtttgaaaacctgacttaacaggcttgtaaactgcctgggagcccctaagctcctgcagcatagtgagtacaatgttcttcatttaggaagtactcaacaaggatgagtggcataggcatcagggataggagatgcaaagaaggttttgtggggcatttgggtcctgggtgtgggccacagaaaatgggtaggaaaatccacagtagttccaaatgaaaaagcaaatagagctccagtctaatctgagctcttttgcctgttctctgcttccccttacctaggtatgacaaatactgtgcagaccacttcaaagacaaccactgtgaccaggggtgcaacagtgaggagtgtggttgggatgggctggactgtgctgctgaccaacctgagaacctggcagaaggtaccctggttattgtggtattgatgccacctgaacaactgctccaggatgctcgcagcttcttgcgggcactgggtaccctgctccacaccaacctgcgcattaagcgggactcccagggggaactcatggtgtacccctattatggtgagaagtcagctgctatgaagaaacagaggatgacacgcagatcccttcctggtgaacaagaacaggaggtggctgggtaggtgtttggtttctgaacttcaaggctaattttatgaagcctagcactttgacatatagcacaagtcataactcaacctatagaaatgcaaagatcagaaaaatagaatggcccaccacttaagataaacccgttaccccagtacttacgtttaaatgtaaagatatgccttcgtcttggctgaaaagtgggcaggggtacacaggaggcagaatgtctggaaggcctcctcagatgccagaatccataaccttttgccagagttgcctcaaatccctttattagtgacattcctttttacattaatcattgccttattgttaaggcccttctttagaatatatgtctctttgacacaggtaatgatcttcagttgctctgtcattcacacctcactctttgttggtatattgtcaaactttcaaccctccagctagctgagataccaatgcagagacaaaggaaaataaggactaaaaacacacagggatgtatgtttagagtagcaccaagtaccactgagtaggtatgaaagagtggaagaagaccactgaaaccttcgggaggaaagcacagcttctcactttgtcatgcattgcctcagccagaaggctttggtcagccagactaaggaaggtgggacatcctctatgtgggaattagtgtttaagatctcaagggacagtattctaattcctgagatatgtcttaaggcagcatcccagaggtggggacctgatgctgaaggggaggaagggaggctcctgtcaccctttatgacatgttctgcctgacctgcactcttctgttttacccccatctctcctcctccgcttctcccttggcatcccacagctctaaagtctttctggaaattgacaaccgccagtgtgttcaagactcagaccactgcttcaagaacacggatgcagcagcagctctcctggcctctcacgccatacaggggaccctgtcataccctcttgtgtctgtcgtcagtgagtggcactggtgtaaaggggaaaggtggcgggggaagagtgtcaattgggggaacaattttcattatgtagccctctattttttcaggactgttgaggtcaaagttgccctctaaatgaatctaatgctgacattgagaggttaatgttttattcagcactttccctgtctctgtggactttcaggtgaatccctgactccagaacgcactcagctcctctatctccttgctgttgctgttgtcatcattctgtttattattctgctgggggtaatcatggcaaaacgaaagcgtaagcatggctctctctggctgcctgaaggtttcactcttcgccgagatgcaagcaatcacaagcgtcgtgagccagtgggacaggatgctgtggggctgaagtaagaggcattgccaataagccactattcacagtataagtagggatgactagaaaagcatatcttgttgaatcatgattttaaattctaagctctgggcatttactcacattgaccatgattctaaatgccttgtgagtgactgaaaccacagtcagagcgtgggtgcatctattctgtgtatattatcacaatgccgcccagcttctgtgttgaggtgcccttttgttgtaagctcacgatcaatgggaagggaaaggatgaatgccaagggaatgtcaccaaaaatactgcccatcttctctgggccaagaccctgcaaaattgtaatatagccacgggagtgtgtcatggtggaaagtgttgaaaaccactgtattagtttatgactgccattcttattttttctttttataatcatattagaaatctctcagtgcaagtctcagaagctaacctaattggtactggaacaagtgaacactgggtcgatgatgaagggccccagccaaagaaagtaaaggtgaggtggccatggtagaaccaccattgtcagccattatctggttacatttcaaatttctgtcctttagctccagagtgtcctgaatgggagtaaagagtgatagtcttgatgtcttacccagacaataactatcctaggttctcctaaacagcaggaatccttaggacgtaaatgaccttgggttacctatatatgctcttcaagaataactctttaaaaatactaagcacatctgtttcctttagtgttatgctggcagtagtcaagtcaggaatggtgtgtgtagatggcaattccttcatggccacatctcttccttatcctttatgggcacttcttctataagagaagatgaaattaagcagtggaagaaagccagttatcattgacattggcaaaatgaaagccagtgatcatggcaaaacgttgacattggaggctccataccttgagcccaggaaactaaagccatataaaagcaagtggtagattgggctgagactgacatgaaaaagcagaccatccatccacagctgtgcatggctgggagctggtggagcatgatggttaagaagattgctttagttaatatcagaactggattcaaatccaaaactctgccgcttagtagctggcaagttacttaacctctttgtaattatccttccttgtaaaatgcggataataataaccctttcctctgtgagttgttgtgttggcatatgtgccttatctactttcctgtcatgtactaggtattcagtaaagggtagctgcttttaaattatcatgattattattattgaatagtctttcctgagtgcttactacatgttgggtgctatgttgagtacaaggaaacaaccttgaacaaggcttattttcccttcttgagaagcttacagccttgtggtggagatggccatgtagtgctgtgtaagcatttaacacatgatcagttaagcagaggtaagcagagtatgctttttagggccaacaagaagaattaaagtttactttctagtggagggtaggaaaagtgagaattgggtgctctggagatctaaaggctaaagcctagagtttgggattgggggagggagttgtctagatgatgcaggaaaggtaagcaggagccacatcacgagagcagtgggaagccaaggctgaggtaatcctctggaggggtggaggagtaggaagagagaaaacaatgggagataagcagcggtggtggaggctctggacaccttctgattagcagtttctggtggtggccagattgatagggagcattgttttcacctttcaggctgaagatgaggccttactctcagaagaagatgaccccattgatcgacggccatggacacagcagcaccttgaagctgcagacatccgtaggacaccatcgctggctctcacccctcctcaggcagagcaggaggtggatgtgttagatgtgaatgtccgtggcccaggtcagcaccgggcctcttcccctcttcactgggctgtgtctgcccatggttccacattgttgtccctgtgtttgccctgtccagtcataaaccccttcccaatttcacagactctaaatcagctcgaggaaatgaatgcttaaggaatgtagccacaaagaaattatcagctcagaaagggaaggatttcacattgcttcatgtacagtgtgttgagactaaacaggctgataaaatgggttagattgtagtgggatagaaaaataatatcccaaagcagaggatagttagtatcttatgcatgtattaattgttctattaatattagatatttttaaatgtccaattaaaataacagcacttaaacttgaacagaaaaacgtgtttagagaagagcccccagcttaaaaagacttgtactttcccattattctttacagaaatgatactatcagaggaaaaggtggcaaatgtgaaactaataaccagttactacaagaagtacagggaattctttgcccctaagaataactttagtcaaatagagctgtttcaaccatagggttaactaccttctccttcttgagtactttatggaattttccattcctacagatggctgcaccccattgatgttggcttctctccgaggaggcagctcagatttgagtgatgaagatgaagatgcagaggactcttctgctaacatcatcacagacttggtctaccagggtgccagcctccaggcccagacagaccggactggtgagatggccctgcaccttgcagcccgctactcacgggctgatgctgccaagcgtctcctggatgcaggtgcagatgccaatgcccaggacaacatgggccgctgtccactccatgctgcagtggcagctgatgcccaaggtgtcttccaggtaaagaacatgagaagagtcacttgaataataattcctatggctctataatgttttatcgtttttaaagaattaatatctcattgaatttattcaatcatttgagagattagggcaggtattagagtcatgcttggtagatgggaaagtgggaaaagggaggcaggcaaattgacctagctatatataggaagatagtgatagagccaactgcagacaacaccagtctttctgattattagtgataatttgttgtgccaagatgcctcccaaatgcgtagattagatgagagtgatagctggtccggagcctttgactagtatccgctacttcttatggattggcctgactgtatgggcttctagctgctcattggcagttttcttgacctgagttcatattatattccctgatgcctgtttatccttatgaggaaattggaagcattctgaatcaccttaggctgtatcctgactgaagttgtgatatttccccacatccctcttctttcctgagaaagtagaaggctcatcactttacatcagccattatttattgagcatgtatttatttattcatgcaacaaatatttattgattgatcatgatagaatcttgggcacaaagataacaagactttccctctcctccaggaatctacactgtagcctcagctctgatgcccttgtttcttcactgagtttcattattttccttcatccaggtgactctcttttctgtactttctcctcttctagattctgattcgcaaccgagtaactgatctagatgccaggatgaatgatggtactacacccctgatcctggctgcccgcctggctgtggagggaatggtggcagaactgatcaactgccaagcggatgtgaatgcagtggatgaccatggtagggatgaaaggcagggatttggattcttacctgcaaagcatgcctctgacgaggggaatagagttacgtgacccttagagaactgcctgagatccaaatacgtgagagattcactcattctttcattcatgcatttatttaacatgctgagctcagagatccaagccagtaggagatccctaattaaaatgagggatttttaatgagggttcttggacctcagagcagatacatgaaaggtgttcccatgtagtttcctaggcataacacttgatttgaggatttatgagagctgacttctctaggagagttgtagaatattctcaatataaattctgacatgtaatatataggtttttatcttcagtatgtaacagggtagattctgccatgtaggggacatgaatgcctcatacaagtgatcctttcacctagaggtcttctgcaggctaggcagcctgtactgaagtatttctagaacagaggaaaaagaagagattactttggtttttcctatagacccctacagagaactgcttcctgctgatctctggggagtttaagatttcattgtgcaagtcatagtgtcttatactaagagtaggatatgtctgtttataaaaatgtttctcccctgcaggaaaatctgctcttcactgggcagctgctgtcaataatgtggaggcaactcttttgttgttgaaaaatggggccaaccgagacatgcaggacaacaaggtacagtttgtgggctctgagcttgaggaggctcatagcagtgcctcagttataagcccattcccgtttctccttacagcttctcttgttatatgtatagacaaagatggaagcagtttgggcagacactgggtttcgagagcttgatgaggatattgggcttgtccaggcatgtgtcaggatggagttctctgccctctcagtactcagcttgcagtaggctggctatagatagcttggtgtaactctttctcttccctgacatttccttttctccagttgtctcttctgttcataatcacttctttttctcgttttctttcttttttccctccggctgcttttttttctgtccttggataccctgatgttttcctgtttgatttttctccatctgagttttttgtcctgcttccttctctcattcatcttctctcagttttctttgttttccttatcttagtcctttcttgcacatgttttgtctcttctttcactgtttcccttacttttcccagttctgtgcatgccttagttttttctcttcctacctttcttatttctaactccttttcctattatttcttatttctaactcctattcctacctttcttatttctaactccttttccttaaccttattttgataagctcagtactcttttaagtgagtctctggctcaggggcatgctttattttatgaattcccaactaaagagatgttccccctaaggggcaaaattgtttttttgaggagaggtgaaataatcttactttttttatgtgtaaatcacagatacacattcagtacattggtagaggcacagcctatctgtggtgttaatatttcatcggggagataattaggaaaacatgtctaagggggtgataataaaaaagattgagaaaaactgctatattctcaagagtgttattaacatgtgttctgtgatgggccttttctgtaggaagagacacctctgtttcttgctgcccgggaggggagctatgaagcagccaagatcctgttagaccattttgccaatcgagacatcacagaccatatggatcgtcttccccgggatgtggctcgggatcgcatgcaccatgacattgtgcgccttctggatgaatacaatgtgaccccaagccctccaggcaccgtgttgacttctgctctctcacctgtcatctgtgggcccaacagatctttcctcagcctgaagcacaccccaatgggcaagaagtctagacggcccagtgccaagagtaccatgcctactagcctccctaaccttgccaaggaggcaaaggatgccaagggtagtaggaggaagaagtctctgagtgagaaggtccaactgtctgagagttcagtaactttatcccctgttgattccctagaatctcctcacacgtatgtttccgacaccacatcctctccaatgattacatcccctgggatcttacaggcctcacccaaccctatgttggccactgccgcccctcctgccccagtccatgcccagcatgcactatctttttctaaccttcatgaaatgcagcctttggcacatggggccagcactgtgcttccctcagtgagccagttgctatcccaccaccacattgtgtctccaggcagtggcagtgctggaagcttgagtaggctccatccagtcccagtcccagcagattggatgaaccgcatggaggtgaatgagacccagtacaatgagatgtttggtatggtcctggctccagctgagggcacccatcctggcatagctccccagagcaggccacctgaagggaagcacataaccacccctcgggagcccttgccccccattgtgactttccagctcatccctaaaggcagtattgcccaaccagcgggggctccccagcctcagtccacctgccctccagctgttgcgggccccctgcccaccatgtaccagattccagaaatggcccgtttgcccagtgtggctttccccactgccatgatgccccagcaggacgggcaggtagctcagaccattctcccagcctatcatcctttcccagcctctgtgggcaagtaccccacacccccttcacagcacagttatgcttcctcaaatgctgctgagcgaacacccagtcacagtggtcacctccagggtgagcatccctacctgacaccatccccagagtctcctgaccagtggtcaagttcatcaccccactctgcttctgactggtcagatgtgaccaccagccctacccctgggggtgctggaggaggtcagcggggacctgggacacacatgtctgagccaccacacaacaacatgcaggtttatgcgtgagagagtccacctccagtgtagagacataactgacttttgtaaatgctgctgaggaacaaatgaaggtcatccgggagagaaatgaagaaatctctggagccagcttctagaggtaggaaagagaagatgttcttattcagataatgcaagagaagcaattcgtcagtttcactgggtatctgcaaggcttattgattattctaatctaataagacaagtttgtggaaatgcaagatgaatacaagccttgggtccatgtttactctcttctatttggagaataagatggatgcttattgaagcccagacattcttgcagcttggactgcattttaagccctgcaggcttctgccatatccatgagaagattctacactagcgtcctgttgggaattatgccctggaattctgcctgaattgacctacgcatctcctcctccttggacattcttttgtcttcatttggtgcttttggttttgcacctctccgtgattgtagccctaccagcatgttatagggcaagacctttgtgcttttgatcattctggcccatgaaagcaactttggtctcctttcccctcctgtcttcccggtatcccttggagtctcacaaggtttactttggtatggttctcagcacaaacctttcaagtatgttgtttctttggaaaatggacatactgtattgtgttctcctgcatatatcattcctggagagagaaggggagaagaatacttttcttcaacaaattttgggggcaggagatcccttcaagaggctgcaccttaatttttcttgtctgtgtgcaggtcttcatataaactttaccaggaagaagggtgtgagtttgttgtttttctgtgtatgggcctggtcagtgtaaagttttatccttgatagtctagttactatgaccctccccacttttttaaaaccagaaaaaggtttggaatgttggaatgaccaagagacaagttaactcgtgcaagagccagttacccacccacaggtccccctacttcctgccaagcattccattgactgcctgtatggaacacatttgtcccagatctgagcattctaggcctgtttcactcactcacccagcatatgaaactagtcttaactgttgagcctttcctttcatatccacagaagacactgtctcaaatgttgtacccttgccatttaggactgaactttccttagcccaagggacccagtgacagttgtcttccgtttgtcagatgatcagtctctactgattatcttgctgcttaaaggcctgctcaccaatctttctttcacaccgtgtggtccgtgttactggtatacccagtatgttctcactgaagacatggactttatatgttcaagtgcaggaattggaaagttggacttgttttctatgatccaaaacagccctataagaaggttggaaaaggaggaactatatagcagcctttgctattttctgctaccatttcttttcctctgaagcggccatgacattccctttggcaactaacgtagaaactcaacagaacattttcctttcctagagtcaccttttagatgataatggacaactatagacttgctcattgttcagactgattgcccctcacctgaatccactctctgtattcatgctcttggcaatttctttgactttcttttaagggcagaagcattttagttaattgtagataaagaatagttttcttcctcttctccttgggccagttaataattggtccatggctacactgcaacttccgtccagtgctgtgatgcccatgacacctgcaaaataagttctgcctgggcattttgtagatattaacaggtgaattcccgactcttttggtttgaatgacagttctcattccttctatggctgcaagtatgcatcagtgcttcccacttacctgatttgtctgtcggtggccccatatggaaaccctgcgtgtctgttggcataatagtttacaaatggttttttcagtcctatccaaatttattgaaccaacaaaaataattacttctgccctgagataagcagattaagtttgttcattctctgctttattctctccatgtggcaacattctgtcagcctctttcatagtgtgcaaacattttatcattctaaatggtgactctctgcccttggacccatttattattcacagatggggagaacctatctgcatggacctctgtggaccacagcgtacctgcccctttctgccctcctgctccagccccacttctgaaagtatcagctactgatccagccactggatattttatatcctcccttttccttaagcacaatgtcagaccaaattgcttgtttctttttcttggactactttaatttggatcctttgggtttggagaaagggaatgtgaaagctgtcattacagacaacaggtttcagtgatgaggaggacaacactgcctttcaaactttttactgatctcttagattttaagaactcttgaattgtgtggtatctaataaaagggaaggtaagatggataatcactttctcatttgggttctgaattggagactcagtttttatgagacacatcttttatgccatgtatagatcctcccctgctatttttggtttatttttattgttataaatgctttctttctttgactcctcttctgcctgcctttggggataggtttttttgtttgtttatttgcttcctctgttttgttttaagcatcattttcttatgtgaggtggggaagggaaaggtatgagggaaagagagtctgagaattaaaatattttagtataagcaattggctgtgatgctcaaatccattgcatcctcttattgaatttgccaatttgtaatttttgcataataaagaaccaaaggtgtaatgttttgttgagaggtggtttagggattttggccctaaccaatacattgaatgtatgatgactatttgggaggacacatttatgtacccagaggcccccactaataagtggtactatggttacttccttgtgtacatttctcttaaaagtgatattatatctgtttgtatgagaaacccagtaaccaataaaatgaccgcatattcctgactaaacgtagtaaggaaaatgcacactttgtttttacttttccgtttcattctaaaggtagttaagatgaaatttatatgaaagcatttttatcacaaaataaaaaaggtttgccaagctcagtggtgttgtattttttattttccaatactgcatccatggcctggcagtgttacctcatgatgtcataatttgctgagagagcaaattttcttttctttctgaatcccacaaagcctagcaccaaacttctttttttcttcctttaattagatcataaataaatgatcctggggaaaaagcatctgtcaaataggaaacatcacaaaactgagcactcttctgtgcactagccatagctggtgacaaacagatggttgctcagggacaaggtgccttccaatggaaatgcgaagtagttgctatagcaagaattgggaactgggatataagtcataatattaattatgctgttatgtaaatgattggtttgtaacattccttaagtgaaatttgtgtagaacttaatatacaggattataaaataatattttgtgtataaatttgttataagttcacattcatacatttatttataaagtcagtgagatatttgaacatgaatacttgatgttgttaatatgtatggcattagcagtctcatattgaccctagcatcttatttccattttccattattttgcagaaacttatcagtcacacatgcatagttataaatggtaacagttttttttttaatgacttgaaatcttaggatatgcttctgctaagcagataaaggagccttgttcaagatctgcacagttaaggttttaacgtaatttagcattaattggttatgttcagaatgttttaattttatataaaacattttagtcttcatattgggttttataatggtggaagaataaaatgaatttgagagctaaggaatgatcacctgtgcaggccggccactcagagctcaagttgccacttgcaaactatttgggaactaaattgctccatgaaaacctgcttcagtggatccaggttgcaggccattgggtggctgaccacatcctgcccctgcaattttaagtcttgaatgctagcctttgattatgcagggaggactcggggcactcccagacgtgaaagccaaaaaaggagagtagggccgaagccaagtgccaccccatcacaaagctggagcagtaggcttggacactagaccatgagcatgccaggagaggggctagtgcctcagtcatgcaactaaaaagcttcacgacccaaggagaggggctgcttcctttatcagaacaacctccttaatgcccacatgtttttcaggatgtgggcagtgggggaactgcgagcctgttaattgcctctgccactacgtctttcagccacagggtatatgaagttgtgtgtgtgttgtgtgtgtgaaagaatacaacttttccttcttttgccttagcacttagcaaaacacatttaaaatatttgtaccagtcaagtcccatccacaaagtgtgggcacactcaaattaggatacatcaaagagggctatttacaaaggattaattacaaaagtgtgtgtgcaatgtcagggaccgacacacagttgtgcagaaacccgtgttagcatcagcagagctatttccacttgtgggcccaaaaggccaggagaagtcactaggacctggaagcagagtcctgtagagcaggtccccaaccccccgggccacagactggataccttagcctgtggggaaccgttaggaaccgggctgcacagcaggaggtgagcagcaggcaagcaagcattactgcctgagctccacctcctgtcagatcagcagtggcgttagattctcataggagcatgaaccctattgtgaactgcatatgtgaaggatctaggttgcgcactccttatgataatctaatgtctgatgatctgagatggaagagtttcatccccaaaccattccctggccccagtccatggaaatattgtcttccacgaaactggttcctggtgccaaaaaggttggagactgctgctgtagagcaggctacctcaagaagagctgtgacttccttcaaagcacacagtgggccttaagccctcccagaaagaagctagggaatgaatgaataccctgatctcatttgcttcactgggctctctgtttgccgactccaagtggaagcctgcaaatatgggagctgttgattataatctatcaatgtaagtcagctttctggctgggagcttggtggagaaggaaagagagtgaatctgaaggggcaaacatattacctaaaataacattctccttccaactatatttctgagaaatttccactggtaacctgttattgatgtgtctaggcagaaagcataaagttaaaaaaaagtacgtatttagaatcctgacttctttttctgatctagtagtgtgtttcttcaccactttggctttgagcactcaaagtgcagacagtcatcagcagtgggatggataaattctggtacattcattgaaatgaatgctacgcataaatgaaaaagagcaacttgcaacaacacgtagtatattcatcaaaataatgttgagcaaaataagccagacacaagtaatacattctgtatgattccattacataagtttaggaaaaaccaaccaatagtaaatagataatctgaacagtggctactttttgggagaaaggtctagactgaagtgagagaaagaagaatctttctggagtctgaaagtatcttgacctgggtggtgactacatgagtgtatatatacgtaaaatttcatgtaaaatttaacttaagatttatgcatttgacttatgtaaattatacttcaataaaatgtttctacaataacctacagaaacgtacaagcatctaatattggaattcataaaatgttgatattttatacttatttcagatgtttgaagatgtataatgcttatggcttaaaactcctatatttcatcctctaattccatttcccttcctgttttttccttcctcctttctttcccagttagttatttttataaatttgctctgtggggattatttttgttctggaaaacattgttatttgcaatagttggtccatgaaaaaagtctattttcaaatgcaattgtataaaatgtgggactccattattgtgaatttaattgaccaagtgagacaagccaggggagtcaggttgcaaggcaggagttctgggctccagctgaataattcatacccatctgggtcatggctgccatctggcactacctggtagcacttgtgtgcctcagcataaatatatgtttgattgaatatgggctttgtaacctggccgataattttgagagcttcaagagcctcattgtaaaacatcacctgtctattgcacgtgcctatttgagaaaatttaggctgggcaagcactgagatgtagggacccagcccttgtcccgctgtcatgcaattgtctcacatttctgtctctctcctttttctctcttccatgacccctttcccttgcctcctagaaaagtttgaagaaagtggatttggaagaggataggcatcaaccactaatcatgttacatcagaatgtgtgttactgtgcttaggttttacatataaaactagggttttacatataatagttagaaggttaatacgactatatgcctggacaactgaagaaaacagaggagaactaccataaactattagggattcagtaaataaaatgatgtaaaaccaattcacagaagaaccatttgcaggatgtaattgaaaagaccacatttacaatagtgcacacgtgcacgcacacacacagacacacaccccaataaccttaaaaaaattcaaacccagtggaggggcttcaatatatatagctaactagaggcatgtggtacttgtgtttttaaaaaaattcaaacccagtggacgggcttcaatatagctaactagaggcatctggtacttgtgttttctacaaagaagaacaaaaataacaagaagataatcacacttcaactagatcatctaaaagagtacacaggaattcaacagaaaagtggccagaaacacctaaggcaaggaaagagagaagtgagacagcctgctcagccatgaccagctgggagcccagagaggctctccagtgtggagaaagggtaagtgagagacccccagcagtccacattcccactgtagattcttgcaatcctagccatgagataactcctcgacccttgaggaccttaaaactaacataggaagctgcctgaagaccatacaactctactgctctagaatgggagctcacgctgggtcccgcacacaccacccctggcaaatcctaagcagctacagcaaggttccattttgagagtccatctctcagcagaatgaatcctgtcatgaggctcaaaagcctctgcatctccacatcctgggtcccccgttgatatcctccacccacagctgctgctgctggttgctgctgttggctgctactgccaggcccaaagtgtaagccattggctgtgacactgcccacccccagcagttggccaccacacatttataagcaacctaaggacaggctacctcatgcacatcttccacttagggccaaagcatgcactccccaaccacctgcccatggttgctgccactgaaaacaaccctgcccactagcagcagggtcacagggcatctgctgccaccctcacccaagcattctgccagggacctggtgtattggtgagagttctccaaagggacagaactaataggatatatgcatatatgaaagggagtttattaaggagaattgattcacacgatcacaaagtgaaatcccacaataggctgttttcaagctgaggagctaggaagccagtagtggctcactccaagtccaaagctcaaaagtagggaagccgacagtgcagccttcagtctgtggtcaaaggcctgagagtctgcagcaaaccactggtataagtccaagagtccaaaggccgaagaacctggagcctgatgttcaagggcaggaagcatctagcgcaggagagagagatgaaagccagaagactcagcaagtcagcttcttccactttctcccacctgctttttctagctgtgctggcagctgatgggatggtacccacttagattgagggtgggtcttcctctcccagtccactgactcaaatgttaatctcctcggcaacacccatacagacacacccagaaacaatactttgcatccttcattccagtcaagttgacaatgttaaccatcacatccaggatcactctgcccctgtctaccacagctagcacctgcacacactgccagtggttgttgaagacaggcctgcctggcccagctctgcctcttcccacagtgcccaggcatactgttcaggagcctggagatcaccctgccccatccaccaccttcggcatgtgagcactccttccaggagcctaaggatgggccatccaacctgctgctaccaccacagctggcacccacctgcatgcatgacctacgggcttggggactggcccaactagcaaatttctgcccctgccaaccccagtgcagactgcttggaaacaagaaggttgtcccactactgctactgccatcatctatgccttgctcactgtgcaggggcccaaagacccaccaacctgtccagcccaccactgccactgccagcaccaaagcaagccatttggaggcccaagaaccagcctgtctagatctgctaacactggtgccagtgcacattaccctggggctcaacaacaggcattgtcagcctgccactgccaccactgggacacaaggactggcccattttgtgtccccatccctagcagaatgtcaccacagcctccactaacaaccacaccctatgccactgctactgatgctggttacagccaaagaaatcatacagagactacactaccgcatgcacctggaatcaaagccaaagtgccctacacaaccaataccatagatacatcctcagaaaaaagtcctcccttatgaaagcaaattcacaaaattggaataagtgattgttacaccagatgtgcagatatcagtgtaaagacacaagaaacatgaaaaagcaaggaaagatagcatcctcaaaggaacacaataattctccagcaaaagattcccattaaaaagaaacttacaaaatcccagaaaggaattcaaaataatgattttttaaagcttagtgagatacaacagaacaaagtaaacaatacaaagaaattagaaaaacaattcagggtatgaatgagaaatttaccagagatagaggtcatacataaaagaaccaaacagattctgaaactgaaaaactcattgaatggaattaaaacatatattcaaaaacttcaataatagactagatcaagcagaagaatttcagagcttgaagacagatcttttgaaataacccagccagacaaaaataaagaaaaaagaatttaaaagaatgagtgaagcccacatgacatatagcatactattaagcaaccaaatgtttaaatttttggtgtctcagaaggtgagagaaaatataagatcgaaaacctatttaacaaaacaatagctgggaattttccaagtctagcaagagatttagacatccagataacaggaaactcatagatctccaaatagatacaatttaaaaaggtcttctccatggcccattatagtcaaactgccaaaagtcaaagacagagaattctaaaaagagcaagagaaatgtgtttagtcacttataagggaatccccatcagactaacagcacatttctcagcagaaaccttataggccagaagataattagattatatattcaaagtgttgaaagaaaaaatgccaaccaagaacactatacccaaaatgttatttataaacgaaagagaaatagtctttcccaaataagcaaatgctgagggaattcatcaccactagacaagttctacaagaaatgattaaggaagtcctgtacctggaaacaaatggatgatatctaccatcatgaaaacacatgagtgtataaagcccactggtagagcaaacacacaaataaagaaaagaaaggactcaaatgttaccactaaggaaaatcaccaagccacaataataaacgataaaagagaaagaaacgaacaaaggatatacaaaaaactcaaaatcaattgataaaataaaaacaggaataagccctcagatatcaataataatcttaaatgtaagcagattaaactttccacgtaaaagatatagactggctaaatgggttaaaaaaacgaaataaaacatgctccaactatatgttgccttcaaacatagtgaaagtattctagcttgatgtgtaaacaagttgtaaactaacctaggagtatacccttgtaacaaaccaactgagtctcagccaattatagtagctgaaccttcagcaaatcccaggctttaaattgccagattatgcccaaataaaacaaacctcaaactgtaccaatcatttaatccctgtatgtcatttcttgtttcctgatttttaagtatagctcaccatgatggaggtgggggtattctgaacaatttttggttcagaatgcttcccagttctaaaacctgtttcctgcacaaactttgttaaatttaatttgtcttagttttttctttaataattgtaaaatacagcatataaagaagtgaggataaaactttcaggactattttaacaaatatgtacagcaaaccctagcagtcaagaaatatattgctaacaccccagcaaaagctacaccaagcatacccttcttcctccctcccttcttttcctgagtatagccccttcctttcaccctagaaataatagctccctgacaggtttagtaataatttcctcaatttattttaccaactatccatttgggctgctatgacaagatacctcacgctgggtaatatataaattgaagacagatcttgctcacagttctggaggctaggaaatccaagataaagacaacagcaaatttagtgtctggtgaggactatttctttctttgcttcaaagacgacgctttcttcctgggtcctcacatgacagtaggggcaaagaagccccctcaggctcctttttaagggcactaatcccattcataactcatgggaccctgctgatcacctcccaaaagcccacctcttaataccaccacattggggattaagttttcacatttcaacttaggagagacataaacattcagactgtagcattctgcctctggtgtcccaaaatttattttgttcttacatgcacattccatcccaataacctcaaaactcttaatttcagcatcaacacagaagtctaaagtccagagtcttgtctaaacatcatttaaatcaggtatgagtgagactcaagttatgattcatcctgaggcaaattgccctctggttgtgaatctgtgaaattaaacttatatgcttccaaaatacagtggaggagaaggcatacaataaatgtttctattccaaaaaggaaaaataggaaggaataaagagttaactggtctcaagtaagtccaaaacccctcagggtaaacaacagtaaatcttaagtcttgacaatcaactttgacttgatgtcctgccttctggacatactggtgcagaggttggaacctcaaggctccaggtgacctcacccccatggctttgctgagcacagcccacacagcagctttcaggggttggaattaggtgcctgtggctctcccaggcggcgttttacactggaggctccacagttctggggttttggggcagccctgctcccatggctccataagacattgccctattggggactctctgtggtgacccaactcccacagttccactgagcaatgccctagtggcagctgtctgtggtggtccttcccctgtggcagttctcagcctagatttcaagaatctctgcggtatcctttgaaatcaatgtggaggtggccatcctcccacagttcttgcattctgagtgcctggagatttagcaccatgtgaatgctgcaaaggtttactacccacatcctctggagggccagccactgctgctggcaccacaactgggcccactggagccacaccgggggtggccaaaaagtgctgcatttgaatcaaagagcagagatttgaagtggcactgggcagtgagttaaaggccccacatatgttctgggcccctccttttaaaccattatgccttcatggctctgccattgtggacctgtgatggaaatggcagtcccaaagatctccaaatatgttcagggtcattctttcattgtcttgatgaatgacacagggctgagtgatcctgatctccttatcaaagagtgatttggccacacccatggtattttcttctgaacatgacccggctgagaattttccatatattacattcttttccctttttgattatctgtctttagctcatttctgtcttctcacattttatcataagcaatcacgagaagtcatgccacaccctcaacactttgcttagagatttctcccccgcaaatatcctatttaatcactcagaagttctaccttgcacaaaacacaattcagctatgttttgtgccactttatcataaggattgtctttcctctcattttcaacaagacgttcctcatttccatctaatacctcatcagaatagcctttaccattcacatttctatttaataccaacattctgaccatgaccacttaggtaatctctatgaagactgaggctttctctacagttcttctcttctaaaccctcaccagaatcatccttaatgcttcattaatggcaatgtacagtttaaaaagaaatcatgtacccccaaactcttctaacctctactcattacccagttccaaagccacttttaaattttaggtatttgttaaagtgacagcctattctcagtaacaatttctgattgaaactctaaaaacagagatagattttgccaggttttgaactttatattcattatgttttgtttttccatatttgtaaaattcttccgtgttgttgcatgtaactgattcatcatctccattgccacagtcactgttcatagagatttggattgttatcagtgtggagaatattgttatgtccatgtatcctggtgtacatacatacacatttctgtaggatatatacctagagtggaattgctggatcacagggtcttcatattttcagatacataagaaacactaaacagggctttaaagtggttttactgatctacattgccaccaaaggatataagagttcttactcttctacaacctcacctaaacttcatgttaatcggcttcctgaatcattttcaacctgatggacatccgatagaagctttaatttgcagtattctgattagtaatgtggttgagaacctttccaattgtttactgatcatata

SEQ ID NO: 910 - DNA, 8150 bp, Homo sapiens
cttcatttaccaggttttgaagggagcacctgtgagaggaatattgatgactgccctaaccacaggtgtcagaatggaggggtttgtgtggatggggtcaacacttacaactgccgctgtcccccacaatggacaggacagttctgcacagaggatgtggatgaatgcctgctgcagcccaatgcctgtcaaaatgggggcacctgtgccaaccgcaatggaggctatggctgtgtatgtgtcaacggctggagtggagatgactgcagtgagaacattgatgattgtgccttcgcctcctgtactccaggctccacctgcatcgaccgtgtggcctccttctcttgcatgtgcccagaggggaaggcaggtctcctgtgtcatctggatgatgcatgcatcagcaatccttgccacaagggggcactgtgtgacaccaaccccctaaatgggcaatatatttgcacctgcccacaaggctacaaaggggctgactgcacagaagatgtggatgaatgtgccatggccaatagcaatccttgtgagcatgcaggaaaatgtgtgaacacggatggcgccttccactgtgagtgtctgaagggttatgcaggacctcgttgtgagatggacatcaatgagtgccattcagacccctgccagaatgatgctacctgtctggataagattggaggcttcacatgtctgtgcatgccaggtttcaaaggtgtgcattgtgaattagaaataaatgaatgtcagagcaacccttgtgtgaacaatgggcagtgtgtggataaagtcaatcgtttccagtgcctgtgtcctcctggtttcactgggccagtttgccagattgatattgatgactgttccagtactccgtgtctgaatggggcaaagtgtatcgatcacccgaatggctatgaatgccagtgtgccacaggtttcactggtgtgttgtgtgaggagaacattgacaactgtgaccccgatccttgccaccatggtcagtgtcaggatggtattgattcctacacctgcatctgcaatcccgggtacatgggcgccatctgcagtgaccagattgatgaatgttacagcagcccttgcctgaacgatggtcgctgcattgacctggtcaatggctaccagtgcaactgccagccaggcacgtcaggggttaattgtgaaattaattttgatgactgtgcaagtaacccttgtatccatggaatctgtatggatggcattaatcgctacagttgtgtctgctcaccaggattcacagggcagagatgtaacattgacattgatgagtgtgcctccaatccctgtcgcaagggtgcaacatgtatcaacggtgtgaatggtttccgctgtatatgccccgagggaccccatcaccccagctgctactcacaggtgaacgaatgcctgagcaatccctgcatccatggaaactgtactggaggtctcagtggatataagtgtctctgtgatgcaggctgggttggcatcaactgtgaagtggacaaaaatgaatgcctttcgaatccatgccagaatggaggaacttgtgacaatctggtgaatggatacaggtgtacttgcaagaagggctttaaaggctataactgccaggtgaatattgatgaatgtgcctcaaatccatgcctgaaccaaggaacctgctttgatgacataagtggctacacttgccactgtgtgctgccatacacaggcaagaattgtcagacagtattggctccctgttccccaaacccttgtgagaatgctgctgtttgcaaagagtcaccaaattttgagagttatacttgcttgtgtgctcctggctggcaaggtcagcggtgtaccattgacattgacgagtgtatctccaagccctgcatgaaccatggtctctgccataacacccagggcagctacatgtgtgaatgtccaccaggcttcagtggtatggactgtgaggaggacattgatgactgccttgccaatccttgccagaatggaggttcctgtatggatggagtgaatactttctcctgcctctgccttccgggtttcactggggataagtgccagacagacatgaatgagtgtctgagtgaaccctgtaagaatggagggacctgctctgactacgtcaacagttacacttgcaagtgccaggcaggatttgatggagtccattgtgagaacaacatcaatgagtgcactgagagctcctgtttcaatggtggcacatgtgttgatgggattaactccttctcttgcttgtgccctgtgggtttcactggatccttctgcctccatgagatcaatgaatgcagctctcatccatgcctgaatgagggaacgtgtgttgatggcctgggtacctaccgctgcagctgccccctgggctacactgggaaaaactgtcagaccctggtgaatctctgcagtcggtctccatgtaaaaacaaaggtacttgcgttcagaaaaaagcagagtcccagtgcctatgtccatctggatgggctggtgcctattgtgacgtgcccaatgtctcttgtgacatagcagcctccaggagaggtgtgcttgttgaacacttgtgccagcactcaggtgtctgcatcaatgctggcaacacgcattactgtcagtgccccctgggctatactgggagctactgtgaggagcaactcgatgagtgtgcgtccaacccctgccagcacggggcaacatgcagtgacttcattggtggatacagatgcgagtgtgtcccaggctatcagggtgtcaactgtgagtatgaagtggatgagtgccagaatcagccctgccagaatggaggcacctgtattgaccttgtgaaccatttcaagtgctcttgcccaccaggcactcggggcctactctgtgaagagaacattgatgactgtgcccggggtccccattgccttaatggtggtcagtgcatggataggattggaggctacagttgtcgctgcttgcctggctttgctggggagcgttgtgagggagacatcaacgagtgcctctccaacccctgcagctctgagggcagcctggactgtatacagctcaccaatgactacctgtgtgtttgccgtagtgcctttactggccggcactgtgaaaccttcgtcgatgtgtgtccccagatgccctgcctgaatggagggacttgtgctgtggccagtaacatgcctgatggtttcatttgccgttgtcccccgggattttccggggcaaggtgccagagcagctgtggacaagtgaaatgtaggaagggggagcagtgtgtgcacaccgcctctggaccccgctgcttctgccccagtccccgggactgcgagtcaggctgtgccagtagcccctgccagcacgggggcagctgccaccctcagcgccagcctccttattactcctgccagtgtgccccaccattctcgggtagccgctgtgaactctacacggcaccccccagcacccctcctgccacctgtctgagccagtattgtgccgacaaagctcgggatggcgtctgtgatgaggcctgcaacagccatgcctgccagtgggatgggggtgactgttctctcaccatggagaacccctgggccaactgctcctccccacttccctgctgggattatatcaacaaccagtgtgatgagctgtgcaacacggtcgagtgcctgtttgacaactttgaatgccaggggaacagcaagacatgcaagtatgacaaatactgtgcagaccacttcaaagacaaccactgtgaccaggggtgcaacagtgaggagtgtggttgggatgggctggactgtgctgctgaccaacctgagaacctggcagaaggtaccctggttattgtggtattgatgccacctgaacaactgctccaggatgctcgcagcttcttgcgggcactgggtaccctgctccacaccaacctgcgcattaagcgggactcccagggggaactcatggtgtacccctattatggtgagaagtcagctgctatgaagaaacagaggatgacacgcagatcccttcctggtgaacaagaacaggaggtggctggctctaaagtctttctggaaattgacaaccgccagtgtgttcaagactcagaccactgcttcaagaacacggatgcagcagcagctctcctggcctctcacgccatacaggggaccctgtcataccctcttgtgtctgtcgtcagtgaatccctgactccagaacgcactcagctcctctatctccttgctgttgctgttgtcatcattctgtttattattctgctgggggtaatcatggcaaaacgaaagcgtaagcatggctctctctggctgcctgaaggtttcactcttcgccgagatgcaagcaatcacaagcgtcgtgagccagtgggacaggatgctgtggggctgaaaaatctctcagtgcaagtctcagaagctaacctaattggtactggaacaagtgaacactgggtcgatgatgaagggccccagccaaagaaagtaaaggctgaagatgaggccttactctcagaagaagatgaccccattgatcgacggccatggacacagcagcaccttgaagctgcagacatccgtaggacaccatcgctggctctcacccctcctcaggcagagcaggaggtggatgtgttagatgtgaatgtccgtggcccagatggctgcaccccattgatgttggcttctctccgaggaggcagctcagatttgagtgatgaagatgaagatgcagaggactcttctgctaacatcatcacagacttggtctaccagggtgccagcctccaggcccagacagaccggactggtgagatggccctgcaccttgcagcccgctactcacgggctgatgctgccaagcgtctcctggatgcaggtgcagatgccaatgcccaggacaacatgggccgctgtccactccatgctgcagtggcagctgatgcccaaggtgtcttccagattctgattcgcaaccgagtaactgatctagatgccaggatgaatgatggtactacacccctgatcctggctgcccgcctggctgtggagggaatggtggcagaactgatcaactgccaagcggatgtgaatgcagtggatgaccatggaaaatctgctcttcactgggcagctgctgtcaataatgtggaggcaactcttttgttgttgaaaaatggggccaaccgagacatgcaggacaacaaggaagagacacctctgtttcttgctgcccgggaggggagctatgaagcagccaagatcctgttagaccattttgccaatcgagacatcacagaccatatggatcgtcttccccgggatgtggctcgggatcgcatgcaccatgacattgtgcgccttctggatgaatacaatgtgaccccaagccctccaggcaccgtgttgacttctgctctctcacctgtcatctgtgggcccaacagatctttcctcagcctgaagcacaccccaatgggcaagaagtctagacggcccagtgccaagagtaccatgcctactagcctccctaaccttgccaaggaggcaaaggatgccaagggtagtaggaggaagaagtctctgagtgagaaggtccaactgtctgagagttcagtaactttatcccctgttgattccctagaatctcctcacacgtatgtttccgacaccacatcctctccaatgattacatcccctgggatcttacaggcctcacccaaccctatgttggccactgccgcccctcctgccccagtccatgcccagcatgcactatctttttctaaccttcatgaaatgcagcctttggcacatggggccagcactgtgcttccctcagtgagccagttgctatcccaccaccacattgtgtctccaggcagtggcagtgctggaagcttgagtaggctccatccagtcccagtcccagcagattggatgaaccgcatggaggtgaatgagacccagtacaatgagatgtttggtatggtcctggctccagctgagggcacccatcctggcatagctccccagagcaggccacctgaagggaagcacataaccacccctcgggagcccttgccccccattgtgactttccagctcatccctaaaggcagtattgcccaaccagcgggggctccccagcctcagtccacctgccctccagctgttgcgggccccctgcccaccatgtaccagattccagaaatggcccgtttgcccagtgtggctttccccactgccatgatgccccagcaggacgggcaggtagctcagaccattctcccagcctatcatcctttcccagcctctgtgggcaagtaccccacacccccttcacagcacagttatgcttcctcaaatgctgctgagcgaacacccagtcacagtggtcacctccagggtgagcatccctacctgacaccatccccagagtctcctgaccagtggtcaagttcatcaccccactctgcttctgactggtcagatgtgaccaccagccctacccctgggggtgctggaggaggtcagcggggacctgggacacacatgtctgagccaccacacaacaacatgcaggtttatgcgtgagagagtccacctccagtgtagagacataactgacttttgtaaatgctgctgaggaacaaatgaaggtcatccgggagagaaatgaagaaatctctggagccagcttctagaggtaggaaagagaagatgttcttattcagataatgcaagagaagcaattcgtcagtttcactgggtatctgcaaggcttattgattattctaatctaataagacaagtttgtggaaatgcaagatgaatacaagccttgggtccatgtttactctcttctatttggagaataagatggatgcttattgaagcccagacattcttgcagcttggactgcattttaagccctgcaggcttctgccatatccatgagaagattctacactagcgtcctgttgggaattatgccctggaattctgcctgaattgacctacgcatctcctcctccttggacattcttttgtcttcatttggtgcttttggttttgcacctctccgtgattgtagccctaccagcatgttatagggcaagacctttgtgcttttgatcattctggcccatgaaagcaactttggtctcctttcccctcctgtcttcccggtatcccttggagtctcacaaggtttactttggtatggttctcagcacaaacctttcaagtatgttgtttctttggaaaatggacatactgtattgtgttctcctgcatatatcattcctggagagagaaggggagaagaatacttttcttcaacaaattttgggggcaggagatcccttcaagaggctgcaccttaatttttcttgtctgtgtgcaggtcttcatataaactttaccaggaagaagggtgtgagtttgttgtttttctgtgtatgggcctggtcagtgtaaagttttatccttgatagtctagttactatgaccctccccacttttttaaaaccagaaaaaggtttggaatgttggaatgaccaagagacaagttaactcgtgcaagagccagttacccacccacaggtccccctacttcctgccaagcattccattgactgcctgtatggaacacatttgtcccagatctgagcattctaggcctgtttcactcactcacccagcatatgaaactagtcttaactgttgagcctttcctttcatatccacagaagacactgtctcaaatgttgtacccttgccatttaggactgaactttccttagcccaagggacccagtgacagttgtcttccgtttgtcagatgatcagtctctactgattatcttgctgcttaaaggcctgctcaccaatctttctttcacaaaagttggacttgttttctatgatccaaaacagccctataagaaggttggaaaaggaggaactatatagcagcctttgctattttctgctaccatttcttttcctctgaagcggccatgacattccctttggcaactaacgtagaaactcaacagaacat

SEQ ID NO: 911 - protein, 2087 aa, Homo sapiens
MCPEGKAGLLCHLDDACISNPCHKGALCDTNPLNGQYICTCPQGYKGADCTEDVDECAMANSNPCEHAGKCVNTDGAFHCECLKGYAGPRCEMDINECHSDPCQNDATCLDKIGGFTCLCMPGFKGVHCELEINECQSNPCVNNGQCVDKVNRFQCLCPPGFTGPVCQIDIDDCSSTPCLNGAKCIDHPNGYECQCATGFTGVLCEENIDNCDPDPCHHGQCQDGIDSYTCICNPGYMGAICSDQIDECSPCLNDGRCIDLVNGYQCNCQPGTSGVNCEINFDDCNPCIHGICMDGINRYSCVCSPGFTGQRCNIDIDECNPCRKGATCINGVNGFRCICPEGPHHPSCQVNECLSNPCIHGNCTGGLSGYKCLCDAGWVGINCEVDKNECLSNPCQNGGTCDNLVNGYRCTCKKGFKGYNCQVNIDECNPCLNQGTCFDDISGYTCHCVLPYTGKNCQTVLAPCSPNPCENAAVCKESPNFESYTCLCAPGWQGQRCTIDIDECISKPCMNHGLCHNTQGSYMCECPPGFSGMDCEEDIDDCLANPCQNGGSCMDGVNTFSCLCLPGFTGDKCQTDMNECLSEPCKNGGTCSDYVNSYTCKCQAGFDGVHCENNINECTESSCFNGGTCVDGINSFSCLCPVGFTGSFCLHEINECSSHPCLNEGTCVDGLGYCSCPLGYTGKNCQTLVNLCSRSPCKNKGTCVQKKAESQCLCPSGWAGAYCDVPNVSCDIAASRRGVLVEHLCQHSGVCINAGNTHYCQCPLGYTGSYCEEQLDECNPCQHGATCSDFIGGYRCECVPGYQGVNCEYEVDECQNQPCQNGGTCIDLVNHFKCSCPPGTRGLLCEENIDDCRPHCLNGGQCMDRIGGYSCRCLPGFAGERCEGDINECLSNPCSSEGSLDCIQLTNDYLCVCRSAFTGRHCETFVDVCPQMPCLNGGTCAVNMPDGFICRCPPGFSGARCQSSCGQVKCRKGEQCVHTASGPRCFCPSPRDCESGCASSPCQHGGSCHPQRQPPYYSCQCAPPFSGSRCELYTAPPSTPPATCLSQYCADKARDGVCDEACNSHACQWDGGDCSLTMENPWANCSSPLPCWDYINNQCDELCNTVECLFDNFECQGNSKTCKYDKYCADHFKDNHCDQGCNSEECGWDGLDCAADQPENLAEGTLVIVVLMPPEQLLQDARSFLRALGTLLHTNLRIKRDSQGELMVYPYYGEKSAAMKKQRMTRRSLPGEQEQEVAGSKVFLEIDNRQCVQDSDHCFKNTDAAAALLASHAIQGTLSYPLVSVVSESLTPERTQLLYLLAVAVVIILFIILLGVIMAKRKRKHGSLWLPEGFTLRRDNHKRREPVGQDAVGLKNLSVQVSEANLIGTGTSEHWVDDEGPQPKKVKAEDEALLSEEDDPIDRRPWTQQHLEAADIRRTPSLALTPPQAEQEVDVLDVNVRGPDGCTPLMLASLRGGSSDLSDEDEDAEDSSANIITDLVYQGASLQAQTDRTGEMALHLAARYSRADAAKRLLDAGADANAQDNMGRCPLHAAVAADAQGVFQILIRNRVTDLDARMNDGTTPLILAARLAVEGMVAELINCQADVNAVDDHGKSALHWAAAVNNVEATLLLLKNGANRDMQDNKEETPLFLAAREGSYEAAKILLDHFANRDITDHMDRLPRDVARDRMHHDIVRLLDEYNVTPSPPGTVLTSALSPVICGPNRSFLSLKHTPMGKKSRRPSAKSTMPTSLPNLAKEAKDAKGSRRKKSLSEKVQLSESSVTLSPVDSLESPHTYVSDTTSSPMITSPGILQDNPMLATAAPPAPVHAQHALSFSNLHEMQPLAHGASTVLPSVSQLLSHHHIVSPGSGSAGSLSRLHPVPVPADWMNRMEVNETQYNEMFGMVLAPAEGTHPGIAPQSRPPEGKHITTPREPLPPIVTFQLIPKGSIAQPAGAPQPQSTCPPAVAGPLPTMYQIPEMARLPSVAFPTAMMPQQDGQVAQTILPAYHPFPASVGKYPTPPSQHSYASSNAAERTPSHSGHLQGEHPYLTPSPESPDQWSSSSPHSASDWSDVTTSPTPGGAGGGQRGPGTHMSEPPHNNMQVYA

SEQ ID NO: 912 - DNA, 10452 bp, Homo sapiens
atttcatcattttcatttgttcttcatttaccaggttttgaagggagcacctgtgagaggaatattgatgactgccctaaccacaggtgtcagaatggaggggtttgtgtggatggggtcaacacttacaactgccgctgtcccccacaatggacaggacagttctgcacagaggatgtggatgaatgcctgctgcagcccaatgcctgtcaaaatgggggcacctgtgccaaccgcaatggaggctatggctgtgtatgtgtcaacggctggagtggagatgactgcagtgagaacattgatgattgtgccttcgcctcctgtactccaggctccacctgcatcgaccgtgtggcctccttctcttgcatgtgcccagaggggaaggcaggtctcctgtgtcatctggatgatgcatgcatcagcaatccttgccacaagggggcactgtgtgacaccaaccccctaaatgggcaatatatttgcacctgcccacaaggctacaaaggggctgactgcacagaagatgtggatgaatgtgccatggccaatagcaatccttgtgagcatgcaggaaaatgtgtgaacacggatggcgccttccactgtgagtgtctgaagggttatgcaggacctcgttgtgagatggacatcaatgagtgccattcagacccctgccagaatgatgctacctgtctggataagattggaggcttcacatgtctgtgcatgccaggtttcaaaggtgtgcattgtgaattagaaataaatgaatgtcagagcaacccttgtgtgaacaatgggcagtgtgtggataaagtcaatcgtttccagtgcctgtgtcctcctggtttcactgggccagtttgccagattgatattgatgactgttccagtactccgtgtctgaatggggcaaagtgtatcgatcacccgaatggctatgaatgccagtgtgccacaggtttcactggtgtgttgtgtgaggagaacattgacaactgtgaccccgatccttgccaccatggtcagtgtcaggatggtattgattcctacacctgcatctgcaatcccgggtacatgggcgccatctgcagtgaccagattgatgaatgttacagcagcccttgcctgaacgatggtcgctgcattgacctggtcaatggctaccagtgcaactgccagccaggcacgtcaggggttaattgtgaaattaattttgatgactgtgcaagtaacccttgtatccatggaatctgtatggatggcattaatcgctacagttgtgtctgctcaccaggattcacagggcagagatgtaacattgacattgatgagtgtgcctccaatccctgtcgcaagggtgcaacatgtatcaacggtgtgaatggtttccgctgtatatgccccgagggaccccatcaccccagctgctactcacaggtgaacgaatgcctgagcaatccctgcatccatggaaactgtactggaggtctcagtggatataagtgtctctgtgatgcaggctgggttggcatcaactgtgaagtggacaaaaatgaatgcctttcgaatccatgccagaatggaggaacttgtgacaatctggtgaatggatacaggtgtacttgcaagaagggctttaaaggctataactgccaggtgaatattgatgaatgtgcctcaaatccatgcctgaaccaaggaacctgctttgatgacataagtggctacacttgccactgtgtgctgccatacacaggcaagaattgtcagacagtattggctccctgttccccaaacccttgtgagaatgctgctgtttgcaaagagtcaccaaattttgagagttatacttgcttgtgtgctcctggctggcaaggtcagcggtgtaccattgacattgacgagtgtatctccaagccctgcatgaaccatggtctctgccataacacccagggcagctacatgtgtgaatgtccaccaggcttcagtggtatggactgtgaggaggacattgatgactgccttgccaatccttgccagaatggaggttcctgtatggatggagtgaatactttctcctgcctctgccttccgggtttcactggggataagtgccagacagacatgaatgagtgtctgagtgaaccctgtaagaatggagggacctgctctgactacgtcaacagttacacttgcaagtgccaggcaggatttgatggagtccattgtgagaacaacatcaatgagtgcactgagagctcctgtttcaatggtggcacatgtgttgatgggattaactccttctcttgcttgtgccctgtgggtttcactggatccttctgcctccatgagatcaatgaatgcagctctcatccatgcctgaatgagggaacgtgtgttgatggcctgggtacctaccgctgcagctgccccctgggctacactgggaaaaactgtcagaccctggtgaatctctgcagtcggtctccatgtaaaaacaaaggtacttgcgttcagaaaaaagcagagtcccagtgcctatgtccatctggatgggctggtgcctattgtgacgtgcccaatgtctcttgtgacatagcagcctccaggagaggtgtgcttgttgaacacttgtgccagcactcaggtgtctgcatcaatgctggcaacacgcattactgtcagtgccccctgggctatactgggagctactgtgaggagcaactcgatgagtgtgcgtccaacccctgccagcacggggcaacatgcagtgacttcattggtggatacagatgcgagtgtgtcccaggctatcagggtgtcaactgtgagtatgaagtggatgagtgccagaatcagccctgccagaatggaggcacctgtattgaccttgtgaaccatttcaagtgctcttgcccaccaggcactcggggcctactctgtgaagagaacattgatgactgtgcccggggtccccattgccttaatggtggtcagtgcatggataggattggaggctacagttgtcgctgcttgcctggctttgctggggagcgttgtgagggagacatcaacgagtgcctctccaacccctgcagctctgagggcagcctggactgtatacagctcaccaatgactacctgtgtgtttgccgtagtgcctttactggccggcactgtgaaaccttcgtcgatgtgtgtccccagatgccctgcctgaatggagggacttgtgctgtggccagtaacatgcctgatggtttcatttgccgttgtcccccgggattttccggggcaaggtgccagagcagctgtggacaagtgaaatgtaggaagggggagcagtgtgtgcacaccgcctctggaccccgctgcttctgccccagtccccgggactgcgagtcaggctgtgccagtagcccctgccagcacgggggcagctgccaccctcagcgccagcctccttattactcctgccagtgtgccccaccattctcgggtagccgctgtgaactctacacggcaccccccagcacccctcctgccacctgtctgagccagtattgtgccgacaaagctcgggatggcgtctgtgatgaggcctgcaacagccatgcctgccagtgggatgggggtgactgttctctcaccatggagaacccctgggccaactgctcctccccacttccctgctgggattatatcaacaaccagtgtgatgagctgtgcaacacggtcgagtgcctgtttgacaactttgaatgccaggggaacagcaagacatgcaagtatgacaaatactgtgcagaccacttcaaagacaaccactgtgaccaggggtgcaacagtgaggagtgtggttgggatgggctggactgtgctgctgaccaacctgagaacctggcagaaggtaccctggttattgtggtattgatgccacctgaacaactgctccaggatgctcgcagcttcttgcgggcactgggtaccctgctccacaccaacctgcgcattaagcgggactcccagggggaactcatggtgtacccctattatggtgagaagtcagctgctatgaagaaacagaggatgacacgcagatcccttcctggtgaacaagaacaggaggtggctggctctaaagtctttctggaaattgacaaccgccagtgtgttcaagactcagaccactgcttcaagaacacggatgcagcagcagctctcctggcctctcacgccatacaggggaccctgtcataccctcttgtgtctgtcgtcagtgaatccctgactccagaacgcactcagctcctctatctccttgctgttgctgttgtcatcattctgtttattattctgctgggggtaatcatggcaaaacgaaagcgtaagcatggctctctctggctgcctgaaggtttcactcttcgccgagatgcaagcaatcacaagcgtcgtgagccagtgggacaggatgctgtggggctgaaaaatctctcagtgcaagtctcagaagctaacctaattggtactggaacaagtgaacactgggtcgatgatgaagggccccagccaaagaaagtaaaggctgaagatgaggccttactctcagaagaagatgaccccattgatcgacggccatggacacagcagcaccttgaagctgcagacatccgtaggacaccatcgctggctctcacccctcctcaggcagagcaggaggtggatgtgttagatgtgaatgtccgtggcccagatggctgcaccccattgatgttggcttctctccgaggaggcagctcagatttgagtgatgaagatgaagatgcagaggactcttctgctaacatcatcacagacttggtctaccagggtgccagcctccaggcccagacagaccggactggtgagatggccctgcaccttgcagcccgctactcacgggctgatgctgccaagcgtctcctggatgcaggtgcagatgccaatgcccaggacaacatgggccgctgtccactccatgctgcagtggcagctgatgcccaaggtgtcttccagattctgattcgcaaccgagtaactgatctagatgccaggatgaatgatggtactacacccctgatcctggctgcccgcctggctgtggagggaatggtggcagaactgatcaactgccaagcggatgtgaatgcagtggatgaccatggaaaatctgctcttcactgggcagctgctgtcaataatgtggaggcaactcttttgttgttgaaaaatggggccaaccgagacatgcaggacaacaaggaagagacacctctgtttcttgctgcccgggaggggagctatgaagcagccaagatcctgttagaccattttgccaatcgagacatcacagaccatatggatcgtcttccccgggatgtggctcgggatcgcatgcaccatgacattgtgcgccttctggatgaatacaatgtgaccccaagccctccaggcaccgtgttgacttctgctctctcacctgtcatctgtgggcccaacagatctttcctcagcctgaagcacaccccaatgggcaagaagtctagacggcccagtgccaagagtaccatgcctactagcctccctaaccttgccaaggaggcaaaggatgccaagggtagtaggaggaagaagtctctgagtgagaaggtccaactgtctgagagttcagtaactttatcccctgttgattccctagaatctcctcacacgtatgtttccgacaccacatcctctccaatgattacatcccctgggatcttacaggcctcacccaaccctatgttggccactgccgcccctcctgccccagtccatgcccagcatgcactatctttttctaaccttcatgaaatgcagcctttggcacatggggccagcactgtgcttccctcagtgagccagttgctatcccaccaccacattgtgtctccaggcagtggcagtgctggaagcttgagtaggctccatccagtcccagtcccagcagattggatgaaccgcatggaggtgaatgagacccagtacaatgagatgtttggtatggtcctggctccagctgagggcacccatcctggcatagctccccagagcaggccacctgaagggaagcacataaccacccctcgggagcccttgccccccattgtgactttccagctcatccctaaaggcagtattgcccaaccagcgggggctccccagcctcagtccacctgccctccagctgttgcgggccccctgcccaccatgtaccagattccagaaatggcccgtttgcccagtgtggctttccccactgccatgatgccccagcaggacgggcaggtagctcagaccattctcccagcctatcatcctttcccagcctctgtgggcaagtaccccacacccccttcacagcacagttatgcttcctcaaatgctgctgagcgaacacccagtcacagtggtcacctccagggtgagcatccctacctgacaccatccccagagtctcctgaccagtggtcaagttcatcaccccactctgcttctgactggtcagatgtgaccaccagccctacccctgggggtgctggaggaggtcagcggggacctgggacacacatgtctgagccaccacacaacaacatgcaggtttatgcgtgagagagtccacctccagtgtagagacataactgacttttgtaaatgctgctgaggaacaaatgaaggtcatccgggagagaaatgaagaaatctctggagccagcttctagaggtaggaaagagaagatgttcttattcagataatgcaagagaagcaattcgtcagtttcactgggtatctgcaaggcttattgattattctaatctaataagacaagtttgtggaaatgcaagatgaatacaagccttgggtccatgtttactctcttctatttggagaataagatggatgcttattgaagcccagacattcttgcagcttggactgcattttaagccctgcaggcttctgccatatccatgagaagattctacactagcgtcctgttgggaattatgccctggaattctgcctgaattgacctacgcatctcctcctccttggacattcttttgtcttcatttggtgcttttggttttgcacctctccgtgattgtagccctaccagcatgttatagggcaagacctttgtgcttttgatcattctggcccatgaaagcaactttggtctcctttcccctcctgtcttcccggtatcccttggagtctcacaaggtttactttggtatggttctcagcacaaacctttcaagtatgttgtttctttggaaaatggacatactgtattgtgttctcctgcatatatcattcctggagagagaaggggagaagaatacttttcttcaacaaattttgggggcaggagatcccttcaagaggctgcaccttaatttttcttgtctgtgtgcaggtcttcatataaactttaccaggaagaagggtgtgagtttgttgtttttctgtgtatgggcctggtcagtgtaaagttttatccttgatagtctagttactatgaccctccccacttttttaaaaccagaaaaaggtttggaatgttggaatgaccaagagacaagttaactcgtgcaagagccagttacccacccacaggtccccctacttcctgccaagcattccattgactgcctgtatggaacacatttgtcccagatctgagcattctaggcctgtttcactcactcacccagcatatgaaactagtcttaactgttgagcctttcctttcatatccacagaagacactgtctcaaatgttgtacccttgccatttaggactgaactttccttagcccaagggacccagtgacagttgtcttccgtttgtcagatgatcagtctctactgattatcttgctgcttaaaggcctgctcaccaatctttctttcacaccgtgtggtccgtgttactggtatacccagtatgttctcactgaagacatggactttatatgttcaagtgcaggaattggaaagttggacttgttttctatgatccaaaacagccctataagaaggttggaaaaggaggaactatatagcagcctttgctattttctgctaccatttcttttcctctgaagcggccatgacattccctttggcaactaacgtagaaactcaacagaacattttcctttcctagagtcaccttttagatgataatggacaactatagacttgctcattgttcagactgattgcccctcacctgaatccactctctgtattcatgctcttggcaatttctttgactttcttttaagggcagaagcattttagttaattgtagataaagaatagttttcttcctcttctccttgggccagttaataattggtccatggctacactgcaacttccgtccagtgctgtgatgcccatgacacctgcaaaataagttctgcctgggcattttgtagatattaacaggtgaattcccgactcttttggtttgaatgacagttctcattccttctatggctgcaagtatgcatcagtgcttcccacttacctgatttgtctgtcggtggccccatatggaaaccctgcgtgtctgttggcataatagtttacaaatggttttttcagtcctatccaaatttattgaaccaacaaaaataattacttctgccctgagataagcagattaagtttgttcattctctgctttattctctccatgtggcaacattctgtcagcctctttcatagtgtgcaaacattttatcattctaaatggtgactctctgcccttggacccatttattattcacagatggggagaacctatctgcatggacctctgtggaccacagcgtacctgcccctttctgccctcctgctccagccccacttctgaaagtatcagctactgatccagccactggatattttatatcctcccttttccttaagcacaatgtcagaccaaattgcttgtttctttttcttggactactttaatttggatcctttgggtttggagaaagggaatgtgaaagctgtcattacagacaacaggtttcagtgatgaggaggacaacactgcctttcaaactttttactgatctcttagattttaagaactcttgaattgtgtggtatctaataaaagggaaggtaagatggataatcactttctcatttgggttctgaattggagactcagtttttatgagacacatcttttatgccatgtatagatcctcccctgctatttttggtttatttttattgttataaatgctttctttctttgactcctcttctgcctgcctttggggataggtttttttgtttgtttatttgcttcctctgttttgttttaagcatcattttcttatgtgaggtggggaagggaaaggtatgagggaaagagagtctgagaattaaaatattttagtataagcaattggctgtgatgctcaaatccattgcatcctcttattgaatttgccaatttgtaatttttgcataataaagaaccaaaggtgtaatgttttgttgagaggtggtttagggattttggccctaaccaatacattgaatgtatgatgactatttgggaggacacatttatgtacccagaggcccccactaataagtggtactatggttacttccttgtgtacatttctcttaaaagtgatattatatctgtttgtatgagaaacccagtaaccaataaaatgaccgcatattcctgactaaacgtagtaaggaaaatgcacactttgtttttacttttccgtttcattctaaaggtagttaagatgaaatttatatgaaagcatttttatcacaaaataaaaaaggtttgccaagctcagtggtgttgtattttttattttccaatactgcatccatggcctggcagtgttacctcatgatgtcataatttgctgagagagcaaattttcttttctttctgaatcccacaaagcctagcaccaaacttctttttttcttcctttaattagatcataaataaatgatcctggggaaaaagcatctgtcaaataggaaacatcacaaaactgagcactcttctgtgcactagccatagctggtgacaaacagatggttgctcagggacaaggtgccttccaatggaaatgcgaagtagttgctatagcaagaattgggaactgggatataagtcataatattaattatgctgttatgtaaatgattggtttgtaacattccttaagtgaaatttgtgtagaacttaatatacaggattataaaataatattttgtgtataaatttgttataagttcacattcatacatttatttataaagtcagtgagatatttgaacatgaa

SEQ ID NO: 913 - protein, 2087 aa, Homo sapiens; identical to SEQ ID NO: 911

SEQ ID NO: 914 - DNA, 23101 bp, Mus musculus
  misc_feature (1)...(23101): n = A,T,C or G
atggggttatttgaatttctggagtccagcttcttgtatacaatatatttgtatatattgtgccacattttcactatccactcatcagctgagtacatttaagtcatttccatatcctagctattgagaatagagcagcaatgatcatgactgtacaaatatcaagtcctatgcagggattgctgtcaaggattggtttagctagattgtatggaagatctttctccacagtaatttccatggtgcctgtatgagtttgcaatcccaccaacattacgtgagggttcccttttttataacccccacaagcattggctatcaattgttttcattatcttaaccatctcaagctgcttttaatttgcatttctctatttgctaaggatactgacacttttaaagatatctcttaaccatttttacttctttttttgagaactctctgtttagatctctagccttttttaaaactgggtcattacttttttgactttgttttttatatattctggatattaatcctctatcagatagatacatattggcaaaaaaaaataccctcacctaatctatgggcttcctcttcattggttgattgttttactatatataagctttttaattttatgaagacctatttgttaattgttggccttaattcctgagtgagggaagtcctgtgcagtcctttcctgtacttatatcttgaagagtatgattctgttttcatacagaagttccaggatttcaagctttgcactgaggcctggaatccatttggagttgatttttgtacaagctgtaaatatgaatctaattcatcctactgcacgtaggcatcctgtttctccagctcccattattgaccacatttttgtcttcgttctcttcccagtcataccttaactatacattagcatagcacaattaagattttgttttgattggctttggggctttgttttgttatgttttgaagtactgggaattgaatcaaggccctcacatatgcaatcaagtgctctaccattaaattatatcccaggcctttattcaaagtctctctctgtttttttagacagcatctccttaagttgcctaggctggtcttgaatttgtgatcttacccaccttctcagagtgctggaattacaagagtttaccaccacatcttgctgggacttatgacacacttcatgtactctgcctgctgataaaattccttatagcattgatcttgttaagtatgggccataatggttgaggaaggaaaagctggcatgctcattcctgcagaaggagcctgtagaacctccagaggaatagcatttcatcctttagagcttctcacaatgcttagatacaagaggatttgatagcagacctcagaggaagggatgcccaggaaagtgtattactgtattagtgcattgctgagaaaccagaaatgaaaatgaccttacatgtggccagggaaggtaggcaggcatagtgggcacaggtattatagcagaaaagggaaataaagctggggatcatggaggaacacatgaatcttaaaaagcaaattgtggagtaagtcaagtaacttatccaataattagaaacttcgtgtaatgccctgaccctgccactaactaaatttagaaccttggatatgagttacttaatatactgagaccaaagtcattctgcctgtaaactgaatatgtcgggtaaatataaacaacaaaaatttactgcaacaaacatttttgagtgcctactaactgccaagtaccaacttttgaagagggaatgatgattatacagcatgctttttggttcattttataaactatgttttatagacaatggggttaaataaaagcaagagagacctactgacactttgagagccagaaaggacaatggttctgtatttttctaccagaaatgcgagtgtcccagtgtctatcacctttctattgtgtttatgttgtacagagaatataaacaagcgaagttacagaagatctgttcgatgtaaggtgaacaattgagttttcatatgtataatctcatttaacgctcatagcatgtggcttagatatttgcttcatattttgggtgggaaattggaactgagagaggtaaaagtgatttctcaaggttactttaatcccgggtaacttgaatccaaggctagacctcttcctgccacactactacatcagcttgaaaatggcatagtgataatttatacagctggtatgtatgtgtcagttaattcattatatggcttgtttaaataactatgcgagcaatacatcttgctataaactggttcagtacttccagctctgcctgccaacctccatgattcaatcatgaggcattctagaaatctgtggggctaataaggctacagaaggaagatgagaatgacggaatgtggtgcaagggggatacactcagctagagaacaggttcccaaggaagggccagcttcccatgtcagagattctcaagaggaagaaggaaatttggatgttatctgggaagacttccttttactctactgggtgatgggaggccatgggaatgagcgtggcaatagcaatactgctaagtggatggtagaagctgtatagctccaggagggccatctagcataaataaagaagtcatacattgaagggttcaactcctgggaagcctactaaatgataaaaaaagtgaagaatgagagaaagaaagaaagaaagaaagaaagaaagaaagaaagaaagaaagaaagaagagaaannnnnnnnnnnnnnnnnnnnnnnnnnnnnnnnnnnnnnnnnnnnnnnnnnnnnnnnnnnnnnnnnnnnnnnnnnnnnnnnggagggagggaaggcaggaaggaaggaaggaaggaaggaaggaaggaaggaagaaagaaagaaagaaagaaagaaagaaagaaagaaagaaagaaagaaagaaagaaagaaagaaagaaagaaatcaagtaaggcagatagagttcaaaataaggcttcaatctccatagagaaaataaactagtaacaaaacctagatagtagctcagcaatgatgtggtgcaaagcacagtaagagttcaaaccctcctgaagttttataggtggtggggagtccacctccgactctccaggtctagagcaacaagaaagattcaagacccacaaccagggatggcaggaaggaaagggttttctaacaatgtcctacaagtttgcttagaatgagctttagaattgaatgcccctaatctggaaatgaagatgttcagtgcataggctgcatctgagtctggtggggaaggaaacttcatatcatgcttctactttatgtcaaccattttataagcaaacaatattaattgcattgttatcttgggtatggtgaagtccccaaaggactgtattcattatttgtcattataatagttgatattaattcattatagacttttatacactttcattaatgttatgtcattgaaaatgcaataaaattgtaatgctatcttactggtctattcttgaattgctttgtcaacaccattgcaaaaccaatgaaaaggtagtaacggtgtaagattaagtgtagtttaataaataggtttcagctttacagactaacaatacaaaaaaaaaaaaaacctcaatcaaatttgcccttgactttataatgtttcaacaggttctcagaaatgtttgtaaaagcttttcaatttcctgttaacttatattcaatagttcacattaatgtcagctcaatcacatgactaaaataattcctttcagctcttgaaataaagagcaaattgcagctcatccagggccttacaacagagtagttcacaggagacacatgaggacacaaattacaggaattctttagaaatctttaaaacatcctttgtcaaatccatttggagaaaaaccctggtgacagcattatagtactgtttttagtgttccccttgccagaaaaatgtatgctcagtgatgctcttgaaaccattctattgtctctactcagtgttgagcgttgagaagattcacatctgcaaatgaataattgctacataccaggagccttcacggcctatctcatcattaactgcatctcatctatgattagaggtgactgtgcctgcttttcaataaattagccagaatcagaaaatgccatgcaggtgtccctgcgcctgcttattttctctcgtgtgcagaggctcatgaagaatgcagtgtgcctacttaaaatgcttggtctgatactgtgacctggcttggcatatttgctgacaggattttcatcttccctgaacagaaatgtttttctaaaaaatcactctgccgtgtgagaatatagactgctgggtcattctgcgggacagacactcaagagccctcttagcctcagtcaggacacagatctgaatctatttttgtaataacacacagagtctcttctttgaaaaaaaaatcatacaaattcaggtggatccatttatcatcttttcattgaagttaagtccagtaactccttcattatagtctatcatgtttgaattggtgcttcatagtcatttttctgctgctgtgctatttcaacagcatttctcctgtagcaacataacatggagagtggaaatataaatatgaacacacagacatctatggcttgaggatgtggacttctcagtgtgaatgctgtttctatatcttcctacccatgtcttatcactataatacttggtgttatacatgtgcctctctcaccctgggctcagattctctacctgtgaaatggcatagtaggaatactgcctgccttgtaggactgtggcaggctgttatatctatctggtgcctgcccattgtaacagctctcttcctgagtactttctgaagggtcataatggctgacagacagagagtgtaaagatctcaaaagaagtagcatgtaagcatggattagaatatttcattcaccagtaggataaaagcaggagtatccagcaaactagagcatacgcagctagcatgagcagaggtctgtgtgtaagtgatacctgctcaggtcagcacagggtgcagggctgctgctagcataggtcaagagcagacggcatcacagcaatgcccaaaacaatgtgatccactctaggtttacaaaaaataactctgatacatcctagagaatgaaatacatgaaggaaactgaaaatgggaagtcttctatgaaaccattcacatagcctaaacagggccgtggtagtgaaaggggggaggtgaggacagagttgacagggacttggaggcaacatgaaaggctcttgctgacaaactggacacaggagcatttgaaggaagtggggatgactccgtatccagaactgagaaagaaaaacaggaagggaagcaagttggggaggaacgataatgagttgggtgctataaatactaagtctgggtttatctgcaggaagaaaatcaagtcggggggttgaagcacatttctggcattcaggataggctcattcagggtggtagggaaatggaaaagtagagaaatgggaagaaagtagaattaaaaaaagaagaagaaaacaaagaacccttgcatatctgcatggtctagctatttccagaactggatggatgccaatccaaaacaactcttctatactaacaggcttgcccctgtacgagcatgcctatatactcacccctcaccttttctttcttctattaagtatacattaagcattcaatacatgccgagaactgttcaggatttgaaagacacaaacagtgaaaactcctgcctttagagtttctgtctttgtgcaagagacacttgtcaataggcaaacaaccaaataatcacaaaacatatctgctcaggattgaacttgtcaacagcctatcatgggtaggctctgaaggtcttaccattctccaaggtcatagctagatccttagctaagataatggtagctaggggtaggaggctcatgaggtctcacttctctctccctgataatggtcactgggaaagaaaacttattttcagtacttccaccactgatggagaatccataatcttgtacataatctcccttttaaaaaatcacagagagagagagagagaaagagagaaggagagagagagagagagagagagagagagagagagagagagagagagagagagggagggagagagagagagacccatgaacctagaatggagactagatggaggaagaagagaatcttttgggggtgggaagataggttaaggggagtgagtatgacttttaaaatacaatatgaagtatataaaattataattaaatctattgttatatataactaatacatgtaaataaaaacacaaaatataatttcagtaagttaatccaaggaggagagggaagcagattaacagagcacagatggaagagagaggaaagagtatttatttaaaatcaggcagtagcggtgagggaaggcattacttactttttacatgaagaaatactgttatggagcaagtcatgtgaaaatctagagaaagagcatttgagggacagggaagagaaagtatgaagactgatatagaaattaacttgatatgattcagaatcaccatgaccctgcctggcttcaatgggctgaatggctacaggttatatcctatgctatttctttactttcctgtattgttaattaaaagcattgaattcttgtattgttaactaaaggcacagacttatagcctttcttctgaattctgtgtaagttgaattcttaataacggacaggtctatatatttaaagttaggaaagcacaatgcctagtatgtgggtaattgttctttctccattcttgtatctataaatgtgagttaggatagttcctaatcctttcacatcctcagataccccagagctattcccagatgttgcttcccatctggtgaacaaatgcgaagctatttctattcctgctacggcaggtcagaagccaaacctatacgtagagcaaatagaaaggccaaatgctaagactcacttgctgcttgcaaacctgatggttttacttcgacttgaatactagggactgaaatgcaaagcaatcctgcacaggctctgagaagctgtttgctttgccacagttctacacttaaacattataataataatattattattatctcacaggggtgtcatgaggattaatgagacattatcaaatcactttgagctactcccctgggggtactaaataaatggtatgtgtccccctgaagtgccacttttgacattgatttgttgcaactggttctgctgtccaacagggctggaacgctcccaccagcccgtttcctataggcgaacaagtagccatcaaaaggcactggttttcagttcaaataaatatgaattgaaagagaacagtcagcaatcagaggcaaataggctgctctttgaaatccagtatttatcaagtgctcacggtgatcagcatgagtgtttcccagtgtaatataatactgcaaacactagatttgggaccgatccaagattttaggaccagccctgtcactaaccagctatgtgagctaaactgctaaacttctctagatctcaattctaagataagggctgtcctaataaggccatcaaggtcttccagacaaagcaaatggatgaaagcagtgagaataggcattctgaaagagagatactttacagcagggagaaacgtgtgaccatccatcacgggaccatcctctgctctcatctcctttgcctttgattaatattaatttcagtattaattcctgcaaaagtaagaataaatcatctccccagtcagacatagaagtgcaagaaacagtctttaaaaatagggtctttgcctctcagtgagctctccttgtgacactccgtctttcccaatcttagatttacaaaaataaatatgtaaatattcatcaactgttcccctaatcactggttaaaataagaagctgaccattgcacaacagattgctctgaaactgtgtatttaagagggatttaaatggtttcccagtttcttcatctgacaatagactccactctctgcagtgcccagcactcagatggttgtaaagcgaaacatgaaggaatgataaaacaaaaacaaacaaacaaacaaacaaacaaacgaaaacctggtgcttgttacacccccaaatgctgctctagaaacttgtagggtgattggactgctggctcagctctccctcgctccccagcccaggaatcacaatagggtcctgaactcaaaagaagaaatatctccccagagcagacagaaataaatacaaagcatcacttgttgcagaattcagtacaacaaacaaatgctgagatcccaggatttccaagttgctaacaacagaagttgggcaagccctctttatcatagtttagtagttgggagagggggtaagaaaaacatgacgacagatcactcttacatcaaactgaattttcagctaacttcatggaatgagtgaatgtctagacaatagttcctcttttgcaaacgattgcaatgattcaagggggtaacagaattttgtaactctggtacttatacttggggtagctaaatgtctgggaacagaaattatgtttaaagcaaccagcacaatttagagaaacagtttaagggagataatattttctgtaggcccatatcaagcaagagaggcacaatctgcaaaatgaaggctttcccacattaacagctaaaatacactttctcgagttccctactgcaagggcaggtatcattgtgttaattaaacgctaggtattgggcctgttcgtcacacagtaaggtgtggtgaattttctttaccattccctcttatttttttccactgccctcactaatcccaaccagaaacttgcccctgattctgcccgcactgagctaaccattataaaaatgaggtctccagatgcctttaaggaccctctttttagactgctgggaagacttgagaccccatgttacccattaacccattgcttcctgtccaaaaatatcgtttactgcaccaacacccaggttttagcattattctacccctctaaatccggatgctggccccagactatcctatcctgcactagcccagacaacctagcctgcagcccctcctcccaagacattcagggtctggatgcctggatgcctcctttgcttgggactttttgttacctactctagtggaacttgcccttcttggcaaagtgtcaagggccaggaggcctcccttcgagggatgaggtgtggtccttgcgtgggtataacagccctgagattaggtctcgaccacgcgcgggaagggaacgcgcgctgaccaggagcgagcaagcagagcccaggaacgaggtcaggcggccgggttcctccaaggccagcgtggctgggtaggggttccgcggagtctggggagtggggtgcaagttggcggcgatccagtgacaaagaaggtcgaggaacaagggtggcaagcgggaagcggagcgcgcgcgcgcggtgggcgggaaacccgggggcggtggcagagaggcgggcgcgcgccccgcggggaggggtgcggaggagggaggaggaggcgtctggaccgtgcagccccgcgggccgcgccagcccagacagagcctcgcggcagccgcagcaacaggcggcggggccgggctcgtagggcagaggcggcggtggggcggggagctccaggaggagcgactcgggccggcagccgccagcagggaaggaaagcaccgccgcctcccgcgctcgaccgccgcagccctccacccatcaccgcgcccaccctgcaccggaccccgcaggaggcggcgcgcgcatcctgcagagccccggccacgccgagctgccgccagacatgaccgtggtgcccggggaccacctgctggagccagaggcggcgggaggcggtggcggggacccgcctcagggaggctgtggcagtggcggcggcggtggcggctgcgaccgctacgagccactgccacccgcgctgcccgccgcgggcgagcaagattgctgcggcgagcgtgtggtcatcaacatctccgggctgcgcttcgagacgcagctcaagaccctctgccagttccccgagacactgctgggcgaccccaagcggcgcatgcggtactttgacccactccgcaatgagtacttcttcgaccgcaaccgacccagcttcgacgccatcctctactactaccagtccgggggccgcattcgccggccggtcaacgtgcccatcgacatcttctccgaggagatccgcttttaccagctgggtgaggaggccatggaaaagttccgtgaggatgagggcttcctgcgggaggaggagcgacccctgccccgccgtgacttccagcgccaggtgtggctgctcttcgaatatccggagagctccgggccggcccggggcattgccattgtgtcagtgctggtcattctcatctccattgtcatcttctgcttggagacgcttcccgagtttcgcgatgagaaagactatcccgcctccccgtcgcaggacgtgtttgaggctgccaacaacagcacgtcgggggccccttctggagcctccagcttctcggaccccttcttcgtggtggagaccttgtgcatcatctggttctcctttgagcttctggtgcggttctttgcttgccccagtaaagccaccttctccagaaatatcatgaacttgatagacattgtggccatcattccttattttatcactctgggcactgagctggctgaacgacaaggtaatgggcagcaggccatgtcgctggccatcctaagagtcatccgcctagtaagggttttccgcatcttcaagctctcccgccattctaaggggctgcagatcctaggacagacgctgaaggcttccatgcgggagctggggctgctcatattcttcctcttcattggggtcatccttttctccagtgcagtctactttgctgaggcagacgacccttcttcgggttttaacagtatcccggatgccttctggtgggcagtagtaaccatgacaactgttggttatggtgatatgcacccagtgaccataggaggcaagattgtgggctctctttgtgccatcgcaggtgtcttgaccattgcattgccagttcctgtgattgtttccaacttcaactacttctaccaccgggagacagaaggggaagagcaagcccagtacatgcacgtgggcagttgccagcacctctcctcttcagccgaggagctccgaaaagcccggagtaactccactctgagtaagtcggagtatatggtgatcgaagaggggggtatgaaccacagcgccttcccgcagacccccttcaaaacgggcaactccacagccacttgcaccacgaacaataaccccaactcctgtgtcaacatcaagaagatattcactgatgtctaatatatgatacggttgccaattctgtgcccagtattgtgtggaacatgcccccttggtctgtgtatgcccttgatttatacatttccagaccactcatcaaggaaagtacaagaagtgaggaagcacacttcattctccctattgcttcatactgaaacaggtgcctgtttttgcaagtgggctgcattctctcagctctttttttctctctctccctgtctcttaattttgtgaccaacaaacttacattaagcgtggttttttgtgtgagccctacagccacatcctgagaggaagtgaaactatagagtcagagtaactgtttaacctcaaaatcaaaagatagttgtttctttactaagtaaaggaggcggaacctaaatgaagctcctgactggtggacttttcaatattatttccggactagttattgtaactacctaacctctggatatgtgggtggaaagtctaactagagcgttgacgcgtaagcccactataaatttattttgtttttgactgatctttcagtttgaatctctcccctaaggacttaaggttcacaataattttgaaccaaaagggaaatgccccgaatgtcctgatctggctattaactcttcaaagtttgcaaagcattttgaaaacattagacacagattccaatgaagttgtgagttcatgccccagccaatatctacgaaagtctagaaactcattttcagtgctgccgggagaaacaacagaaattcctgatgcatccgagagataagcttctgcagtatcacaggaagattaaagtgtcagacaccccttccagcggaagttactaattcggacctgactgatgcagttcccatagcaacccgtgtttcctgggaaacccgaaaaaggttgtcatggcatcttttgctctctagccccacccccaccccaggccctgccgtttctacagtaacctttccagatggttcctacttacatgatttcataagaaaaaaacactatttgaataaaccacacaaattaagtgtaagactatatagaggttaaatgaatcacaaaatgcttttttacattttatataaatcattgctgttatcccataatgactggatcaaaaaggaaattatcatctttggaacgttacacgtaaggcatgatctgaattaaatgtcagttgtttggtagcaatttttaaagatggttctgtacagttttcattaagaaatggcaagccaacagataaaatgagaacaacaatataaacatggtctgtacataagccagtgagagtcagtgtacccaaagtattactacaagataccttcagagttcctcaatttaaaagaaaaaaaagaaaaagaaaaacatccagatcccacaacaggactgtcaccatcacagcactggaaaagcagaatcaacctcaaacatatggaggatgcacaatttaatgagtggattacaaaaaggaggttcaggaaatgatcagacttgaaagaacacctgcaagttacagccacatgctgagagctgccagcagacagacagaatcaggtgagccctgtcctatgtgatccctacaagtagtctattgtgcagggaaccagggacatttctgttcataactaggtttatatttgcaaagcagacagttttatattacatgccagttgcctttagaaagattaagaaattcttcccattttccccatgtttctggttatcttttggtttccatgtttatggcaaagggatgcagaaaattcccctctgagcagctttctcccaagctgaactgaaaagtactccattgctttaaccaaccctcttggcttctgaacaatttgtttccccctttaaactgaataaaaggcaaatgctacaactgctaggttagtagcccagtttaatttacataattacttattatctgtggtatcattcttgaaacaaatgcttaaaattgaaatatgattagcattttatttcaacagtctttttgccttatgtgtgttatgtgaattgtacacaactgcttttgggatttaatgacacataagtagtctgtccctctagagtacatgacataaaatcatttcaggtaaactttcataaccctacctaatatatagtgggaagtattaatggaaactataacaagaaagataaagggaatacacaaaaaatagaggcattaatttatgtttacctggcttctgtttgttctttgtgtcgaaataggatttttacctactttcctttgcttgtatgacctttgaacattaatctacattttgatgtaacagttgatattcttggtagaaagacgtttctttcatggcccattttgatgttaaacacatagcaatctcgtaaaagaccttaacataaaggtaacaattttattcccactttgaaatgtagacaccttgattaattcaataaataagtaaagttagaccatttttttatgcttcttaaataagaggagtttgaaggagaccttttgttttcttaaccagagaaatagcccaggttctgagtcagagctttcaggtgatgtaactgtttccagtcgccatattggaaactccttaaaggttataggttctgtgttttgatttaggcgtggtggatgttttaggtacagaaagcggtaccttgtgtcaggtgaatgctgccatcttacattagtatttgcaggcttttactgaagtggctgaaagaggctgttctgctgtcatacagcaagatttggctctggtatctgctgaatgaccttgagaacattacataacttctctgttccttagggttttttttttttttttgtagtataaaataataagtagtactccatgcacttgttgtattaaataagttcatgatatacatcaaattaagagattacactattttgtaattaattatacaagaaatcagtaatgttttcctatttcctttctgtgataacacaattaccatttattaaggagcaacaatgtcctgaacccttgtcagttctgtaaggtaggtaccattaactttattttaaggaggatgaaagctagatgacagaagttaaaatgactccctatgacttcaagctagcgaaatacccagccacaactaaaagttaggtcattatgaatctaaaaccatgctacttttattgggtatcttgaaagataaaattaatcccttatgcttttacatttaacttcagtccatattactaaccaaagtgtagaaacctattctcttcagcacactgaaaattaaccctttcttaataataagctgtgtataaccaggaaactcaaagctaagttatttaccagagattgacttccctgataaccaaagattcttttctcacataattgatgtgtctggatttaaccttagaaagcataatcagtcatattagggatgcctaccaggataaggggatttctctgtttttatattaatttcctggttgtatgtgttttaattggccatgtgataaaaagcattatgtaaattgttaggcttttcatttcctgtactctgcttaggttactaaggaaccatgccagaaatcaatgtaaacattttaatttctgcacaaaagtaagaattgcttgcaacaggatagaaagcagaaaattctcaggtcattggaacttgtggcactagtggctcacctagtcactccatttgtcattaggagacagatcaaaaaccattaggacataattttgtcatgtgtactggcagtagccccttcaccaagatcctaaatcttttataacatgacagtggatagtgacttgggcttagaataaagtgctaatgaatctacatttgccagtaaccattagctttgccagcgacaggctgttgaacatagctgaacatcttgagtgttgaaatgagattcttgtgagttctgtggctggatgaacacagctcatcagcacccttgagaggttgtctgtgccccacagccagtgatccagagaaaaccatggaagtcaatgcttgctattcctttttctatgtggtgttttaaactcatatcatgccaaattcaaatatggcaacaaaaccatagacacctacatggaaaagaaagtgttatttcttagcctctaaacagaattgatgaatacgcactgaaaaagaaatttaaggttgtggtttatacaaaacttatttacatgtttgtcatataacacagcatataactacagcacatatgacatacatggcatatgtacagcacatatatgcaaagagcttactcctttaagagccatagctatattttctaaacatttaaattttcaacattctctgcagcagtttcaagccctttccacctctcagctgtgaatagaagtgataacccctccaactaagaaatgcagagaggcatatcccctccccccccccacctgtctgaagacttatggaaacactgagatagaggtgagaagttctagacctggaagaagctatttagggatagcgtctcatggtgggacttttttcttttcccctttctgtttggtaatgctccctttcaactaaggaagatagaattactggtttgtaggatttcctatgttttgctgaggcaggtaagtgtgtgtgtgtgtgtgtgtgtgtgtgtgtgtgtgtgtgtgtgtgtgtgttcagttcagttacatttgtttttatacaccttctgtgagtgtatttatctttgaagaaagataaatcagagagagttttttttcttaaaacaaaaaaaaaaaaggaagggaaagctatatacaaagtctaaaccctttttaacagatttttcacatcttggccagggttatgtggcatttgataatagtattcatcatatcctcattctcaaattgcaaatacagtctcatgatttcaacttgttagaaggtttacagctgtttgtcttggtttttaatgatactgtggtctaattttgtcttccaaactgctaagaaaatacatttacaaaggagtgctttcatgttcaccctccctcttcttccttcttcttctctttacctctccatgcatctccatcagatgcattctccttgcacttcagaacttgtatcatcagccatcatttgcatttcaagggagacctggaaaagaggttccagcatttccttgagttccatattgttatcataatgtaagaggataggaactgtgcactgaaaaacactgagggttctgctcattagtaatatagcattccagtaagccacaaatggtgtttcatcatatccagagaatgttcggacacggcagacagtggggtctcgccttcatttatggaagattcacagaagtagaacaagaatttctttttccaaaaagcctctaagctgaaactgtcacaatacaaagactcttggaatttctgttgagatccccacaaaccttttactaagaaagttctcgtcaaacccatcattgtccctcccctggatttttattgacagtcctgattagcaacccagctttcttttccttgactctgttcttagcatggaaccctcagtaaaccttctttcttttcttttcttttttggttttttggtttgtttgtttgtttgttttgttttgttttttggttggttggttggtttttttgagacagggtttctctgtgtggtcctgactgtcctgtaagtcactgtaggccaggctggccttgaattcaggatctgcctgcctcccaaaggctaggattaaaggcttgtgccaccactaccctgccattttatttattcttctctcatacaataaatcctgactatagcctaccctccctccactccttccaaacaccctcacatctcatctctccccagatccactgttcttccatttcccttaagaaaaaaagcagatctcccacagaaacactgcatggcaagatgcactaagactaggcaccttccctcatatcaagactggacgagttaacccactaggaggaaaagtgtctcaagagcaggcaaaagagtcagagagaactccattcccatagttataagtcccacaaaaccccaagctaaacgaccacaatatatatgcagaggaccagcaccaacccatgcagggtccataactattgctttgatctctgtgagcacctgtgagccctgcttagttgattccgtgggccctgttttcctggttcctcaacccctctggctcctacatctacccttttttctgaggttcctgcttttgttttttggctttgttggtttggtttggtttttcactttggttggttggttggttggatggatggatgggaaggcttccagttagtataacatacttcagattcttataaggaacaacactatgaactaaccagtacccccagagctccctgggactaaaccactagtcaaagaaaacacatggtgggactcatgtctctagctgcatatgtagcaggggatggcctagtcggtcatcaatggggggacaggcccttggtcttgtgaagattctatgccccagtataggggaatgccagggccaggaagcagaagtgagtgagttagggagcagggggatgggagaggggataggggattttcggggaggaaactaggaaaggggataacatttgaaatgtaaatgaagacaatatctaataaaaataatattttaaaaaatccataaaaaagaaataaagaaattctacccaattgtaaagatggattcccttaatataaataacttaagtatggatatcatcaagggtgcttagaacttagaatgcttcccagagaccatggttcctacatagtagctaatagagtacttgttataaatattactcctcatacatgtttgcatagacgtaatggcccaagtagtacagaaaatcccaaagaacaaatgattccccagaggacttcatctttttattaagcaaagatagtgccatgatttcagatgcattctcttttgcaggaagtggaattctccttatttgaatagaaatacttctctataccccctttgaattttctctgttctcttggtttcccaagcaaaccagaccagtgcatgacctggatgtctcctctgcatatccaggtagtgccattttctcactaagtgtgtcagcaaattaaaatcaacatatgtgtttggatttacgtatgtagaccagcagaatgtgaaaactccttttagcagcttgacaaataagcctacatgaggtaaaatactctattctgacaatattgtcagtcttcttaaagaaataacagaaaacaaaaaaaaaatagaaatgaatactttttattttttcatgcttttaatttttttaattgtgtatgtatttttaggtaggtgggtgtgtcccacaataccagtgtgaaggtcacaagacagttaactttcaggagttggttctctttttctgccatatgagttgtaggaatcaaactcctgtcattgagcttggtggcaagtgtcttcacccactgatctatcttgctagtagccatctgtcagatttctaaatggccacgttgactgggtagataaatctaaagacaaactatttctcccagaaaaactgtattttaattgctttatttctagattatatagatcttttagctgcaagtatttttactgatttgaacagaacagtttactgtgctatgtaaaatttagatattttacttacaggcttagatctgtgaattttagatatgtattagtagtggacttaaatattcctgatatttctcaaagtcaagttagatttcacaggctcattttccaatgattttccagggctttttgacgatgttcatatcattcatattgctaactttaagaactgtttgcttaaacctttggttccttgtcaagagttcataacttccaagacctcaatcaggtaactgtaaaaaataaagcactaaaatgtcctagtctttggacttagtattatttagctggtagaactttagaacttactggaaatgtagccaattttaagtcctttaatagatgttaaaatacagacacattgtgagaacagagaaaaatctacattttttttagaatgacgttggccctctcatcagacacacattgttccataaactgagtatatttctttcatttagtgagagttatgagttgcttctttgcagatgaataattattaaactttgaccatctttgttgcccttttgagtaggtgtttttagttataggccatcattttctacaatatctcctgtacctttttatataaatgattttgatatttaatgattgtatttttcttttcaacccacttcttatccactaacataagcatccttattactatccagatatcacctgttgttgttgttgttcctatagaattacaacttttccacttttataacctattaggttgttgtatggtgtgcgtgtgtgtgtgtgtgtgtgtgtgtgcatattggtagatatgtgcttgtgtgggtgcatgtgtgcaggtgcatgtacacatgtgtgcatatacatataaagaccagaggttaatcttcagtgttatttctcaggagttatccaccttgttgtgttagataggatctctcagtggcccaaggcttaccaagcgactagactggctagacaatcaactgcagggtctccacttgtctctacctccccaggatgagtttacaagcacacatcatcacatccaggccttaagtggatcctggtgatcaaccataggtcctcatgcttgcacagcaaatgctttaccaactgagccattcactcagcctccatgccatattattcttattcagtaatctcaaagaccttgacaggaagttataaaagttaggtcctggttcttcctcccagccccatgctcccagaaataagactcagactcaaaatagatttacaaataccttggccatatagatagactctactctgactagatcataacttatataacccaatactttaacctacattttgccacgtgactgattagctgtccatgcatcaggtaccatgcatccatctcatcgcatctctcaggagactctcccctgactggctctatcccagaattctttctgcttcccggatgtgccacctatttcctgcctaagccataggccataggctttttaattgataagtgatgcatccatacaatacacaaggtattctctctgcaagaagttatggatgcaagaagttatggatatgtaagttctaaaacacaaagcccagtcacttttactaaaggttataacagtaccagagcaagtagagctgactagaaccatctgaagcaagacaaacaggcttcaggagcaccaagaaaaaagtaggtacttagattctaaaatagaggccaaatcattcctgttattagtattttcttcctaatgacaataattagatcattggagatttcatattttcaaaataaaaactaagcatattttgaatatactcctactttttattcaagaaaaatactgtaaagaaagtatgtctttggtcagtatgaccaagtgtaatccataccaagaagaaaaaatgtttctgcagattacccagcttgcagtaggcttcattttgcagcttcatgagtgaacaattctccctccagaaacatgatgaaattccagttcttcatctttggatatttgctcaaggtttagggacatctgctaaggccagcagtggatttgagaaaccatcttctctatgaatctgatagataatgttcacacattcaacctaggtttagcagtctttgtttgtgtccttgtgagtttcctttgtatttcagactaagcaaatgttttgatgacataaccaattttaatgtatcctttgtgtattcactcaacatacatatagtgaatacccaacagtgtgtcaaacactgcttaaaaagcagtaggaactgacccttgtaacatataaaatctttactgtgtaccacactccattctatattctgggtaaaaccaaaaaccacactgttgctaaatactatatttttacaagttaatctctgcatttctaagaatttttctagtgggggagagaaggaagcctccaaacttgtagcttttatttcctgttcttcacaacccctgatgatgtagtttttgtcttaattctttaaagtgatacataactgtgcatagtcatactttaaggataagtagatttgtaatgaaaagctaggccctaacactcattccacagctttctccccaccccctcccctttctctcccatcttttctctgtgtctcctcgctctcccatctcctcaccccactccttccgtgtagcaagcacctcactaaggacagaatttctgttcggttcagagagttctcattttagcttaccatggtaggagatagaatcagcaaggaagccttcgggaaccactgagaagataatacatttttctgacaatcacttgaaacttgtcacatgaccctgaggacgagggtatttttcccaaagcactctatcttactggcttaaactaaatcctgggttgttattaatggaaaaattataactgacataatctgaagctttacaatttgcagtttgaagtcattcaaaatatagtctacagtatttttaaatggaatttctttaacttgacaggtaacagtgagagaactcgaagtttgaatattaatgaatggaacttttctctttccataaattctgtaatttcaaatgctaaatagactgtaaattattgagtcttctctatccaacaggtcccttaagagccccacataaggaactgcagcgtgaccctgaccagatggatgctcagttccaggctgcatggatgagagtgcagtggcagttacatacttctgtctcagttcatattcggggatacatctcaaccgatgcttcatatgatggaaagaactcaaagctggagggtactcttcatattacgagtggtacaaatgaaattgagcaggagataaagaggaacattaaaattaaaaaaatagtaaatgttaaggtatcatgtcaacctatcgacattctggtagagtcaaattgtccaaaagcaatcatcagtgtcacagataaagatagcctagtgtgtgtttctagcaagccaactactgttgtagtattttttcactgaggtactgggctgtatttaattgtgggatatgtttctatagtctatgttctgaattatatttaactttatctgtgagggtgtgaatataccaaaggcttccgttggtagattagcccattcacacaaataagtgaagtcaacactgtgcccagatgaatggtattaaaaacagacttgcctaaaagaaatgtgccttgcttgatgaaacattcctttattttttaagtcaaaataatagatttacaattagattttaggtaggttttagttgaccttaatttt

SEQ ID NO: 915 - DNA, 3101 bp, Mus musculus
atgaccgtggtgcccggggaccacctgctggagccagaggcggcgggaggcggtggcggggacccgcctcagggaggctgtggcagtggcggcggcggtggcggctgcgaccgctacgagccactgccacccgcgctgcccgccgcgggcgagcaagattgctgcggcgagcgtgtggtcatcaacatctccgggctgcgcttcgagacgcagctcaagaccctctgccagttccccgagacactgctgggcgaccccaagcggcgcatgcggtactttgacccactccgcaatgagtacttcttcgaccgcaaccgacccagcttcgacgccatcctctactactaccagtccgggggccgcattcgccggccggtcaacgtgcccatcgacatcttctccgaggagatccgcttttaccagctgggtgaggaggccatggaaaagttccgtgaggatgagggcttcctgcgggaggaggagcgacccctgccccgccgtgacttccagcgccaggtgtggctgctcttcgaatatccggagagctccgggccggcccggggcattgccattgtgtcagtgctggtcattctcatctccattgtcatcttctgcttggagacgcttcccgagtttcgcgatgagaaagactatcccgcctccccgtcgcaggacgtgtttgaggctgccaacaacagcacgtcgggggccccttctggagcctccagcttctcggaccccttcttcgtggtggagaccttgtgcatcatctggttctcctttgagcttctggtgcggttctttgcttgccccagtaaagccaccttctccagaaatatcatgaacttgatagacattgtggccatcattccttattttatcactctgggcactgagctggctgaacgacaaggtaatgggcagcaggccatgtcgctggccatcctaagagtcatccgcctagtaagggttttccgcatcttcaagctctcccgccattctaaggggctgcagatcctaggacagacgctgaaggcttccatgcgggagctggggctgctcatattcttcctcttcattggggtcatccttttctccagtgcagtctactttgctgaggcagacgacccttcttcgggttttaacagtatcccggatgccttctggtgggcagtagtaaccatgacaactgttggttatggtgatatgcacccagtgaccataggaggcaagattgtgggctctctttgtgccatcgcaggtgtcttgaccattgcattgccagttcctgtgattgtttccaacttcaactacttctaccaccgggagacagaaggggaagagcaagcccagtacatgcacgtgggcagttgccagcacctctcctcttcagccgaggagctccgaaaagcccggagtaactccactctgagtaagtcggagtatatggtgatcgaagaggggggtatgaaccacagcgccttcccgcagacccccttcaaaacgggcaactccacagccacttgcaccacgaacaataaccccaactcctgtgtcaacatcaagaagatattcactgatgtctaatatatgatacggttgccaattctgtgcccagtattgtgtggaacatgcccccttggtctgtgtatgcccttgatttatacatttccagaccactcatcaaggaaagtacaagaagtgaggaagcacacttcattctccctattgcttcatactgaaacaggtgcctgtttttgcaagtgggctgcattctctcagctctttttttctctctctccctgtctcttaattttgtgaccaacaaacttacattaagcgtggttttttgtgtgagccctacagccacatcctgagaggaagtgaaactatagagtcagagtaactgtttaacctcaaaatcaaaagatagttgtttctttactaagtaaaggaggcggaacctaaatgaagctcctgactggtggacttttcaatattatttccggactagttattgtaactacctaacctctggatatgtgggtggaaagtctaactagagcgttgacgcgtaagcccactataaatttattttgtttttgactgatctttcagtttgaatctctcccctaaggacttaaggttcacaataattttgaaccaaaagggaaatgccccgaatgtcctgatctggctattaactcttcaaagtttgcaaagcattttgaaaacattagacacagattccaatgaagttgtgagttcatgccccagccaatatctacgaaagtctagaaactcattttcagtgctgccgggagaaacaacagaaattcctgatgcatccgagagataagcttctgcagtatcacaggaagattaaagtgtcagacaccccttccagcggaagttactaattcggacctgactgatgcagttcccatagcaacccgtgtttcctgggaaacccgaaaaaggttgtcatggcatcttttgctctctagccccacccccaccccaggccctgccgtttctacagtaacctttccagatggttcctacttacatgatttcataagaaaaaaacactatttgaataaaccacacaaattaagtgtaagactatatagaggttaaatgaatcacaaaatgcttttttacattttatataaatcattgctgttatcccataatgactggatcaaaaaggaaattatcatctttggaacgttacacgtaaggcatgatctgaattaaatgtcagttgtttggtagcaatttttaaagatggttctgtacagttttcattaagaaatggcaagccaacagataaaatgagaacaacaatataaacatggtctgtacataagccagtgagagtcagtgtacccaaagtattactacaagataccttcagagttcctcaatttaaaagaaaaaaaagaaaaagaaaaacatccagatcccacaacaggactgtcaccatcacagcactggaaaagcagaatcaacctcaaacatatggaggatgcacaatttaatgagtggattacaaaaaggaggttcaggaaatgatcagacttgaaagaacacctgca

SEQ ID NO: 916 - protein, 524 aa, Mus musculus
MTVVPGDHLLEPEAAGGGGGDPPQGGCGSGGGGGGCDRYEPLPPALPAAGEQDCCGERVVINISGLRFETQLKTLCQFPETLLGDPKRRMRYFDPLRNEYFFDRNRPSFDAILYYYQSGGRIRRPVNVPIDIFSEEIRFYQLGEEAMEKFREDEGFLREEERPLPRRDFQRQVWLLFEYPESSGPRIAIVSVLVILISIVIFCLETLPEFRDEKDYPDSQDVFEAANNSTSGAPSGASSFSDPFFVVETLCIIWFSFELLVRFFACPSKATFSRNIMNLIDIVAIIPYFITLGTELAERQGNGQQAMSLAILRVIRLVRVFRIFKLSRHSKGLQILGQTLKASMRELGLLIFFLFIGVILFSSAVYFAEADDPSSGFNSIPDAFWWAVVTMTTVGYGDMHPVTIGGKIVGSLCAIAGVLTIALPVPVIVSNFNYFYHRETEGEEQAQYMHVGSCQHLSSSAEELRKARSNSTLSKSEYMVIEEGGMNHSAFPQTPFKTGNSTATCTTNNNPNSCVNIKKIFTDV

SEQ ID NO: 917 - DNA, 23237 bp, Homo sapiens
tgtgatcttgctttccataatttcagttactctcagtcaattgtggtctgaaaatattaaatgaaaatgtatagaaataaacaattcataagttttaaattgcatgctgttctgagtagcatgatgaaatctcttgccctcccactccatccctcttggaaggggaattctccctttgtcctgtgtatctacactgtatatgctatccactccagtcacttagcccatgagtcacttagtagccacttggttatcaggtctactgttgtggtatcacagtgcttgcgttcgagttaacacttattttacttaatagtagcctcaaagagcaagagtagtgttgctggaaatttggatatgccaaagagaagctatgaagtgtttcctttaaaagtcaaaaggtgaaagtcctcaacttaataaggaaaaaacatcttatactgagtaagaacaaaccttctgtctgtgaaattgtgaagagggaaaaagaaatttgtactagttttgctgtcatacctcaaactgcaaaagttatagccacagtgcatgacaagtgcttagttaagatggaaaggcattaaatttgtgggtggaagacatgaacggaaacatgttatgattgacagcaattatattcagtactatcagtggtttcagacacccactgggggtcttagaacatactacccatggataaaaggcagaggactataatttgattccaaggctagaacccttctagtacactacagcacatctttacattagcttgttctgaataacataatggataaacatgctcatactgtaagctttacctgaaagctaatcttcaacataaaagcatttggcagaaagttctgttcacatgcatgttaaggctggcatgctacaggtggattcctaagtttgatgggggtgggaaatcaagacaatttatccttacaactgatatatatctccatttgttcattatataattcacttaaatgactatataaacaatgaacctcagtgtaagttggtttagtgtttctaactgtgcatgccaatatacataactcagtcatgaggcatgctaggacttcaataggttgggaatggtgagatttcatgctaggagaataaattcagctttaggacaggtccccaagaagggtggccagcttctcaaattataaaatcctagagggaaggataaaattcggatgcaagttgggaaagcctcatcactcataaggtccaaaccagtggaggatgcaagccacagaatggccatggcaatggcaatactggtaatcaggtgggtggtggaagctgtgtagctccaagagattcacctggcataaataaggactccagcccatggcaaggttcagcctttgaggagcctactaagggctaaaaagaaaaatggaatctcaaacaagacagttgaggtttcaggatagggcttcagtatcaacggagaaactaaagagaacagtaacaagctaagacagagtatgtttctattgtcatgcaaaagatggtgaaacctcagaaccaggatgaacgtttataggcaataaggggcccacttcagacacactgagcttagagcagcaagaaagattctagatcttccaccagggattgaggtaaagatcagattttctgatatatttccataagtttgtttaaaattggctctagaattaaattgtcctgagcctataaatgaaagctttcaatacttgcagctgtgcctgggtcaggcaaggacggatgtatcataacatgttgaattttatttgcatccattttataaccaagtaatgtatccattgcatcatatctcaggtatgatgaaatccccaaagaattctattcatattcttttgttattataatactcagtgttaactggatcattatgggccttcatatactttcattaacattattacaattgtaatgaaaactcaataaaagtgtaatgctattctacagacatgttcttgaattgctttatcaacataattacaaaacctaatgacaaagtaataacactgtaatatgatgcctgcaataataagttttgggtttcaccagatggtaatacaaaaacctcaatcaaaatgtatccttgaccttacagcgtttcaataatttcccataggtgtttgcttacaatgtcaatttatgttcaacagttcacattaatgtcaactcaatcatataactgaaataatccattttagttcttgaaattaattttattgtgacttaccacagtctcacaacaaagtacctcacagaaggaacatgaggaaataaattaattttcaagatatttttaaacattcttagccaaatccactttgagaaaaatcatagtgaaagtattacttgtagtgtacatcttgctaaaagagaggtaatatgtttgctagtactctaaagccattcaattgtttctacaaatgttgagaagattcccatctgcaaataaataactggcatacatgggctttaaggcttatctcatcattaactgtatgtcttatctatgattagaggtgtgactgtgcctgctttttcaataaattaactacaacccgaaaaggctatgcaagtggctcagtgtctgattgctgtctcttacatatagaggctcaagggcttatattaatgcccagtcacacaatacttttaactctttggttggcatacttgctgaaaagagttccaatcttccctgactaaaaatgtttttctttttcttttattttattttagagacagagtttcgctctgtcacccaggctgaagtgcagtggctcaatctcagctcactgcaacctctacctcccaggttcaagtgattctcctgcctcagcctctggagtagctgggattataggcacgcaccaccacgcccagctaattttttgtatttttcatggatacaggacttccctatgttggccaggctggtctcaaactcctgtcctcaagtgatctgcctgccttggcttcccaaagttctgggattacaggcatgagccaatgcgctcggcttagaaatgtttttctcaaaatcactctgccatgtgagaacaaggacttagactgctgggtctttctgaggatacggcaacactggagagccatgttagtcccagtcaggacctatatctgcatctacttctggaataactttctctttataccttgcatctttcttacttcttaaaaaaaatggtacagattcaggaaagcccatgtatagcccttgcattgaggaacacgactaattctttcatcatggtctatcagttttttagcaaatagctagtatgcttcgtaatcatttttcttctgttatactatatgaaaagcatttatcatatagcaacacaataccagagactggaaatacaaagatgaataagataaggcctctaatcaccacagaggtagcctacagtagggcttaaggatgtgaacttcttggtttgaatcctagttctaccattttctagttatataaccttgcacaagtgaattcaccaccctgcattcagtttctttatctgtgaaatattactactgctattacagtagtaatattatctgccttacagggctgttggaggttactgcatataaagtggttagcaccatgcctgacttagcatagtgtattcactgctcaatatgttagctattagtattatggagttcacattctcatagggagacagatcatatcaaacacacctaaatatagtacaataaagccctctaatggggctttaaacaaaataccgtaagagctctgatgagaaagagtatcactgaattcatttatcagttacatggaatcttctttgaagtggtaattatgactgacaagaaggtggggctcttaaaagaagtggtccctaagctgggacttgaagattgaattcaccagtggaaaaaggtgaaaggagtatccagcaagctagagcataagcagctagcatgagcaatggctcagcagtgtgtaagtggatgacctgtccaaggaccagcaagtagtgtggagatgcggccagaatgacaggtcagagccagggtttggccatcatggcagcagtggagagcaatgtgatccaacctatgttttacaaaaataactcagctatatcctggaggataaaacacataaaagagagactgcaagcagggagcctgttatgaaactgtcatggcagcctgaactgggacagtggcagtgagaatggagaggtatggacagaattgagaagggcttggagggggaatggaaagcacttagtgactgaatagatgtgagagcagaggaaggatgcagggatgactccgtattctagcccaaaaaaaaaaaaaaaaaaaaaaaaaaaaaaaaacaggaagagaagcaagtttgggggagaagataatgaggtcagtgttataaatattaagtttggggaacttcaggaagaatatcaagtgggggagtttaaagtataattctggagtgcaggacagaccccttcaggatggtgggaagggaaggtgaaaaaaaaagggaagaagtggcacttaaaaaacaatccttgtatatatatgtgtatagcctaactggttctatgaaccagaactagacagatacgtcttcaaaataaacacttggcacacacacacacacacacacacacacacagagagagagtactgtcacatgtctgtatgttcattctgtaccttttctttcttccattaagcatctacgatgtgcctggtactcttccagatctggagcatacagaagtcaaaaagcccaaaccctgccttcaaggagtttattttttagtgcaggtgacagacaataagaaagtaacaaaataaatataaaatataatgtcaagtaaataaacgaaatgaagaaaaataaaggagataagagactagagagttaccaaacggaggcggggaaggattgctatttgaattagtgtggttgtggtcagggaaggcaacttccctgaagctgacagttttaatggagacctaaagtgatggagagagccaaaaaaaaaaaaaaaaactggaggaagagtgttgcaggcagagggaagggcaagtatgaagaccctgagagcagaactcatttagtataactgagaaacagccaggcatccagcttggctagaatagacaaaatagtcacaagtaacatttctagtactcttgtcatgtattgttaataaatagcattgtaaaaattttcatggatttatatcctatcttttcaacagcatgtaagcccaatgagggcatgatctatgtttaaacttcatatccccacagtatctagaacaatgctgtgcacatactaggtgctcttttttctattattattatactttaagttctaggatacatgtgcagaacatgcaggttacataggtatacatgtgccatggtggtttgctgcacccatcaacccatcatctacattacatatttctcctaatgctatcccttccctactcccccaccccctgacaggccccagtgtatgatgttcccctccttgtgtccatgtgttctcattgttcaattcctacttatgagtgagaacatgtggtgtttggttttctgtccctgtgttagtttgctgagaatgatggtttccagcatcatccatgtccctgcaaagggcatgaactcatccttttttatggctgcatagtgttccatggtgtatatgtgccacattttctttatccagtctatcattgatgggcatttgggttggttccaaatctttgctatcgtaaatagtgctgcaataaacatacatgtgcatgtgtctttgtagtagaatgatttataatccattgggtatataccctgtaatggtattgctgggtcaaatggtatttctggttctagatccttgaggaatcgccacactgtcgtccacaatggctgaactaatttgcattccatgctcatggataggaagaatcaatatcgtgaaaatggccatactgcccaaagtaatttatagattcaatgctatccccatcaagctacccctgactttcttcacagaattataaaaaactactttaaatttcatatggaaccaaaaaagagcccatatagccaagacaatactaagcaaaagaacaaagctggaggcatcacactacctgacctcaaactatactacaaggctacagtaaccaaaagagcatggtactggtaccaaaacagatatatagaccaatggaacagaacagaacagaggcctcagaaataacaccacacatctacaaccatctgatctttgacaaaccttacaaaaacaagcaataaggaaagactcccctatttaataaatgggaaaactggctagccatatgcagaaaactgaaactggaccccttccttatacagtatacaaaaattaactcaagatggattaaagacttaaacgtaaaacctaaaaccataaaaaccctagaagaaaacctaggcaataccatttaggacataggcatgggcaaagactgcatgagtaaaagcaatgcgaacaaaagccaaaattgacaaatggggcctaattaaactaaagagcttctgcacagcaaaagaaactatcatcagagtgaacagacaacctacagaatgggagaaaatttttgccatctatccatctgacaaagggttaatatccagaatctacaaggaacttaaacaaatttacaagaaaaaaacaatcccatcaaaaagcgggtgaaggatatgaacagacacttctcaaaagaagacatttatgcagccaacaaacatgaaaaaaagctcaccatcactggtcattagagaaatgcaaatcaaaaccacaatgagataccatctcatgccagttagaatggcgatcattaaaaagtcagaaaacaacagatgctggagaggatgtggagaaataggaacgcttttacactgttactaggtgctatttctccattcatttatctgtaattgtggatcaggacctctagccctgccttgtcccactctcaaacacttctgagctaatcctaaatgctgcttaccatctggcaaacaactggtgaactatttctgggattgatgtggtcagtaggaaacacaaactatgcctagagcaacacagaaaggccaaacaccaagatttatttacccttgctgtttgcaaacctgacggttttagtcaggctctagtattgcagactgaaatatgaggaaatcctgcacatgctcagagaagctgttggctttgccacagttctacgcctaaacgttataataatattattattatcccacaggggtgttatgaggattaatgagacattttcaaatcactttgagctactctgttgggggtactaaataaatgctatgttttcctcttgaaatgccatttttggcattgatttgttgtgatgggttcggctgtccaacagggctagaatgagcccaccaactcattttctatagacaacagacgagccgtcagaaggagtggttttcagttaagataaatatgaattgaagtgaactagtcggcaatcagaagcaaataggctgctgttagaaatctagtatattaagtactcacagtgatcaacacaagcgttgcacagtgtgatacagtaaagcaaacactggatttggaaatggtccaagattttaggcccagctctgctgctaactagctatgtgagcttaagcaaattgctaaacttctctgggccccaaatacaaagtaaggactttatatgtgtcctaagaagcacataatcaaagtcttccagacaaggcaaatacatgaaagggaatggaaatagtcacttatgaaggaaagacatttcacagctgggagaagcttgtgaccatttgtcacaggactatcctctgctctggtcttccttgccattgattaatattaatttcagtactaattcctgcaaaagaaggaataaatcattttctaagtcagacatagaagtacatgaaacatctggtctttaaaaatagggtctttgcctttccatgagctatcattgcagcaagcagtctgtctcattctaagatttaaatatatgaatgattgattatactgctactctaatcaccagctcaaaatatatacgcaaaataatgaggtggctgtcacattccagtgttctggagttttgtaagagaaagagttttacgtggttgcccagttttgccattccacaacataagtgactgcctgcattgtctggcactgaccaggaggtgaaacggaagatgaagggacaataaaaggacatgggtgcctgttgtgcccaggagagccggaggtggaaatcctatggaataaatgagcagtgttttctatggtgagctcagtttttcctcactcctcatcctaggaatcacagcagcatcttgggctcaaaaagaagaaatgttgaaactccagagcagatagcaacgcaaagagacactccttggggaattcaatctgacaagtatgtaccaagtctccaccatttacaaggcactttggtagttgctagaaatataagttggctaggacctactctgtgccctagagaaccccatggttgggagtggtggtgggaagtattgaccacaaatcacttacttaaaattgaattgtcagctaactttgggtgggtgaggagctgtctagacaatagttcctcttctgtaaatgatttgaatgatacaataaaaaacagactttttaaagcctagggttgagttatattagattgctaaaatttctggaaacaaattgtgttcaaagtaaccacaataatttggaaaaataagtttaaagaagatacatgtaagttatctctgggcccagatcaagcaagaggtacaagttgcagaatgaatgtccttccagtttaacaactagagcgctgcaaattccctaccacaagggcagtgccaaaatattaagtaaaaagtctaggtacaggtcctgctctcatcccttccacgacaggcttgagtcataaagctggactttctaaccacacaacttcgacttcgtgaatttcctttcccatttttcctcttatttccccgccaacaggaaacctgtgtagtggataaagaccaggctgtcactgctaatcccaatcagaaacttggtccttgattcttcccagtggccgacatctccgctgcgaaaacgggtgtgaactattcactaaagcagcagggcccgaacgcctttaacaatccatttccttcggactccgtttgcgaagcccatcagcacccattactccctttggcttcgcatcctagcagaagctaaattgtttaaacccccgctcctccccagggtttggcggtcctcgaccctcaagggaacctgggatgccggcgccaggcttgcctctggcccagggcgcccgcctggcctgcactccctccctggacactgggcccgcctgccctccccgggctgtacctaggggtgtggaggccagggggccggcgcccgcggggccgcggcgggagctctcccggcccacgggccgaaaaccctggcgactgggacgcggccaggcgggccgggggcgaggggcgctgaccagaagcgggcggagcctaggggcccgggccggcagcctgactccccgtgggccggctctgctgggtgggcattcccgcggggcgccgaggtacaacatgagggctctttcgctgacaccgaggggccttgagggctgcaagaaatgcaggcccggcggctgcccccgagagcgggacgcgcgcccgcgcggtgggcgggaatcctaaggggacgcggaggcgggcgcgcgccccgcaggggagggggcggagagcgcgagaaggagggaggaggcgtccccgtgcgggagcccggctgaccgcgccagacccagacagagcatcgcggctttggctgcaacaggcggtgggctcggctcgggggcggaggcggcgaaagggcggggagcgcgaggaggagcgacctggcctcaccgctgccgcctcttccccgccgcatggacgagcgcctcagccttctgcgctcgccgccgccgccctcagcccgccaccgcgcccaccctcctcagcgcccagcgagcagcggcggtgcccacacgctggtgaaccacggctacgcggagcccgccgcaggccgcgagctgccgcccgacatgaccgtggtgcccggggaccacctgctggagccggaggtggccgatggtggaggggccccgcctcaaggcggctgtggcggcggcggctgcgaccgctacgagccgctgccgccctcactgccggccgcgggcgagcaggactgctgcggggagcgcgtggtcatcaacatctccgggctgcgcttcgagacgcagctgaagaccctttgccagttccccgagacgctgctgggcgaccccaagcggcgcatgaggtacttcgacccgctccgcaacgagtacttcttcgaccgcaaccggcccagcttcgacgccatcctctactactatcagtccgggggccgcatccgccggccggtcaacgtgcccatcgacattttctccgaggagatccgcttctaccagctgggcgaggaggccatggagaagttccgcgaggacgagggcttcctgcgggaggaggagcggcccttgccccgccgcgacttccagcgccaggtgtggctgctcttcgagtaccccgagagctccgggccggcccggggcatcgccatcgtgtccgtgctggtcatcctcatctccattgtcatcttctgcctggagacgctgccggagttccgcgacgagaaggactaccccgcctcgacgtcgcaggactcattcgaagcagccggcaacagcacgtcggggtcccgcgcaggagcctccagcttctccgatcccttcttcgtggtggagacgctgtgcatcatctggttctccttcgaactgctggtgcggttcttcgcttgtcctagcaaagccaccttctcgcgaaacatcatgaacctgatcgacattgtggccatcattccttattttatcactctgggtaccgagctggccgaacgacagggcaatggacagcaggccatgtctctggccatcctgagggtcatccgcctggtaagggtcttccgcatcttcaagctgtcgcgccactccaaggggctgcagatcctcgggcaaacgctgaaggcgtccatgcgggagctgggattgctcatcttcttcctctttattggggtcatccttttctccagcgcggtctactttgccgaggcagacgaccccacttcaggtttcagcagcatcccggatgccttctggtgggcagtggtaaccatgacaacagtgggttacggcgatatgcacccagtgaccatagggggcaagattgtgggatctctctgtgccatcgccggtgtcttgaccatcgcattgccagttcccgtgattgtttccaacttcaattacttctaccaccgggagacagaaggggaagagcaatcccagtacatgcacgtgggaagttgccagcacctctcctcttcagccgaggagctccgaaaagcaaggagtaactcgactctgagtaagtcggagtatatggtgatcgaagaggggggtatgaaccatagcgctttcccccagacccctttcaaaacgggcaattccactgccacctgcaccacgaacaataatcccaactcttgtgtcaacatcaaaaagatattcaccgatgtttaatatgtgatacaagtgacatgctgtgctcagtattgtgtggaacgtgcccccttggtctgcctatgcccttgttttatacatttccagaccattcatcaaggaaaggacctgaagaagtggaaagcacacttcattctccctctccctgctgcttcatactgaaacaggtgcctgttttgcaagtgggctgcattctctcagctctccttttccctcttaccctctctctctgaacattgtaaacaacagacttacgttaaacttcatttctagtacacgccctatttaaaaaagagcagtacatcctgggaggaaatgaaactaaagaacagttagagtaactgtttaacctcagaattttaaaggcagttgtttctttcctaagcacatcaattcgtagtaaatgatgcttcggtttgatggacctttcaacgttatttattgaatatgtatttcggttgcctaccctgtagatatgtggatgaagagtctaactagaataatgacttgtaaacccaccatgagttatttggtttttgacttaaattcctatttgaatcccctttcccggaattttaagtgtctctacaactttgaataaagggaaatgcccaagatgtcctgatctgactaattagtttaattctttcgggcttgctaagcatttctaaagcattagactaacagattcctgtgaagttctgtgcatatgtcccagccccaacaactatcaaagtctagaaacagatgttttcagtgttgctgagagaaacaaaaaatttcctaatgcatctgagagataagcttcggcagtatcacaagaagattaaagtggcagacaccccttccagcggaagttactaattcggacctgactgatgcagtttccatagcaacccatgtttcctgggaaacccgaaaaaggttgtcatggcatctcttgctctctagccccacctcccagcccctgccgtttccacagtaacctttccagatggttcctacttaaatgatttcataaggaaaaccactgtttgaataagccgcacaaaaaataaagttaagtctgagactctaaggaggtgaaatgaatcccaaatgcattttttaactatgaaaatcattatgtcattccataatgactgaatcaaggaggaaaatatggtgtttggaatgttagatattaaccacaataaggcatgatctggattaaatgccatttattaggcaataatttttaaagatgcttctctacagttttctttctccaagaactttcaagccaacaaatgaaatttaaaagcaaatgtaaaagtgttctgtacataagcaaatgagagattcgatcagtgtgcctgaaaccttactacaagggaccttcaggctttctctttaaaaaaaaaaatacagatcccacaacagctctgtcatcatcacagcacttgacaagctaaataaacttcaaataaataaaggatgcacgtttaaaactgagtgaattgcagacaatcaattaaaaggagggacaggaagtaaccagatcttgggagaacacctgcaagtttcagccatatgccaagggttgccagaagacagacagaatcaggtgagcactctgtgatctactgggagcagtcccttttgttatccagagccagggaactgtcattcatgtatagactgatggtatttgccaaaccaacagttttatcttagttacatgcttggtgtctttttaaaaataatttacacctttctcatttgatttccatgttgctaactgtcgtttagtttccattgtttattacaaaaggatgaaaaaacagtcattgctcttcagaataaccttcactcaagccaaactgaaaattattccgttccttttactaacccacttggcctccaagcaacctgtttccctttaaaaaggataaatggcagaatctactgctgttagattattggtccaattttaatttacataattatttaatagtatgcagtggtacagttctttgaaacaaaaaagggttaaaaataagagtaacattttatttaaacataatcattctgtttcatatacattatataaattatacattatctacagttgttttttggttttaatagcatataactattctatccttccagagtaaatgagagtaaccctatttttaaagcccatgaagtattttcagttaggagtacatttataatgcatgcattgaagagagaggaaaatagtgattgagactataagagagagctgaggaaggaaaagaccaaacaaatagaggcaagaaatctaaatatacctggtcatagatttgttgtttgttttttatcatatatttgtttttatctatgtatatctaagtaggacttcattatctagttttctttgctttttgtttgagttaacctttgacattgatctacctcttgaccaaacgtttggtacccttaatgaccagaaattatttttatgacacattttgataatatgttagatacattgtaacaattacattaaaataatttttgtatctgttcttaacatagagatggaggaagtgcaatgacaattttattcacatttattcaggagatgtagaaaccttgattagttctataagtaaattatggttgtgccataattcttatggttattaaatggcagtaatttaaagggggcctttgttctttaatccagagaaatatcctggcttttgactcataactttgaggtaatatgattgcttgtagtcaccacattgtaagttccctaaaggatataagctctgtgtcttgaaggttttaggtactagtgcctagcacagaatgtggcaccttttatatttgttgagtgaatggctgttatcttacataaatgttatttccaggcttttaataaagtggttaaaagcataagctctgcagtcatatttccaggatttgagtcctgactctggtatatgatcttgaacaaattacttaacctctctgtgcctcagtttctttgtttgtaaaatgagggtgataaacagtacctcacaggtttattgtgaatagtaaatgttaatacaggtagaacacttagaaaaaataattccatgacacggcatcagagattttgctaagagattatattgtgatcatcactcacaagcactgtataattaatacaatgttttgtgaatatgaaatacacaagtaatcagtgtcttcctatttcctttctattataagaataataattaccatttattaagagtcaaccatgtcctggacacttgtcaactccgcaaggtaagtgctattaacctcattttaggagggcataaaatagatgcttaaagttaagtgatttccctaagacttcacagctagcaggagactcagttatgatttaaagccaggttattctggctctgaaacccatgctacttttattaggtgacttgaaagacaaatctcttatgcttttagacttggcttcagcctatgtcactaattaatgagttcatgtagataacatatctccagaaacctatttcatttcagtatactgaaaattaacctgcttaaaataagcaggtattttaaccaaatataagcatcaaatataagttatttaaataagatgaagagattgacttttctaataacaaaagattattttcttatagttggtttatctagatttaatcttagaaagtataaccagtcatagtagtgtttagtgataactgctatgacaatggatatttttcagtttcaagatttttctgttttcatgtgttttaatcaacaatagatgatagcattatgcaaattagttttctatctccttatgctttgcttcatttactgaagaaccataccagaaagtcatgtaaatattttgactctcccttattaagagggaagaaattattcagaacagaagtattaaaagcagaatgagattgccagttcactgaaacttgtgacattattgccttacctaaccactccatggatctttaagggcatctgtgctctaaagaaattaaaataaaatttttcctacataatagctgcagacccttctctcagttcttaaatcatttatgaaatgaaaatggataatgatttgggcttagagcaaaattctaatgagcctacatttgcacatgccagctggctttgccaaactacaaccttcactgttgagctcagttgcacgtcttatgtgttgaagaaatatacggatgtctgtgtatagcaagagattcatgtgaggaggtgtgactggatcagtgcacacccatcaacaccctggggaaaaatgtatatgccttacagctgatgaatccagatagaaacatggaagttaacattgttattgttttatttcttttatgatgttttaaaatgacatgatacaccaactgtggtgacataaccacagacacctacgcataggaggaagcattatgtcagttatttctaaactttgaaataaaatttcagtattgaaatttaaatgcacagtatgaagacatttaaagttatggtttgttggcataaaacttgttatttacctttttggcgtataatatactcaagtatttgttttgctatagtatataaagacaatgtatataatatatactagtagtctgttcctttgagtaccataactataacttattgacttctatacatttaaaatttcaacattttctacagcagttccaagtccttcccacctctcagctgtgaatagaagtgataacccttcccactaagaaatgcaaagaagcacacgtgccccataatctgaagacttatggaaacactgtgagatagaggtgaggagcataagaatgtggaagaggatatttagggctgcatttttacagtgggagctttttctttgtgttttgttttaggccttttaaactaaggaggatacaattattggtttttgtactattccgtatgggtttgggggcaattctatatatattaatgaaatcacttgtttttatatacctttaggaagtggttgataacctttgagagaaagtacatcaaaggaggcaggaaaaagggagtagaagccaatcagagcccagaccttactattgtgactcagctcttagctttctgccagaaaatggccattgctatatagcatatgataatagtattctttatgtactcatattcagtttgcaagtataatttaaatgattcagactggttagaaaactttcagatgtttgtcttgatttttaatgatgtcgtgagctaattttcaaaattgtgaagaaaatacattttaaaaagaaacgttttcatgattttactgggttcttttgtaccagatgtgtgttttcttctgttttaaaatttgcaccattagccatcaaatgcatattaagaagagatctgggaaagagcctccatcattttcttgggatccatgttgttattgttgtaacctaaatagagtgaaataggaactctgccctgtaaagtaaagcctggaattctggttgctagcaatataacacttaaatggagaaaaaaatgatatttcatcctatctaaagaatgttatgaataaatttgttcatgcaagactctgactttgcagatacaggggtcataccttccagtatggtgatagtgattggggagaagctttttctcttacagtgagcttccaacctcacacccactcctaatatcatagcacaaaggctcttgggaatctctatggaggcccctacccactttttagaatgaaagttagcatcatgcctacatgttttatatcagacagcactgttatttcatttgtcttccattacatttattttaaacttctgttcattatagaagtccctctgaatcctaaggttcttatttttatacatttaaacatgttctttacattaaaacataattaatttggaagagaagcagtggggacaatttattacacacacacacacacccctcacctgttcatagattacttcctatcctgcagtacatttactttctgtctatatttctaaatggtgtcatttttttctgaaaattagtgaatttccaaaatattggttttcattctgtatgtgcagcataaatatttacaaatcatttttctttttttccagccttacttaaaatgcaggtttattgcctagtgttctcaatgtatttattaatgaaataacattcactgaaatagtaaatatactcaacctatcaccaaattttgtcatttagcctcccaaatatctctaaaaacagcccactttactgtggcactgccaggaccactgtaatccacactgtcatctctatcctacattaagtgtgaaggtctcttaatggcatcctcacatttcttgtggccagtctgaccctttctcttcctggtagccagaatgatctttttgagaccaaaatccgattatataacccacccctacttaaaattctttcagggtcttcttgtttttaggatagaggctcaaaggcttagcatagcttttatggccccacatgatctcatatctagccttacctcctctttgcttatatttctcccttccttcttttgtgctccagtcaccctggtcttcttccagttacaggataagctccctttccaccttaagctaatggggatctttgcaaatatttcactgccagcctcctctttctctcctcacctcttgacttctatttttacttcaatactcctccaaggcatctctcatgactctggttttttcaattcccctattatagtatagtagttcattaaacttaagatgcccttgattataagaaatactattacttatgtgctattttttacaagattttcaattgtaaggataaagtaccagtgattttaaggtgcatcccaatttcatagatgctcaaatctaaaaatgtaggtcttagaatgcattaaatatagtatgttatcttgacatagctgtaattttatatttatttgtgttatatgattaatttctgtttcttccatgagagtggggactatctctccctttgttcaccactgaatcccttcccactctctcctgagtctgctccaaaaggctctcaccccgctatcattccaccaaaagtgtacttggcaaggtcactggtaacctcatataacgatacccagtggtcatttctcagttctcatttcaatttgacctatcagaagcatttggtatggtcagctacctcttcctaagaagactgtcttcatttgacttccaagataccacactgtggattttctttctacctctctggcctctccttcttaatcttatttactggttctttctcatctcttcgttcttcattctgtcttattctcatagctttaaattatctgtgtatgtaaatttgtatctcccagctagatctctcccctgagctcctgactgaatttccacctgcctacgtgacgtctccacttggatatctaatagacatctcaaacctaatatatccaaaactgagcttccgtccttctcccctctctagcccatcaagcctgtacttcctgccctcttccccacctccactactggcagcttcaattttccagttgctcaaagtaaaatccttggaattatccttgattcttctttttctcttacaccccttatttagtccactgtgttgacacttctaaaatgtttcaaacgccttaccacttcataccacttctactgctaccacttgatctaaaccatcgttatcttcacctgaatttttacagtagcctcccgattggtcctccagtttccatccttcctcttatttgagtctattctcaacataaccagagtgattctttaaaaacatttatcaagttatattacatctttgtgtcaagaccaccatttggcaccccatttcacacagagtactaactaaaggcttgtttacaatggcctgcaaggccctgtctcattttgccctccttacccttttgacctaatttccaactcctctcccacttgatcctgtgctgcagccacactggccaccttgatcttcttcaaatacaccaggcatgctccaccttggggtctttgtatttattgttctccctgcctgggatgttctagcatctgatagctgcgtggctgcctccatcacctccttcaggtgcaactttcacattgaagccttccctagccacactatctaaaattgcaacctcacaacactctctatatcctttctcttcttatttttccctctaatgtattaggtattttatttattttgtttattgtatgttttccattcccttccatgaggacaaggagttttgtctgctcagtatgctgtatcacccaagacctggcatagtacctgaaatacagttggtgcccaataaatatctattggaaggagagatgagaggaaggaaattgccttccaatttgaggtgttttaacctataaacaaaattttcatgtcatgcatctatgcttcatttaatcactatgtggcttacactcctcatcatgctctgaaggacaaaattccttgtaatcagttcactggagaaggcttgcatttgcgaaaacatgctccagcaagttttccacaagaaatattacaccacccaattatggggatgcaatcctttaatgtaagtaacttaactgttaccttatatgagatatcattgagggtacctagtcactaaggatacctggaagttagaatgcttcacaaagaccatgttttttcatacgtaatagctgatagagtgcttttaatcaatgataacataaacatgttgactaattgaccaggacagcacagcaaaatcagaacgaacaagtaatatctacaaaaggcttatctatctagcagacattctaagaaacttccctataagttcagtctcagtttcagttaatgatgagtcctgaaaatccatggagtcttcattactatggaagctgattgaatcaaacattagatttcactagtgaatcacattacagaattacatcactgtagatatggcctgactatcttttgcaaaatgcaattaacattacattttaaaattatgacatttaaaagttagctattttttaaaataataaaaattagctattttttgaagtgattgttcatacatgaaagcagatggggacatttaaatcagttaatgaaaagtaagagcagatttgtagagtgacatttataaaacggtcaaacttaaactacttctaaataataaaatggaaggtgaaggcaatccagtagcatttggttcttagtattgggagattcctagcggtattgaaataccaacacatatagtatggaatgactgaaactaactaaagcattgatatgaccactgcagatagtgccatgattttatgtaatattgtaaccaaggcactttcctctgcagtaggaaatgaggcttctcctaataagaatagagaggaactttctccacaccccttttgaattttctcctttccctgcattttcaggcaaaccagaccagagaatgacttgactgttgcctctgcatatcgaagtggcacaatttccttaccaaatgtgtcaacaaatttgaaactaacatatgtgcctgagtttacatatgtagaccagcagaaattagaaactctttctccttacgccactttatgcagttaagctcacatgggataaagatcatttttctcttctgagaaaaatgttagggatttttaaagaaatgacataaaatataggattgaaatctatagttttatttttttctggttttgggtgaaggattgtgacattgtttatttttatgatttaactcactatgggttttactggattttctattgtaactttgtttagtcaaggtattagacatttaagaggcagccttatgtgccattacattttgtatttacctcgtgtctgactacagggcaataaaatatcagatagtcatgaatacatttcttctataagaaattattatgaaaagcttgttaaacaagagtgactatgtgtcagacttctaaagagcaaaattaactgggtaaccaaaaagtacagacagaaataactactccaagcaagaactgtttgaattgctttatacctagagtctgtagatcttttccctgcagaccttttaactgattttaaaagagcattttattgtgtgaccatataaattgaagatatttattattagtagacctaaatacggctcaaagtagtatcaattatacctcacagctcattttcccatgactttctagatttttttaaaagctcacatcttaacatattactgactttaattactgagtgagattaaaggtttttgcttgctgagagtacataattttcaagacctcaatcagagaattatatagaatcgagtaagaaatctttctagtccttgagcttattcattaccatttacttggtagaactggtaaaacttattggtgtgcagctaacactaagtaatttaatagatgtcaaagtatatagacacatgaaaacaaagttcccatataactacatgctatagaatgacttcaactcttttctcatcaaatgtaagttgatgagactaacagttaagtaagctaggtttctgtacttctttcatttaggccttttggaggtattaattacttcttcataaatttgataattattgaaatttgactattcttattctcttttcttgttctatatgttggaacatttatttggtaaattatcttcaattataggtcactgttttctattgtacttcctttctctcattttatagaatcgattttgggtccattcttctaagcctttcaacccacatcttaaccactaatatagacattctgaattttttttttttttttttttttttgagacggagtctcgctctgtcacccaggctggagtgcagtggcactgtctcggctcactgcaagttttgcctcccgggttcacgcaattcttctgcctcagcctcccgggtagctgtgactacaggcgcccgccaccacgcctggctaatttttttttttgtatttttagtagagacggggtttcaccctgttagccaagatggtctcgatctcctgacctcgtgatccgcccgcgttggcctcccaaaagtgctgggattataggcgtgagccaccgcgcccggctgacattatgatgattatcctgatatcacttttatttttgtttcgttgaattaccaccccctccacacctatactttattaggatgccatgcttataccattcttatttaataatctcaagagccttgagaggcaggta

SEQ ID NO: 918 - DNA, 3058 bp, Homo sapiens
tcgcggctttggctgcaacaggcggtgggctcgcccgccaccgcgcccaccctcctcagcgcccagcgagcagcggcggtgcccacacgctggtgaaccacggctacgcggagcccgccgcaggccgcgagctgccgcccgacatgaccgtggtgcccggggaccacctgctggagccggaggtggccgatggtggaggggccccgcctcaaggcggctgtggcggcggcggctgcgaccgctacgagccgctgccgccctcactgccggccgcgggcgagcaggactgctgcggggagcgcgtggtcatcaacatctccgggctgcgcttcgagacgcagctgaagaccctttgccagttccccgagacgctgctgggcgaccccaagcggcgcatgaggtacttcgacccgctccgcaacgagtacttcttcgaccgcaaccggcccagcttcgacgccatcctctactactatcagtccgggggccgcatccgccggccggtcaacgtgcccatcgacattttctccgaggagatccgcttctaccagctgggcgaggaggccatggagaagttccgcgaggacgagggcttcctgcgggaggaggagcggcccttgccccgccgcgacttccagcgccaggtgtggctgctcttcgagtaccccgagagctccgggccggcccggggcatcgccatcgtgtccgtgctggtcatcctcatctccattgtcatcttctgcctggagacgctgccggagttccgcgacgagaaggactaccccgcctcgacgtcgcaggactcattcgaagcagccggcaacagcacgtcggggtcccgcgcaggagcctccagcttctccgatcccttcttcgtggtggagacgctgtgcatcatctggttctccttcgaactgctggtgcggttcttcgcttgtcctagcaaagccaccttctcgcgaaacatcatgaacctgatcgacattgtggccatcattccttattttatcactctgggtaccgagctggccgaacgacagggcaatggacagcaggccatgtctctggccatcctgagggtcatccgcctggtaagggtcttccgcatcttcaagctgtcgcgccactccaaggggctgcagatcctcgggcaaacgctgaaggcgtccatgcgggagctgggattgctcatcttcttcctctttattggggtcatccttttctccagcgcggtctactttgccgaggcagacgaccccacttcaggtttcagcagcatcccggatgccttctggtgggcagtggtaaccatgacaacagtgggttacggcgatatgcacccagtgaccatagggggcaagattgtgggatctctctgtgccatcgccggtgtcttgaccatcgcattgccagttcccgtgattgtttccaacttcaattacttctaccaccgggagacagaaggggaagagcaatcccagtacatgcacgtgggaagttgccagcacctctcctcttcagccgaggagctccgaaaagcaaggagtaactcgactctgagtaagtcggagtatatggtgatcgaagaggggggtatgaaccatagcgctttcccccagacccctttcaaaacgggcaattccactgccacctgcaccacgaacaataatcccaactcttgtgtcaacatcaaaaagatattcaccgatgtttaatatgtgatacaagtgacatgctgtgctcagtattgtgtggaacgtgcccccttggtctgcctatgcccttgttttatacatttccagaccattcatcaaggaaaggacctgaagaagtggaaagcacacttcattctccctctccctgctgcttcatactgaaacaggtgcctgttttgcaagtgggctgcattctctcagctctccttttccctcttaccctctctctctgaacattgtaaacaacagacttacgttaaacttcatttctagtacacgccctatttaaaaaagagcagtacatcctgggaggaaatgaaactaaagaacagttagagtaactgtttaacctcagaattttaaaggcagttgtttctttcctaagcacatcaattcgtagtaaatgatgcttcggtttgatggacctttcaacgttatttattgaatatgtatttcggttgcctaccctgtagatatgtggatgaagagtctaactagaataatgacttgtaaacccaccatgagttatttggtttttgacttaaattcctatttgaatcccctttcccggaattttaagtgtctctacaactttgaataaagggaaatgcccaagatgtcctgatctgactaattagtttaattctttcgggcttgctaagcatttctaaagcattagactaacagattcctgtgaagttctgtgcatatgtcccagccccaacaactatcaaagtctagaaacagatgttttcagtgttgctgagagaaacaaaaaatttcctaatgcatctgagagataagcttcggcagtatcacaagaagattaaagtggcagacaccccttccagcggaagttactaattcggacctgactgatgcagtttccatagcaacccatgtttcctgggaaacccgaaaaaggttgtcatggcatctcttgctcttaacctttccagatggttcctacttaaatgatttcataaggaaaaccactgtttgaataagccgcacaaaaaataaagttaagtctgagactctaaggaggtgaaatgaatcccaaatgcattttttaactatgaaaatcattatgtcattccataatgactgaatcaaggaggaaaatatggtgtttggaatgttagatattaaccacaataaggcatgatctggattaaatgccatttattaggcaataatttttaaagatgcttctctacaaactttcaagccaacaaatgaaatttaaaagcaaatgtaaaagtgttctgtacataagcaaatgagagattcgatcagtgtgcctgaaaccttactacaagggaccttcaggctttctcttt

SEQ ID NO: 919 - protein, 521 aa, Homo sapiens
MTVVPGDHLLEPEVADGGGAPPQGGCGGGGCDRYEPLPPSLPAAGEQDCCGERVVINISGLRFETQLKTLCQFPETLLGDPKRRMRYFDPLRNEYFFDRNRPSFDAILYYYQSGGRIRRPVNVPIDIFSEEIRFYQLGEEAMEKFREDEGFLREEERPLPRRDFQRQVWLLFEYPESSGPRIAIVSVLVILISIVIFCLETLPEFRDEKDYPASTSQDSFEAAGNSTSGSRAGASSFSDPFFVVETLCIIWFSFELLVRFFACPSKATFSRNIMNLIDIVAIIPYFITLGTELAERQGNGQQAMSLAILRVIRLVRVFRIFKLSRHSKGLQILGQTLKASMRELGLLIFFLFIGVILFSSAVYFAEADDPTSGFSSIPDAFWWAVVTMTTVGYGDMHPVTIGGKIVGSLCAIAGVLTIALPVPVIVSNFNYFYHRETEGEEQSQYMHVGSCQHLSSSAEELRKARSNSTLSKSEYMVIEEGGMNHSAFPQTPFKTGNSTATCTTNNNPNSCVNIKKIFTDV

SEQ ID NO: 920 - DNA, 3025 bp, Homo sapiens
cccgccaccgcgcccaccctcctcagcgcccagcgagcagcggcggtgcccacacgctggtgaaccacggctacgcggagcccgccgcaggccgcgagctgccgcccgacatgaccgtggtgcccggggaccacctgctggagccggaggtggccgatggtggaggggccccgcctcaaggcggctgtggcggcggcggctgcgaccgctacgagccgctgccgccctcactgccggccgcgggcgagcaggactgctgcggggagcgcgtggtcatcaacatctccgggctgcgcttcgagacgcagctgaagaccctttgccagttccccgagacgctgctgggcgaccccaagcggcgcatgaggtacttcgacccgctccgcaacgagtacttcttcgaccgcaaccggcccagcttcgacgccatcctctactactatcagtccgggggccgcatccgccggccggtcaacgtgcccatcgacattttctccgaggagatccgcttctaccagctgggcgaggaggccatggagaagttccgcgaggacgagggcttcctgcgggaggaggagcggcccttgccccgccgcgacttccagcgccaggtgtggctgctcttcgagtaccccgagagctccgggccggcccggggcatcgccatcgtgtccgtgctggtcatcctcatctccattgtcatcttctgcctggagacgctgccggagttccgcgacgagaaggactaccccgcctcgacgtcgcaggactcattcgaagcagccggcaacagcacgtcggggtcccgcgcaggagcctccagcttctccgatcccttcttcgtggtggagacgctgtgcatcatctggttctccttcgaactgctggtgcggttcttcgcttgtcctagcaaagccaccttctcgcgaaacatcatgaacctgatcgacattgtggccatcattccttattttatcactctgggtaccgagctggccgaacgacagggcaatggacagcaggccatgtctctggccatcctgagggtcatccgcctggtaagggtcttccgcatcttcaagctgtcgcgccactccaaggggctgcagatcctcgggcaaacgctgaaggcgtccatgcgggagctgggattgctcatcttcttcctctttattggggtcatccttttctccagcgcggtctactttgccgaggcagacgaccccacttcaggtttcagcagcatcccggatgccttctggtgggcagtggtaaccatgacaacagtgggttacggcgatatgcacccagtgaccatagggggcaagattgtgggatctctctgtgccatcgccggtgtcttgaccatcgcattgccagttcccgtgattgtttccaacttcaattacttctaccaccgggagacagaaggggaagagcaatcccagtacatgcacgtgggaagttgccagcacctctcctcttcagccgaggagctccgaaaagcaaggagtaactcgactctgagtaagtcggagtatatggtgatcgaagaggggggtatgaaccatagcgctttcccccagacccctttcaaaacgggcaattccactgccacctgcaccacgaacaataatcccaactcttgtgtcaacatcaaaaagatattcaccgatgtttaatatgtgatacaagtgacatgctgtgctcagtattgtgtggaacgtgcccccttggtctgcctatgcccttgttttatacatttccagaccattcatcaaggaaaggacctgaagaagtggaaagcacacttcattctccctctccctgctgcttcatactgaaacaggtgcctgttttgcaagtgggctgcattctctcagctctccttttccctcttaccctctctctctgaacattgtaaacaacagacttacgttaaacttcatttctagtacacgccctatttaaaaaagagcagtacatcctgggaggaaatgaaactaaagaacagttagagtaactgtttaacctcagaattttaaaggcagttgtttctttcctaagcacatcaattcgtagtaaatgatgcttcggtttgatggacctttcaacgttatttattgaatatgtatttcggttgcctaccctgtagatatgtggatgaagagtctaactagaataatgacttgtaaacccaccatgagttatttggtttttgacttaaattcctatttgaatcccctttcccggaattttaagtgtctctacaactttgaataaagggaaatgcccaagatgtcctgatctgactaattagtttaattctttcgggcttgctaagcatttctaaagcattagactaacagattcctgtgaagttctgtgcatatgtcccagccccaacaactatcaaagtctagaaacagatgttttcagtgttgctgagagaaacaaaaaatttcctaatgcatctgagagataagcttcggcagtatcacaagaagattaaagtggcagacaccccttccagcggaagttactaattcggacctgactgatgcagtttccatagcaacccatgtttcctgggaaacccgaaaaaggttgtcatggcatctcttgctcttaacctttccagatggttcctacttaaatgatttcataaggaaaaccactgtttgaataagccgcacaaaaaataaagttaagtctgagactctaaggaggtgaaatgaatcccaaatgcattttttaactatgaaaatcattatgtcattccataatgactgaatcaaggaggaaaatatggtgtttggaatgttagatattaaccacaataaggcatgatctggattaaatgccatttattaggcaataatttttaaagatgcttctctacaaactttcaagccaacaaatgaaatttaaaagcaaatgtaaaagtgttctgtacataagcaaatgagagattcgatcagtgtgcctgaaaccttactacaagggaccttcaggctttctcttt

SEQ ID NO: 921 - protein, 521 aa, Homo sapiens; identical to SEQ ID NO: 919

SEQ ID NO: 922 - DNA, 3058 bp, Homo sapiens
tcgcggctttggctgcaacaggcggtgggctcgcccgccaccgcgcccaccctcctcagcgcccagcgagcagcggcggtgcccacacgctggtgaaccacggctacgcggagcccgccgcaggccgcgagctgccgcccgacatgaccgtggtgcccggggaccacctgctggagccggaggtggccgatggtggaggggccccgcctcaaggcggctgtggcggcggcggctgcgaccgctacgagccgctgccgccctcactgccggccgcgggcgagcaggactgctgcggggagcgcgtggtcatcaacatctccgggctgcgcttcgagacgcagctgaagaccctttgccagttccccgagacgctgctgggcgaccccaagcggcgcatgaggtacttcgacccgctccgcaacgagtacttcttcgaccgcaaccggcccagcttcgacgccatcctctactactatcagtccgggggccgcatccgccggccggtcaacgtgcccatcgacattttctccgaggagatccgcttctaccagctgggcgaggaggccatggagaagttccgcgaggacgagggcttcctgcgggaggaggagcggcccttgccccgccgcgacttccagcgccaggtgtggctgctcttcgagtaccccgagagctccgggccggcccggggcatcgccatcgtgtccgtgctggtcatcctcatctccattgtcatcttctgcctggagacgctgccggagttccgcgacgagaaggactaccccgcctcgacgtcgcaggactcattcgaagcagccggcaacagcacgtcggggtcccgcgcaggagcctccagcttctccgatcccttcttcgtggtggagacgctgtgcatcatctggttctccttcgaactgctggtgcggttcttcgcttgtcctagcaaagccaccttctcgcgaaacatcatgaacctgatcgacattgtggccatcattccttattttatcactctgggtaccgagctggccgaacgacagggcaatggacagcaggccatgtctctggccatcctgagggtcatccgcctggtaagggtcttccgcatcttcaagctgtcgcgccactccaaggggctgcagatcctcgggcaaacgctgaaggcgtccatgcgggagctgggattgctcatcttcttcctctttattggggtcatccttttctccagcgcggtctactttgccgaggcagacgaccccacttcaggtttcagcagcatcccggatgccttctggtgggcagtggtaaccatgacaacagtgggttacggcgatatgcacccagtgaccatagggggcaagattgtgggatctctctgtgccatcgccggtgtcttgaccatcgcattgccagttcccgtgattgtttccaacttcaattacttctaccaccgggagacagaaggggaagagcaatcccagtacatgcacgtgggaagttgccagcacctctcctcttcagccgaggagctccgaaaagcaaggagtaactcgactctgagtaagtcggagtatatggtgatcgaagaggggggtatgaaccatagcgctttcccccagacccctttcaaaacgggcaattccactgccacctgcaccacgaacaataatcccaactcttgtgtcaacatcaaaaagatattcaccgatgtttaatatgtgatacaagtgacatgctgtgctcagtattgtgtggaacgtgcccccttggtctgcctatgcccttgttttatacatttccagaccattcatcaaggaaaggacctgaagaagtggaaagcacacttcattctccctctccctgctgcttcatactgaaacaggtgcctgttttgcaagtgggctgcattctctcagctctccttttccctcttaccctctctctctgaacattgtaaacaacagacttacgttaaacttcatttctagtacacgccctatttaaaaaagagcagtacatcctgggaggaaatgaaactaaagaacagttagagtaactgtttaacctcagaattttaaaggcagttgtttctttcctaagcacatcaattcgtagtaaatgatgcttcggtttgatggacctttcaacgttatttattgaatatgtatttcggttgcctaccctgtagatatgtggatgaagagtctaactagaataatgacttgtaaacccaccatgagttatttggtttttgacttaaattcctatttgaatcccctttcccggaattttaagtgtctctacaactttgaataaagggaaatgcccaagatgtcctgatctgactaattagtttaattctttcgggcttgctaagcatttctaaagcattagactaacagattcctgtgaagttctgtgcatatgtcccagccccaacaactatcaaagtctagaaacagatgttttcagtgttgctgagagaaacaaaaaatttcctaatgcatctgagagataagcttcggcagtatcacaagaagattaaagtggcagacaccccttccagcggaagttactaattcggacctgactgatgcagtttccatagcaacccatgtttcctgggaaacccgaaaaaggttgtcatggcatctcttgctagtaacctttccagatggttcctacttaaatgatttcataaggaaaaccactgtttgaataagccgcacaaaaaataaagttaagtctgagactctaaggaggtgaaatgaatcccaaatgcattttttaactatgaaaatcattatgtcattccataatgactgaatcaaggaggaaaatatggtgtttggaatgttagatattaaccacaataaggcatgatctggattaaatgccatttattaggcaataatttttaaagatgcttctctacaaactttcaagccaacaaatgaaatttaaaagcaaatgtaaaagtgttctgtacataagcaaatgagagattcgatcagtgtgcctgaaaccttactacaagggaccttcaggctttctcttt

SEQ ID NO: 923 - protein, 521 aa, Homo sapiens; identical to SEQ ID NO: 919

SEQ ID NO: 924 - DNA, 21500 bp, Mus musculus
  misc_feature (1)...(21500): n = A,T,C or G
actaggtggtgctgtaggatgacccttgaataacagacgaccagtaggcagtccaattctcttggttggaaacgtgcagaaatgggaaactacaggctctctactaggtgccttcccacctctgcctctcttcctacctgatcactgtgcctccagaccctctccctctctctcatcatcttcccttcacttttcactcgcatctctgctctccaccacaagaaaattggccaagatggctcaggcacttccttaatcctctaattttcccactccctgcttcaaagactgggtcagagaggctgagtctctctgagctcttgatctgagctccctgaataagctctgctctctctccactccatacaaggtttcctcccattatctgatacttctgtcctcagtcttcacccagaaatcgacaaatttaaaatagcaatcgggctcctgctctgacctgaaagattccattcgatgtctctgtctacccagtgagaagtgtgagcccactctctcccacgaggtctcaggactgtagactccttgtgttctgctggtgttggcactgcttggactcagaacatcattgtaatgcaccaagcatcagattggcactgtttgaaattcttgaagtacttgtgtttgaagtgacctggcatctcctgactcctccttgcattctaaacaggcaaagagagagatgttgtcctggagctcagagagacctgagccaagccacactctgtcacttactagaatcaagtgaccttgacctctctgaaaatcaatgtctcttgactctctgcataaagaatagttgaactaaggatgctaaggatgaagggaaggctgttcgttacttacttgaggctcccattccataactaaatgaagccaatgcaattgtcttagaacaaaaagagatcatacgtgcatccaacatccacatcctacaaatatgtaaagtggggcctaaaaagggaaaaataactttgtccatgcctcatggtccttggttacctagggagtaggcagatcagggtcatcacatgattttaagtggtttcttctgtacctgctatgttctccatctccaccatcagagaggaaaagagaaagacccaaggtcagagttgcagccaggcacagatcagccaaggtggaacctggacactaagggccagtatgtgctgggtcgaactaatggaagtgtgcctacctctgagccagttggatcacatctgagtcaaggtgtttccatctgggacaattgtgtgggtgcgcttggaagctagagatatctctgagaatggccaggttggtgcaggacaagagaagatgacgaagccaggatatgctacagagtccatcggtctgctggaatgcaccaggtcacaatgcagagaagccactcttaagttagaccagacagcagaatataaggaagagacatagccttgcctgtctaggagaggatagtatgaaatataaacgggacatctcaaaacctgatataataggttcatgtcccagacatagagtcagtggatagagaatcagagagagggcctgagagacacagcactaagtgagtattagaagtcgctgagtggcagagagggtgttatggtctggctggggaactgctaaagccaaagcaggaagacttacaagttctagatgctcccattgcccatcactgaaatggacgttcatacatatatagcaagcggcagaggtagaaaggaatggaccccaagcctatctcatctcagaccttagccttatacatataaattaagccactggaaccttcaagccagtttagtcatgcccatacagacttctacagagagggacatggaggacagagggccttgtttgccttttaggaaatgctggttgagcacagcaatagggagtcaaagaggatataaagacttgcacaggaggaaggtgactactgacactttaaagagaggagggcagaagggccctagtatgaaggcagaggaccaaaatatgtttgggaaggtgtaaccatgcccactggtggctgaattgggccacacggggagaagtgggggaaagcatgcacagatgccaaggccacgtgattggctgaatgtagaggatgtctccatgaaagagaaagtgtggatcgcatcatgactcccagatgtccagattagacagctggggaagtggcagtctttctcagcacagggaacaggacatcaaagtaggcctggaaagtgaagcccatgcaagtcctgaacagatggcagatgtcccagggagcttgtcatgagtgtggcaacaaaaaatggcttggctgcttggagcctaggctcgcagggcagtcaagtgacctgtggtccacagtttatcctgctccacctggcctccccatcagtgaagcccttataggtgtgaacagctggaaaaccatcctggccacactgagaactatcaaggagccactagatggcatgaactgtctaagggacacagggtgccaacctcagaaagagccttgagtgagaaaaaacaagggacagtagtgaatttatctggggcattgtgcttgcaggcagctcccagaggtggtctgagagtcctcaaagtatcccataaccacttggcgtagccctttgactcccatttcccatagaggatggtaatactatgtctatgttacacttgtgtctccatgggacagactctactcagtggtttatcccccagcctcaccatgacagcacatgactgaggaaactgagtctcagctaaagcacagcaggctaagataaggccctagacctgctgcgctgttgtgcttcaaccactgtgctgtttggttcacaggtacatgagggagcccagcccagagcagcccagccttaggcagaaacacatgctcacactctgcagccagtcttggattggattaacatttgaagttcagaggaacaggggacacagaagacaacttggactaggatccaagactccacccaggacccccttagaagcagctgcagttaatctagaggattgctacttcctacagaaacctaccctgacttctccagtaagcaacagacttctgatgtcagtaggggcagcactctactctcaaagatattctccagtgtctgatacacacccacaaagcatcaaagcagcagcagcagcaaccataatgaagctcacagtagactcattccacttctaagtccattcaccaatggactttaccaactccgttcataagctccttgatcctttggaagtctacgcactgactgcggatgttagcttcagtccttctgccctctcttctctctctacagccagttagcaaggaggcggggcttcagagaatgcagtacttatttcacaaatgaactcctgagaaggaaggtcatgtgaatatcccatggtccacagagctcttcaaactgagactggaaacatgttgtctgtgcctctcttttcacatggctgagcagtgcacagcccaaagctgtgcaaatatgagcggcattcaccgaactgttctgtgagcagaggactggagtctggaagctcagaccatagtttctagtccccaagtcaacatatggcaagttaactattaacctaaaagcaatcttcctgtcaagtctgagtctctcctctgggtaggaggattcgcactcagggtttttaagttctgacagcctgaatccacattctgaacccagagcctggtatcccattggcaggctgacatggcaacttatggattcacacaaccttgagactggccccaaccataccgtttaccagctaacttagcctactcagtgtatgatcctctctgagcttaagcatctttctccgtgagtgaaatagtcacatctttccctaagcctgacggtaggcatcaaatacccacagtgcacctctgccctgcctgccagtggcctagaagagctggaccaacacacggcaagcacgggagcaccaaaaagaggtactggtcataccaggaagatgatacaagcaaaacaaattatggggtatttctgggtccctaaataatggtgagaggaactgagaacttctccctcgggaggggatgcacagaggattacaaatctttttttctttggggaagttttaggactttattgttgtatgttctgtataataaattgaatctcttagaatgtagaatttgataagcatgagtgtgcacctgcaaaaccaacaacacactcaacataataaacataaccattgccccgcccccaaagaaatcccctggcaatccatctcccatgccctcccaggacttccagccatgcagctgctgactggcttcctgtctttgaagattacggtgctttgaatcttccagcatggtagataaatgtagctgcatggtgactctgacactcggtgtgattactcaataattgcctacataaactcttcttttaatgagtataattacttgccactcctaacagtggtcaccacaacgtttccctaaagtcaaggcctgggtcccatgcaggaaaccagacaaacgggaaaggaaaggtctgggtgggcctggggtgtttcaccaaggaaaaggaacacaggtcgctctgggttttcttttggaaccaaaactaagaactgcagacccaaaagaggaactatcaaatcaaagcctttctggcttaacttaccggtggaactagttagctctccactcccttaggttagcccgtcccacagtgagggggctttgctttcctttttgacagatcaggagattaaagctcaaggatttgggagttcaggttctcacagctaacaattgtctatgctgggaactggatccatgttctctttcctactattctgttcccagccctgatactatcaaatgtgtccagagagtgaccgttcaggacaagagctgttgccatagccttttcttcttctttgccttcattagttatttttttccattgtcattcacacttaggtcagactttaaaggaaagagggaaagtggatgtcatatgagaagacaaaagaaaagtggagcccagaggaaaatcccaaagagaagtgaaattcaaagatacttgtcattaacacacacacacacaggcacacggacttatacacacacacacacacacacactcacacagccatacacactcacaggggcatacagacactcacaaatacatgagaacatacacacacccacaaggggacacgcatgcacatgggcacacatatgcacatggacacacactcacaaagatacatatactcacacaggcacacatacactcacagggacatacacacactcacaaacacacaagaacatatagacatacacataggcgcacacacacactcacatgggcacacacatataggggggaatccggatcccaggacccctggagtcacaggtatctgattcaagacctagagccaccacgtcttgtccttgtgcaggtcacttctttccctctgcctctgtggcccatccaatgactagtactgacaggcaagtcacaagactatgaggactgaaggttgggctgggtcacaggagctcagcacagcatctgacacatggtaagcacaagccaccaattacgatgattactaattctcccacaagggtttcctgctctccataccttttgttctataaataagacaatgaaactataggcatactctttagtggacataagcatgacaaatgggagaaacagagaccctcaggggaaccatccagaaggagtacatagctgagcactgtaggttgtttctgctgaatagctgagactacggtagaaagcaggatgaataagaaacacagcccagtggttaggtacaaagagaaacacaaacggaagcctaagagatctgagagcagacagggcaccagaaaccattgttttttaggtgattgttagagataaactcttcatgcacagtttaccactgacaggttgcttcttctgcagcaaatttacttatccaataacttgacagaaattgaagtttgaatttggcaagtgaaacacccaggctagactctggatcctgcattgacaaccgatcttcatagccaatcttccaggagccagaagccaaacgagtctggtcttacaagacattgatttccctctaagcccaccaaagccttctagctttgtagctctaggtagggtccaatctttcacccaccttataggctcccactgggaaatggccgaatctcttagaaccttcccttgcagggaagcaggctttcagagtttctgatacttgcataaagagaactgtcttagcagaaagggccagggaagagtctttcacacaccagagcccctctgaacatcagagctcagaagttcatttcaatgagtccctctgtggagtatccgtgtaggcggttctgacagggggcctgcagaactgtactagtgaaggcttggagcttttgcaaggtttgcaagccaatctggaccccctaaaacactcctatccccaacctaagccaagaacttcctatacaaattatttccgaggcaaagggcatatcctgctctaccatgcacccccacggtgagatcgtgggccagctggtggtgttaagatctgtgaaagggcttttgtaaggagcctgctctcccaagggcaactgtgtgtccctccgccctctctgtccagagccctggggaaaggaagtcagaaaggctagaagccagtcctgcagttctgttgttctgcagttccccccaacccccaccccgtggggggcaaagacagcagtgagtttctgctacactgaggccaggccctcacctgctgtattgtcctgggaaaccgagtctgtgctgggtaagagagaggtggggctcaggagtactgaaggaaacggggatgcagaagcagaaggcaggagtggggggactggggtctgcagattctgtctggcagcatcttaataatagcaacacatctccctcggggctggctcgcgctcgggcctgggatggtattgatcagttcatcctgcctacttcattatgttggcaagaacctctcaagcgctcctcaacttctaccctctcccctgtctcccgacccaggcagtacccagctgagctctgcgcggagttttgtttggtaagctaggttttgtcaaagaatggggtgttttctttgcggtgggggtccgggacacagggatctaacccagtggccagctcggcggcggcggcgagcgacacacctcgctagctctgccccagccggcccctttaattcgagttcgctgcggggccaggtgcggcgctgcgtggcgcggtgcggcgcggtgcggctgcgggcggcggccgggcgnnnnnnnnnnnnnnnnnnnnnnnnnnnnnnnnnnnnnnnnnnnnnnnnnnnnnnnnnnnnnnnnnnnnnnnnnnnnnnnnnnnnnnnnnnnnnnnnnnnnnnnnnnnnnnnnnnnnnnnnnnnnnnnnnnnnnnnnnnnnnncaccaccgccaccgcccgctgtccgggttctgcctgtgctggctgccacccaggaacatggaggctctggtacccatctgcaagggtaaatcagtgtccggcattctgctgcgcatgctgccatccctgaccggctgcagcgcccataggggctgcagggtaccacggtagtctgggtgggcgaggtggtgccgacccttgatgtcggcctgaagggctgtggatccgcaccggctgcgtgggacttaagggggagacttgttcctgcagaagagtgcatggaatgggctcggggaccctgtggtctgtgcgtgacatagggcggagggcgcagattggagctggcgggtgatgggaagtgcagctgactgcatagccaccgctggtaaatagtgggtgggtaggacccgagtcacttgggtcctcctggttgcatttgcctctcggcaacggagtaaaatgggcttctctgcagtctcttgttttttccacttggccggggtggtgggctgccgtgaagctctccagcctaaaaggaagctagatctggagcagctgcctggcgacgcctgctctgcaccctcagagttcgggctcctgtgtttcaggtggagatggagtcttggtggtccctcggctggacctcgcaggcaccagctaggctgccctccggcccgcagcgggagcccaccgcactgcgcaggaaggggttaaggtggcacactctagcggtccggcggctgtgggctccggtcagcccagcggattccggcgggagcgcgcccggcggaatcccggctggaaccccgggcgatgggagagggcccagacccctccccggctctggggccagcgggattgggtcggcggggggccagcccggaagccagctttctctaggctccccctctatgtgaagccaatccgccccgcagtcaggcagcttgagcgtttgttctgtgcttccctgccgagatgtgagggattttctcttgggaagaaatcggtggtcgagtgcttgcccagctcaaatgccacccaacccagagcaaggcctgaggcccagggatcctggagggagagtaagttcaagcgaccccttctattaggcattctacagaggcaatcttgctgcttgtgggacctctctagctgggaaggagtgtgtgttgtggaggaaggattgcttctttaccaggacatggctaaggtcagagaggaaaaccctccctcttgggagatatgtcttctgacaccaagaaagctgggtcgcttctgttggcaactgaggtctagggagaaagtgcttcaagctgatgggaagggaaagcttatggttatccaggagaggttaggaaaaggctcctgtggtggatctcattcacaagtgtcatggaaagtagatgtgggggcttgtcacttgccctgaggggatctgccagagcccttaaaagtcttggtctcagctgcctggaagccttggtcccaccttgctgctgtgttttccaggcaacgtcacacctccggaggacagccaggaggactcaggcttttgctgagctgtgcatcttgcctccttccttccaaaggcttcagacccaagctccactctcctcctcaagtcgtggtgcgcgcccctggccaagcatctcactgtccctcgagccccatccagtcctagagcacacctccaggacctgccctcctgctcagaatgactcaccattatttccagctcaagtgagaagatgtgacggggactgagctgcctatttgtgtatctgtgccatcagatctgctcttcgaagaagagtacctcaggctcctgcctggccaggtaaatcaaacaatcacttagtagcagtcatatagaggcaatgggggtggcatcagtgaccaaggcccaggtcccaaacaccctaccatgaatacctcctttggtgcaggtattgccaaaacattagcacagtgcctggcagagggctcccttctccactcctcctgtgcagctatgtccccagcatgtgtgtggtacccaagatcctgtctcagccgcctgcccctagcgcaggccattctatagcttccttgaaagattgtttgttccctgaaccctactgacccctagacaagtgacaaggtgataatagttttagtggcagaagtgatggtacagtcatgtttctgaactcttggggacatcaagtgcacctcctgtcaggttgccaatgactggtgatctcatgtccttacctgcctctgtctttcagccgagtggggctgtgtctccaactcacaaagggctctggggctttcctgcagaagctcagacttatgcttctgtgtttcctggggccgttatcagcaccgagttccctgctgcaggcagctggaaggcattaaagtaaagcacacttctcagccccaattatgacagtggctaccggagacccagtggacgaggctgctgccctccctgggcacccacaagacacctatgacccagaggcagaccatgaatgctgtgagagagtggtcatcaacatctcaggcctgcggttcgaaactcagctaaagaccttagcccagttcccagagaccctcttaggggaccccaagaaacggatgaggtacttcgatcccctccgaaatgagtacttttttgatcgcaaccgccctagctttgatgccattttgtactactatcagtctgggggcaggttgaggcgacctgtgaacgtgcccttagatatcttctcggaagaaatccggttttatgagctaggagaagaagcaatggagatgtttcgggaggatgaaggctacatcaaggaagaagagcgtcctctgcctgaaaatgagtttcagagacaggtgtggcttctctttgaataccctgagagctcagggcctgccaggattatagccattgtatctgtgatggtcattctgatctccatcgtcagcttctgtctggaaaccttgcccatcttccgggatgagaatgaggacatgcatggtggcggggtgaccttccacacctattccaacagcaccatcgggtaccagcagtccacctccttcaccgaccctttcttcattgtagagactctctgcatcatctggttctcctttgagtttctggttagattctttgcctgtcccagcaaagctggcttcttcaccaacatcatgaacatcattgacattgtggctatcatcccttactttatcaccctggggacagagttagctgagaagccagaggatgcccagcaaggccagcaggccatgtcactggccattctccgtgtcatccggttggtaagagtctttaggattttcaagttgtccagacactccaaaggtctacagattctaggtcagaccctcaaagctagcatgagggaattgggcctcctgatattcttcctcttcattggggtcatcctcttctctagtgctgtctattttgcagaagctgatgagagagattcccagttccccagcatcccggatgctttctggtgggcagtcgtctccatgacaactgtaggctatggagacatggttccaactaccattggggggaagatagtgggttctctgtgtgcaattgcaggtgtgttaaccattgccttaccagtccctgtcatagtgtctaatttcaactacttctaccaccgggagacagagggagaggagcaggcccagtacttgcaagtgacaagctgtccaaagatcccgtcctcccctgacctaaagaaaagtagaagtgcctctaccataagtaagtctgattacatggagatacaggagggagttaacaacagcaatgaggactttagagaggagaacttaaaaacagccaactgtaccttggctaacacaaactatgtgaatattaccaaaatgttaactgatgtctgattgaagcctactaatgtactcacagctcaacaggactgatgcagatgttgcataatagcctgcattgtagtcagtgttctacagtgttctacagcatctggttctgcatggaaagcaatagttcgtgcaagtgacttttgatcttttgatttttgatttagaacacagaatatttatcatggctttcatgaaatcttcatcaccgacttacaggtttccaaagaggagagtcacccatggagccagcatctcagaaaggcacaatgcagccccctcacacccacacacaacctaccatagcaacactatcctatcttcctacctaaacatgagcacacctgggaggtgcattccctccaccccacccctaccaccctatttcagcccatctgccccttcacagaggaacataccattgtggcttagttctaaagtctggtgactactcaaaggtcattctcggttttgtgttgagaagaacacacagtcctgtgtgttggaactactttctgtgtcacaggctggggtttgtgaattgcagttgccaactagatgctccggaggcttatgtttcgtaacggaaaaatgctgcattctgctttttctctgcagtgtcgatgtgagggaagcccaggggggtgggggagggacagttaatatgaccaaatatgaattgccaagtttcacatttgttcccttaggcctatggggagaagctacctaattcagggacttctcagcttcagataccattttgcaagcttcagggtcaccgaatgtgtttgatttcttcttttactctggagtttgcaagacatctgctttcctggtggtgtggcccagctccactgacactgcagtggagtataccagtcatgcaatagaactgcatgggtgttcactgcatgaatctcaatatttaaaacacaggagataacctattttcctagtagccgatacagtattcctacttagagtattaatagccttgggatggtattgaacaggggtttttcacatcaaaaggcaaaagcccttcatcagggtaaaacaaatagactatttggaatggggaaccaaaacttctggctggccctctcagcccacctctggtctttcactgggaacacagaccctgccacaccaggagaataaacagaaaagtcagagtgtaaacactcacatgactgaactttggggattaatctagtcgtgggcatgactacacagcttaccagggtcctgaagacaggcaggtctgtgggttcaatgtatataaatatatatcagctctctctctctctctctctctctctctctctctctctctctctctctttctctctctcgtgttcctctagcaagctatagaaaaaattgcatttgaacattgtatatgcttatgcaatatcttgacacagggcaatttatgcatgtgtttgactatgtgcactagaatatatatatatatatatatatatatatatatatatatacatacacaagtgtgtgtatatacattatacatacacatatatatatatattcattctctggagttcagattcaggagcagatctattactcggtgggttggtggtgtaagaaacccaatgggtacagtaaacccactgggcctgggtttgctgtcattgcctcagacatgctccagtgttcatggattcctagatattagaattgtctttctgccctccatgtgctgcagcttcagtttcccacggctgaagcttgtcttactgagtgcacaagggtcctatagccctcacagctccagctatcctgggccaggcccacccaggcctcctccctagaatccatcccattaatcatctccattattatcctctgccccatttgattctctatcatttggttctacatccatcattttcatgaacctgtccataggcggatcctctgctttgaaaccaaggagtaaaactccttgggaccggattctgctaatctacacttaaaggaagcctcctattggtggaaatttcctaattccagaaccaagggatagattccctaaatgacccaaagcatcattttgattactaaactcagactctctctccctagcatactgataataagagctgccctttaaaaaaagaaagaaaggaaggaaggaaggaaggaaggaaggaaggaaggaaggaaggaagaaagaaagaagaaagaaagaaagaaagaaagaaagaaagaaagaaagaaagaaagaaagaaaagaaaagaaaagaaaagaaaagaaaagaaaagaaaagaaaagaaaagaaaagaaaaagaaggatgggtaaagaattaatcctcaccccaagaacaaataaagaatggatgagcactgtgcagccttgaagtagagagtgtgatgtgttgtccctaggaagagagtggggaaggcctttgcttccccatactgggtgtctttgccttttaacacagtggcttaaattctcacaaacacaatgaactgtggtcaggctgttcagtattgattccagtctaggtcttgctgttcactagatggtacctacagttgtctttggggagggggcaccagctcagggtgctagcccagggtgctcattagttcctggtcacccatatccccaggtgactgcagggcatcccatgccaggcacaaagcctctgtgcttctcttcttctcctttgtgggaggtggtgctgaatttcatgacatggggtggaagggacaaacttgggatagtagaaggttaaggcaaaccatacataaggtctagaccaagggaagttagttattcacaaaagccttggcctgggaaccataaaatgtccacacccatgcatgcacatgcatcataaaataaatgatagattattgtcacatacaaatataaaatacacagcacacatgcaaaatgcacaccagccaaaataatatgaggcataggcagaaaagatagacaaagcatgtatatgccgcataagcatgcaatgtgcataccaacatagaatagctgcaagagatatatttgccccgtgtgcaaatgcacagcatgcaactcagatgcaaaatatacaaatccaactgggggtcggggacaatggatatacatgcaagttacataagtgatgctttgttattgtttctgcacacaagctcagcttatatacacagtgcaccaaactatgctaggtacaccaaaacaaaaaacaaaaacaaaaaaaataaataaacaaacagtacccatgcccatgaatccacacaaaatgtaggcattgaatcatcattgactgcctctgcttccacatctaaaaattgataaatgaaggcaagggatcagatttaattgcttttccttgcccatatcaatatccctcaatattctccaaggagcctcttctttggcatccaacctcattcctgagacataactcctgaggtttcaagtggaaagatgtggcaccatatcgagcactggaacctctgggttttctacctttcgccttcctgcaagaatccctcagggtgaaagctgtgggaactgcaagagctggcaacctcttgtgggctcccttgctatcccttttctttcaaagaaaatctacactgaggacccgaactcctctccaagtgtctgggatctccagatttctccctattgtcttgaagcagtgatggtccaagaaactataggattctgaaccctgaatcaggttgaaatgccccgattttctttgagccaaaagatcttattaacactctttccaaagtagtgttgtctggatccaggtcagaaagttggatctatagacttagctcttaaaatgctttccttgctcgtggcatttcacttactcttaggcatgagtccaatgacgacaactcttgattcattcaatctagacttgttctccccttacttcccaacccaggctcccagggaactcaggcttcccattcaagtgttgtgccttgacaaaatcgcagaccagtttagctgaagtaaaatgtggtgggggacattaatctacggctagaggagcagttagcaatttttagagagcctggtatttgtcttctattctaacactaaatttaaatacttggcaatattacccaccattacagagcccaggggcttcatcctgctagtattaccagctggggcctctgcattttggcaaaggctttatacaaaatagaagttaaaagttgcatccagtcttggatcaagttttgtgggctctgcttctatatccctgagtatcttaaccctctgttcaggcctctatagaggaggcaatgagcagataatggacatgtggttcaaaacttgtacacttaacacactgagacttgagtttccaaagcaagatatcaatttccaccatagcttcatgaggcctctgtggcctcagacatttgtaaaagttgtagtttctgggaggttggacatgaaagagtccaggaaaagtagagaaactatcaggaagaaaagaaagatgcctctgtggcctcagacatttgtaaaagttgtagtttctgggaggttggacaggaaagagtccaggaaaagtagagaaattatcaggaagaaaaggcaacagagctgttgaatttcagagtaaatttatcaggagccaagttttcattgattaattaaaattaattcaggaacccaaatttaatttagttatggctctgtgcctttctagaacttcagtggtgtgttagagtcaagtcttagtgagaaaagtcagagcttctgaagatcctcaggcagggaattcaatgctacccatagtcgtgggaaggagttagaaacacatcttccccagagaaaaactatgggaagtacaaacaacatgtggaggccatgaggggagtgcagtcctctgacgtgttagcctaggatagagggtgacctcagagctcttcctcttccagtctgcatggggggaatgggatggctaaggcctgtgagggttctgatgtgtagggtactccaggttacacaatagaggttccttttgataaagtgttcatcatccaggttcgaactcatgcccttcactcattcacatcattagctacctgagtcaaccagcatgaggtgtatatgctgggagctgtcttggtagttatagtgaccattatttataccctcagacttggcccttattgagaccagcacacacacacacacacacacacacacacacacacacacaaagcagaaagcagggaaggagaggtaagggatcccttgcacactcctcagctaacctagtctacttttccctcctttctgctccccttttccctaaaactcagctccatctctcatagtttgtgtctaacgttcttaaagaggaaatgtgcaataaaagcaatagtgactgttttctttagcaatagctctttcaaaaatcttgctctcaggactgaaaagtgatagatgatacatacatcatcagatacgcccttgacctctggacatctgttcacggtttctgtacttcttcttcctacatggtcatatgaatgattcctgtctgctgaggtccgacctccctctggaatgaacatatacacagaggtgcagtgtgcactcaaggaaggcccacaagaaggctttcttttgacattctgtcttcttttttcatatacttttttcatgtacctctgtgtgtgtgtctgaacccctctcccactgccttgcctttctaccttttcttcagcagtaccctagaaacctttagggactgaaacctcacatctgagtgaccttatgccagcctgtcttgttgaatttgtgtctgtctgtcaggtgtaatggaagtctgtaggagagtgcttaccaatagataagaataaagcatcctgagccattacagaagatcttttccatgcactagaaaccattacttgattctttcacagccctctccagggaaatgaataccaaggaatgtagccatggggtgtacggatgggatcagttactcaggcagagttgggaatcgccctctgactctcattcacaataggctgacttgagcaactagagagactccatcagagcttcagagctttgggtagaggtgaacaggcacagaggcatgggtcgtcaagggatatcattagtgaaataagccccacctcccactacaggatgcacctgtgcaaaaatagtttttatatttcccagggttttggaaaggacccctttcttgaaacatctgtgaggtgagctattaacattcagactggacaggaaaggctggcaaccccaggagcccattccattccttctcaatctactttgctccacacacctttgcatagcctaacgttggaaaatctcaaggaggagggtgtcctggatgctttgcgatcctggttatttgaggagaaatgggaaaatgtgtggttcagcctttgtgattggaaagtaggattccctcttgccttagttaagtaaagcattgggaggtgacagaagaccttgcatggctcagagtcagccttctaaatctcagtgcttggtgcctggaaacagaggtgaagcagacaaaaaggacaggctgaatgatgctagctaaagtagatctggaagagggctaaagggcacggcgtggcatatcagatgctgctgctcctaccacttgccatttcctactaaatgtatagaaagacagtataattcttgtcaatcaaggttttagtccattggtcctgagttattagaggttttccatatatacatatacctgtgtatatatgtatggtatatgtatatatgtatgccattatttcaaaaatcatccacaaataggcggtgacaaatctcctcagtttcactaatgtggaatacatttgacattctaaggaatacgctgcatttacttgaattttaacatgaccttctttgcattcttttcacctccccagttctgctcttttccgcttaaaaacttgtctagcaggcatttattcaaacaaaagaacaggctcagggtcacctctttcccttccctgccagagggaaaggtcgattcttttcccttcctgcctcaaggatcaaagggaatcgagatcccagggccaggtgctttcttagcctttattctgtccgccttggttggctgtaacctaatctctaaagactagaagagttatgcccaactctgtagctctaggggagtgggacactcagagacttggctcagcactggtctatttagcttcctcttggtcagtgttagagtcctagggttggctttcatgaattctgaaatatcctccatgaaagggaggggggcggggatgggctttgtggcctttggtagaactaaatcacatgtagctgagtctgatcaaatgaaagaacagagggctgggcctagagcaactaaaacccacttgtgtctttggagatgagctgtagactgctgggtgggatcctaaatatgccctccattctgtcttgcctagcagtgttaaagtcatggggaaacacttttctaggcctcatcatctcctttattctgtgtgcactttacttagaagtgggtgggagggattcctcactagtatctgaagcagttgaggtgatacaggggtggctgtcatttcccccacattcccagaagctcgacaatctggtcaagtgagccatcatccagtagtagaagcctttaaccttgactgagcgtgaccagccactaagtgctgcggttgaagcagcctgtctctatggccatttctcgtcctgcatgagccctagcatggaaactaatctaacttcccgtgctcctcctcactcctaaaatagtcagatatgttccagctgagtgtgccgctgagaagcccttgcatcattctcctgacggatgcatagggcaggtgtgattacataatactgtggacagctgctgcagcagctacataattaaggggagtagagaagtggctgggtgataggaccttaggtagttacccagaggactatatgctgtgtctctgggtccttgggagaggcctccaggccctgcttctccttgaaaatgactccctagacgcggctgccttgtttgtcagactgcataaacactcggggatgcagagaaagaaaaggaggagcttaggggagatgctattcaggggcatgcttggctagcagacaactaccgtattagccattaatgtgactgagttctggacttacaaagtgtagagactctgacctgccaagtgaggctaaaaggagcacacgagttcaaggctaagacctggaatagaaaagcaagaggagaggcctggatggctttggcaagggtgagcctcagctcctgagagtttgaacatgctccgtgcttgccccagttctgccttcacgtgggagccggcgacccagtttccttttgttgtcgtgcttggatggtttcttcatttgaagggctccgggaagctggaaaggcccatgattgagctccagcctgctgagcaaacaatgccccagccaaattggcctcttcctgggtttctgcagccatgcacccctctctccactgagggtaatcttggaacagccaggacgaatggtgccagaaagcaaggaggattctcttgtttccattacagacagagctgtaaagctcataagtgagggctgttgtgtgcttatgtgcttattatataggctggagaacatatctatatataatatattgtatatattatatatgtgtgtataaatatatatgtttatatttatacacacactgtggaaatggccgctcacttaggctcatgcagcacagactaattaggatttcaccggcttctttgctgttcatgcatgactctgcatgactctgcagctgccttcccgtgtcctgtctctaaaaaaaaatcactgaaaactcaaagaggagcggaagatccataagcctctttgagatcaatagggaaaaaggaactccaaggcttatagcaaagcttcctaaggatgatgctgaaagggaacgtgggtctccatggtgataagagacagagaaccaatgagagctgaaggcggagcaggacttgtgtggaggactcatgggaactgggagtcatttaactatttgtttgcttcatgaaaatttagacaccagctgtaactgcattgcacagggtgtatagatgttatcattcttgctgacatattctggaagctttcagccccaccaacactgccccacccaggacttctgcagctgagagttcctgtgtcagtagggtctgatatatgtacatagattatacatatatgtgtacatatgtgcctcaatgaacattgcctgttcaccttatcatgggtgtacatagacttcatagagctccacagtcttttgtaaatattgacacaagtaaataagtatataaatatatattactgaggatttattttaacatcattctgtgtgaaatgacaaaaataaaatttttgacagacacttgtgctttctaccctcttctttgttggattattgtctttacaaaataaaaatgtgcttgccttactctccgctctctgacaccatgaaagctggtcagactagagctgcccattttcaatgcaccagggactcccttggctggatgcccatctgccaatgcctacaagccttgtgtagacactgggacatggggatagcagaaatgggcttggggtcttctccattacatcagcatcttcgatatagctggagaatgtatgggaaaggggaatctaacacaaaatccaaaaccagcctagggttaatttaattcctaacttcatccacctttgctaaccttcatacccaaagtcacttctcattgctgcagatagtgtggagtctggaccaactagattctcggctctcaaatgattctgcctattttggcctctcaagaaatagccatggctattagttcagatgatagtgctaacactca

SEQ ID NO: 925 - DNA, 1500 bp, Mus musculus
atgacagtggctaccggagacccagtggacgaggctgctgccctccctgggcacccacaagacacctatgacccagaggcagaccatgaatgctgtgagagagtggtcatcaacatctcaggcctgcggttcgaaactcagctaaagaccttagcccagttcccagagaccctcttaggggaccccaagaaacggatgaggtacttcgatcccctccgaaatgagtacttttttgatcgcaaccgccctagctttgatgccattttgtactactatcagtctgggggcaggttgaggcgacctgtgaacgtgcccttagatatcttctcggaagaaatccggttttatgagctaggagaagaagcaatggagatgtttcgggaggatgaaggctacatcaaggaagaagagcgtcctctgcctgaaaatgagtttcagagacaggtgtggcttctctttgaataccctgagagctcagggcctgccaggattatagccattgtatctgtgatggtcattctgatctccatcgtcagcttctgtctggaaaccttgcccatcttccgggatgagaatgaggacatgcatggtggcggggtgaccttccacacctattccaacagcaccatcgggtaccagcagtccacctccttcaccgaccctttcttcattgtagagactctctgcatcatctggttctcctttgagtttctggttagattctttgcctgtcccagcaaagctggcttcttcaccaacatcatgaacatcattgacattgtggctatcatcccttactttatcaccctggggacagagttagctgagaagccagaggatgcccagcaaggccagcaggccatgtcactggccattctccgtgtcatccggttggtaagagtctttaggattttcaagttgtccagacactccaaaggtctacagattctaggtcagaccctcaaagctagcatgagggaattgggcctcctgatattcttcctcttcattggggtcatcctcttctctagtgctgtctattttgcagaagctgatgagagagattcccagttccccagcatcccggatgctttctggtgggcagtcgtctccatgacaactgtaggctatggagacatggttccaactaccattggggggaagatagtgggttctctgtgtgcaattgcaggtgtgttaaccattgccttaccagtccctgtcatagtgtctaatttcaactacttctaccaccgggagacagagggagaggagcaggcccagtacttgcaagtgacaagctgtccaaagatcccgtcctcccctgacctaaagaaaagtagaagtgcctctaccataagtaagtctgattacatggagatacaggagggagttaacaacagcaatgaggactttagagaggagaacttaaaaacagccaactgtaccttggctaacacaaactatgtgaatattaccaaaatgttaactgatgtctga

SEQ ID NO: 926 - protein, 499 aa, Mus musculus
MTVATGDPVDEAAALPGHPQDTYDPEADHECCERVVINISGLRFETQLKTLAQFPETLLGDPKKRMRYFDPLRNEYFFDRNRPSFDAILYYYQSGGRLRRPVNVPLDIFSEEIRFYELGEEAMEMFREDEGYIKEEERPLPENEFQRQVWLLFEYPESSGPARIIAIVSVMVILISIVSFCLETLPIFRDENEDMHGGGVTFHTYSNSTIGYQQSTSFTDPFFIVETLCIIWFSFEFLVRFFACPSKAGFFTNIMNIIDIVAIIPYFITLGTELAEKPEDAQQGQQAMSLAILRVIRLVRVFRIFKLSRHSKGLQILGQTLKASMRELGLLIFFLFIGVILFSSAVYFAEADERDSQFPSIPDAFWWAVVSMTTVGYGDMVPTTIGGKIVGSLCAIAGVLTIALPVPVIVSNFNYFYHRETEGEEQAQYLQVTSCPKIPSSPDLKKSRSASTISKSDYMEIQEGVNNSNEDFREENLKTANCTLANTNYVNITKMLTDV

SEQ ID NO: 927 - DNA, 22216 bp, Mus musculus
  misc_feature (1)...(22216): n = A,T,C or G
agaccctaccttgcagtgcaggtatcctcacaggtgagcaagcccctttaggagggtcagcatcctatcttttcttcccatccgcatcttccagctccagtgtctttccatatcccagacctatccacaagcacgcacctggaactcacttctggatagcggctctcatcttcagagcacagtcacctctgccacacagaaaggacaggaaggcgggtgctttgaatgaaaatcgtacaaaacctttgtcagatttatttaaagtactggttttaactctgcagatgctgctgataaattatttattctttctgaggtaaaagccctgaccccagtgcaggacaagcactgaccccgagcagggacacagtggtggtccaaccttccatattctttactgggatggcaggaaggacagcccttttctcccttccctccccccatgatgtgagcattctgaagaattctactggcaccttcaaacctccttactctgtctacaccatcatccagggggtcttattctccccttgatttcaaatgtccatagatctgaagcctccatcccgagggtctcagcttccctctgagcatcgagacagatgctcagacgggcaatttatgggagctattactatgacctcacaaactcctgcctaccacagcttccctctgtggggactctgcctttcccagtagcttctaattggcattctctacctttgtgtctctgctctcttcccttctaatcttcctttacttgaacaagtggcttgagtccacacacttatctctcatcgggaagcaacttccttccaactaattttcagatccactcattatactacatttccattacaaatatagcatgtatctttctgaagttatcttcagttgcagttgtctttctgaaacaagggttagattcagtctgtcatctcccatcccaaactcttgatagttcactattcccctagatacaataaatccagactgcacatgactttcctttcatcagtcttcctctggtatcccctcttggaacactatgatcttcatggtgtagtctccattcttgcagcagaatgcacaactcctgagaacaaagaggcctgtttctgtgctctgtctggtttcccttactctggaatccactcatccatgtaagtgcttactctgaagatatgaactgagcccccagagtgcttcatcccatggaatggatttccaataaaaggagaataagacaattaaaagtacatacccagcaaattgatagacaaaggtgcaacatatgaagaggcatatagtataatagggggcagaataatgagagatgcttgatatagattattctagagaacctttcttctggttggacaggaaggaaggaaggaaggaagaaagggagggagggagnnnnnnnnnnnnnnnnnnnnnnnnnnnnnnnnnnnnnnnnnnnnnnnnnnnnnnnnnnnnnnnnnnnnngagggagggagaaagatgcagatatacctccaaatgcccaaaccccacccagacacagtaggagcatctgcagttctcatctactcagaggcttaaacccaggaggggaggcattactttgagcctacatttttttgaggccatcttaggcaacttagtagatctcgactttaaaaaaaaaataaacaatcaaacttgcccaaacctcccaagtgcccgtcctctgtgaaggctttctttctcaaatgcacttttctatttggctgatgagcttaagccaactctcagccttgggtcagagcagggtctggacactttgcttcttcatccatcccttaggatctacaaattcaactaatatgcatgtgccaggctctgtgtctctcacagaggtgggcccagtgccctggggagtcaaccagatcaaggctcatcccttccttcaaccccttggtcccccatctatatggccattggcaagtcaccttagctcactaagctttggtgtcagtgagtctaatgagaataaaaacagtaccaagctctgtgaggtcactgtccttctcacacatgcctggaaagaagagctacactttgacccttattccatgccacctctcttctttctgctccagctttgggtcctacttttattagagaaagaacctgtgcttatgtctagaaagcttaccgatcttgaagagggtatggctgagagagaagtgattgtccatctctatccagtgctgtggctctactctctcatcttcatctgactgcactgacctgggagccgtgagtgtgttccagctgcactaggacaagtccacctgtcaggttcatactcagtcctgacatagaaacccagggagatttgcaaatctgtgagctagagttcagagaagagaggaaacctttcagagtatgaacaacctttacaacttagctctgactaggttcagagactcctgggaactcctacaccatatccccaattgaggttgttttcagttttgttgatttgtgttgtttgtttgtttgtttgttgtttgtttgtttgtttgtttgtctgtttttctggacctttcttttcctcttcggccaacctagctgcacctcttctacatggccactaggtggtgctgtaggatgacccttgaataacagacgaccagtaggcagtccaattctcttggttggaaacgtgcagaaatgggaaactacaggctctctactaggtgccttcccacctctgcctctcttcctacctgatcactgtgcctccagaccctctccctctctctcatcatcttcccttcacttttcactcgcatctctgctctccaccacaagaaaattggccaagatggctcaggcacttccttaatcctctaattttcccactccctgcttcaaagactgggtcagagaggctgagtctctctgagctcttgatctgagctccctgaataagctctgctctctctccactccatacaaggtttcctcccattatctgatacttctgtcctcagtcttcacccagaaatcgacaaatttaaaatagcaatcgggctcctgctctgacctgaaagattccattcgatgtctctgtctacccagtgagaagtgtgagcccactctctcccacgaggtctcaggactgtagactccttgtgttctgctggtgttggcactgcttggactcagaacatcattgtaatgcaccaagcatcagattggcactgtttgaaattcttgaagtacttgtgtttgaagtgacctggcatctcctgactcctccttgcattctaaacaggcaaagagagagatgttgtcctggagctcagagagacctgagccaagccacactctgtcacttactagaatcaagtgaccttgacctctctgaaaatcaatgtctcttgactctctgcataaagaatagttgaactaaggatgctaaggatgaagggaaggctgttcgttacttacttgaggctcccattccataactaaatgaagccaatgcaattgtcttagaacaaaaagagatcatacgtgcatccaacatccacatcctacaaatatgtaaagtggggcctaaaaagggaaaaataactttgtccatgcctcatggtccttggttacctagggagtaggcagatcagggtcatcacatgattttaagtggtttcttctgtacctgctatgttctccatctccaccatcagagaggaaaagagaaagacccaaggtcagagttgcagccaggcacagatcagccaaggtggaacctggacactaagggccagtatgtgctgggtcgaactaatggaagtgtgcctacctctgagccagttggatcacatctgagtcaaggtgtttccatctgggacaattgtgtgggtgcgcttggaagctagagatatctctgagaatggccaggttggtgcaggacaagagaagatgacgaagccaggatatgctacagagtccatcggtctgctggaatgcaccaggtcacaatgcagagaagccactcttaagttagaccagacagcagaatataaggaagagacatagccttgcctgtctaggagaggatagtatgaaatataaacgggacatctcaaaacctgatataataggttcatgtcccagacatagagtcagtggatagagaatcagagagagggcctgagagacacagcactaagtgagtattagaagtcgctgagtggcagagagggtgttatggtctggctggggaactgctaaagccaaagcaggaagacttacaagttctagatgctcccattgcccatcactgaaatggacgttcatacatatatagcaagcggcagaggtagaaaggaatggaccccaagcctatctcatctcagaccttagccttatacatataaattaagccactggaaccttcaagccagtttagtcatgcccatacagacttctacagagagggacatggaggacagagggccttgtttgccttttaggaaatgctggttgagcacagcaatagggagtcaaagaggatataaagacttgcacaggaggaaggtgactactgacactttaaagagaggagggcagaagggccctagtatgaaggcagaggaccaaaatatgtttgggaaggtgtaaccatgcccactggtggctgaattgggccacacggggagaagtgggggaaagcatgcacagatgccaaggccacgtgattggctgaatgtagaggatgtctccatgaaagagaaagtgtggatcgcatcatgactcccagatgtccagattagacagctggggaagtggcagtctttctcagcacagggaacaggacatcaaagtaggcctggaaagtgaagcccatgcaagtcctgaacagatggcagatgtcccagggagcttgtcatgagtgtggcaacaaaaaatggcttggctgcttggagcctaggctcgcagggcagtcaagtgacctgtggtccacagtttatcctgctccacctggcctccccatcagtgaagcccttataggtgtgaacagctggaaaaccatcctggccacactgagaactatcaaggagccactagatggcatgaactgtctaagggacacagggtgccaacctcagaaagagccttgagtgagaaaaaacaagggacagtagtgaatttatctggggcattgtgcttgcaggcagctcccagaggtggtctgagagtcctcaaagtatcccataaccacttggcgtagccctttgactcccatttcccatagaggatggtaatactatgtctatgttacacttgtgtctccatgggacagactctactcagtggtttatcccccagcctcaccatgacagcacatgactgaggaaactgagtctcagctaaagcacagcaggctaagataaggccctagacctgctgcgctgttgtgcttcaaccactgtgctgtttggttcacaggtacatgagggagcccagcccagagcagcccagccttaggcagaaacacatgctcacactctgcagccagtcttggattggattaacatttgaagttcagaggaacaggggacacagaagacaacttggactaggatccaagactccacccaggacccccttagaagcagctgcagttaatctagaggattgctacttcctacagaaacctaccctgacttctccagtaagcaacagacttctgatgtcagtaggggcagcactctactctcaaagatattctccagtgtctgatacacacccacaaagcatcaaagcagcagcagcagcaaccataatgaagctcacagtagactcattccacttctaagtccattcaccaatggactttaccaactccgttcataagctccttgatcctttggaagtctacgcactgactgcggatgttagcttcagtccttctgccctctcttctctctctacagccagttagcaaggaggcggggcttcagagaatgcagtacttatttcacaaatgaactcctgagaaggaaggtcatgtgaatatcccatggtccacagagctcttcaaactgagactggaaacatgttgtctgtgcctctcttttcacatggctgagcagtgcacagcccaaagctgtgcaaatatgagcggcattcaccgaactgttctgtgagcagaggactggagtctggaagctcagaccatagtttctagtccccaagtcaacatatggcaagttaactattaacctaaaagcaatcttcctgtcaagtctgagtctctcctctgggtaggaggattcgcactcagggtttttaagttctgacagcctgaatccacattctgaacccagagcctggtatcccattggcaggctgacatggcaacttatggattcacacaaccttgagactggccccaaccataccgtttaccagctaacttagcctactcagtgtatgatcctctctgagcttaagcatctttctccgtgagtgaaatagtcacatctttccctaagcctgacggtaggcatcaaatacccacagtgcacctctgccctgcctgccagtggcctagaagagctggaccaacacacggcaagcacgggagcaccaaaaagaggtactggtcataccaggaagatgatacaagcaaaacaaattatggggtatttctgggtccctaaataatggtgagaggaactgagaacttctccctcgggaggggatgcacagaggattacaaatctttttttctttggggaagttttaggactttattgttgtatgttctgtataataaattgaatctcttagaatgtagaatttgataagcatgagtgtgcacctgcaaaaccaacaacacactcaacataataaacataaccattgccccgcccccaaagaaatcccctggcaatccatctcccatgccctcccaggacttccagccatgcagctgctgactggcttcctgtctttgaagattacggtgctttgaatcttccagcatggtagataaatgtagctgcatggtgactctgacactcggtgtgattactcaataattgcctacataaactcttcttttaatgagtataattacttgccactcctaacagtggtcaccacaacgtttccctaaagtcaaggcctgggtcccatgcaggaaaccagacaaacgggaaaggaaaggtctgggtgggcctggggtgtttcaccaaggaaaaggaacacaggtcgctctgggttttcttttggaaccaaaactaagaactgcagacccaaaagaggaactatcaaatcaaagcctttctggcttaacttaccggtggaactagttagctctccactcccttaggttagcccgtcccacagtgagggggctttgctttcctttttgacagatcaggagattaaagctcaaggatttgggagttcaggttctcacagctaacaattgtctatgctgggaactggatccatgttctctttcctactattctgttcccagccctgatactatcaaatgtgtccagagagtgaccgttcaggacaagagctgttgccatagccttttcttcttctttgccttcattagttatttttttccattgtcattcacacttaggtcagactttaaaggaaagagggaaagtggatgtcatatgagaagacaaaagaaaagtggagcccagaggaaaatcccaaagagaagtgaaattcaaagatacttgtcattaacacacacacacacaggcacacggacttatacacacacacacacacacacactcacacagccatacacactcacaggggcatacagacactcacaaatacatgagaacatacacacacccacaaggggacacgcatgcacatgggcacacatatgcacatggacacacactcacaaagatacatatactcacacaggcacacatacactcacagggacatacacacactcacaaacacacaagaacatatagacatacacataggcgcacacacacactcacatgggcacacacatataggggggaatccggatcccaggacccctggagtcacaggtatctgattcaagacctagagccaccacgtcttgtccttgtgcaggtcacttctttccctctgcctctgtggcccatccaatgactagtactgacaggcaagtcacaagactatgaggactgaaggttgggctgggtcacaggagctcagcacagcatctgacacatggtaagcacaagccaccaattacgatgattactaattctcccacaagggtttcctgctctccataccttttgttctataaataagacaatgaaactataggcatactctttagtggacataagcatgacaaatgggagaaacagagaccctcaggggaaccatccagaaggagtacatagctgagcactgtaggttgtttctgctgaatagctgagactacggtagaaagcaggatgaataagaaacacagcccagtggttaggtacaaagagaaacacaaacggaagcctaagagatctgagagcagacagggcaccagaaaccattgttttttaggtgattgttagagataaactcttcatgcacagtttaccactgacaggttgcttcttctgcagcaaatttacttatccaataacttgacagaaattgaagtttgaatttggcaagtgaaacacccaggctagactctggatcctgcattgacaaccgatcttcatagccaatcttccaggagccagaagccaaacgagtctggtcttacaagacattgatttccctctaagcccaccaaagccttctagctttgtagctctaggtagggtccaatctttcacccaccttataggctcccactgggaaatggccgaatctcttagaaccttcccttgcagggaagcaggctttcagagtttctgatacttgcataaagagaactgtcttagcagaaagggccagggaagagtctttcacacaccagagcccctctgaacatcagagctcagaagttcatttcaatgagtccctctgtggagtatccgtgtaggcggttctgacagggggcctgcagaactgtactagtgaaggcttggagcttttgcaaggtttgcaagccaatctggaccccctaaaacactcctatccccaacctaagccaagaacttcctatacaaattatttccgaggcaaagggcatatcctgctctaccatgcacccccacggtgagatcgtgggccagctggtggtgttaagatctgtgaaagggcttttgtaaggagcctgctctcccaagggcaactgtgtgtccctccgccctctctgtccagagccctggggaaaggaagtcagaaaggctagaagccagtcctgcagttctgttgttctgcagttccccccaacccccaccccgtggggggcaaagacagcagtgagtttctgctacactgaggccaggccctcacctgctgtattgtcctgggaaaccgagtctgtgctgggtaagagagaggtggggctcaggagtactgaaggaaacggggatgcagaagcagaaggcaggagtggggggactggggtctgcagattctgtctggcagcatcttaataatagcaacacatctccctcggggctggctcgcgctcgggcctgggatggtattgatcagttcatcctgcctacttcattatgttggcaagaacctctcaagcgctcctcaacttctaccctctcccctgtctcccgacccaggcagtacccagctgagctctgcgcggagttttgtttggtaagctaggttttgtcaaagaatggggtgttttctttgcggtgggggtccgggacacagggatctaacccagtggccagctcggcggcggcggcgagcgacacacctcgctagctctgccccagccggcccctttaattcgagttcgctgcggggccaggtgcggcgctgcgtggcgcggtgcggcgcggtgcggctgcgggcggcggccgggcgnnnnnnnnnnnnnnnnnnnnnnnnnnnnnnnnnnnnnnnnnnnnnnnnnnnnnnnnnnnnnnnnnnnnnnnnnnnnnnnnnnnnnnnnnnnnnnnnnnnnnnnnnnnnnnnnnnnnnnnnnnnnnnnnnnnnnnnnnnnnnncaccaccgccaccgcccgctgtccgggttctgcctgtgctggctgccacccaggaacatggaggctctggtacccatctgcaagggtaaatcagtgtccggcattctgctgcgcatgctgccatccctgaccggctgcagcgcccataggggctgcagggtaccacggtagtctgggtgggcgaggtggtgccgacccttgatgtcggcctgaagggctgtggatccgcaccggctgcgtgggacttaagggggagacttgttcctgcagaagagtgcatggaatgggctcggggaccctgtggtctgtgcgtgacatagggcggagggcgcagattggagctggcgggtgatgggaagtgcagctgactgcatagccaccgctggtaaatagtgggtgggtaggacccgagtcacttgggtcctcctggttgcatttgcctctcggcaacggagtaaaatgggcttctctgcagtctcttgttttttccacttggccggggtggtgggctgccgtgaagctctccagcctaaaaggaagctagatctggagcagctgcctggcgacgcctgctctgcaccctcagagttcgggctcctgtgtttcaggtggagatggagtcttggtggtccctcggctggacctcgcaggcaccagctaggctgccctccggcccgcagcgggagcccaccgcactgcgcaggaaggggttaaggtggcacactctagcggtccggcggctgtgggctccggtcagcccagcggattccggcgggagcgcgcccggcggaatcccggctggaaccccgggcgatgggagagggcccagacccctccccggctctggggccagcgggattgggtcggcggggggccagcccggaagccagctttctctaggctccccctctatgtgaagccaatccgccccgcagtcaggcagcttgagcgtttgttctgtgcttccctgccgagatgtgagggattttctcttgggaagaaatcggtggtcgagtgcttgcccagctcaaatgccacccaacccagagcaaggcctgaggcccagggatcctggagggagagtaagttcaagcgaccccttctattaggcattctacagaggcaatcttgctgcttgtgggacctctctagctgggaaggagtgtgtgttgtggaggaaggattgcttctttaccaggacatggctaaggtcagagaggaaaaccctccctcttgggagatatgtcttctgacaccaagaaagctgggtcgcttctgttggcaactgaggtctagggagaaagtgcttcaagctgatgggaagggaaagcttatggttatccaggagaggttaggaaaaggctcctgtggtggatctcattcacaagtgtcatggaaagtagatgtgggggcttgtcacttgccctgaggggatctgccagagcccttaaaagtcttggtctcagctgcctggaagccttggtcccaccttgctgctgtgttttccaggcaacgtcacacctccggaggacagccaggaggactcaggcttttgctgagctgtgcatcttgcctccttccttccaaaggcttcagacccaagctccactctcctcctcaagtcgtggtgcgcgcccctggccaagcatctcactgtccctcgagccccatccagtcctagagcacacctccaggacctgccctcctgctcagaatgactcaccattatttccagctcaagtgagaagatgtgacggggactgagctgcctatttgtgtatctgtgccatcagatctgctcttcgaagaagagtacctcaggctcctgcctggccaggtaaatcaaacaatcacttagtagcagtcatatagaggcaatgggggtggcatcagtgaccaaggcccaggtcccaaacaccctaccatgaatacctcctttggtgcaggtattgccaaaacattagcacagtgcctggcagagggctcccttctccactcctcctgtgcagctatgtccccagcatgtgtgtggtacccaagatcctgtctcagccgcctgcccctagcgcaggccattctatagcttccttgaaagattgtttgttccctgaaccctactgacccctagacaagtgacaaggtgataatagttttagtggcagaagtgatggtacagtcatgtttctgaactcttggggacatcaagtgcacctcctgtcaggttgccaatgactggtgatctcatgtccttacctgcctctgtctttcagccgagtggggctgtgtctccaactcacaaagggctctggggctttcctgcagaagctcagacttatgcttctgtgtttcctggggccgttatcagcaccgagttccctgctgcaggcagctggaaggcattaaagtaaagcacacttctcagccccaattatgacagtggctaccggagacccagtggacgaggctgctgccctccctgggcacccacaagacacctatgacccagaggcagaccatgaatgctgtgagagagtggtcatcaacatctcaggcctgcggttcgaaactcagctaaagaccttagcccagttcccagagaccctcttaggggaccccaagaaacggatgaggtacttcgatcccctccgaaatgagtacttttttgatcgcaaccgccctagctttgatgccattttgtactactatcagtctgggggcaggttgaggcgacctgtgaacgtgcccttagatatcttctcggaagaaatccggttttatgagctaggagaagaagcaatggagatgtttcgggaggatgaaggctacatcaaggaagaagagcgtcctctgcctgaaaatgagtttcagagacaggtgtggcttctctttgaataccctgagagctcagggcctgccaggattatagccattgtatctgtgatggtcattctgatctccatcgtcagcttctgtctggaaaccttgcccatcttccgggatgagaatgaggacatgcatggtggcggggtgaccttccacacctattccaacagcaccatcgggtaccagcagtccacctccttcaccgaccctttcttcattgtagagactctctgcatcatctggttctcctttgagtttctggttagattctttgcctgtcccagcaaagctggcttcttcaccaacatcatgaacatcattgacattgtggctatcatcccttactttatcaccctggggacagagttagctgagaagccagaggatgcccagcaaggccagcaggccatgtcactggccattctccgtgtcatccggttggtaagagtctttaggattttcaagttgtccagacactccaaaggtctacagattctaggtcagaccctcaaagctagcatgagggaattgggcctcctgatattcttcctcttcattggggtcatcctcttctctagtgctgtctattttgcagaagctgatgagagagattcccagttccccagcatcccggatgctttctggtgggcagtcgtctccatgacaactgtaggctatggagacatggttccaactaccattggggggaagatagtgggttctctgtgtgcaattgcaggtgtgttaaccattgccttaccagtccctgtcatagtgtctaatttcaactacttctaccaccgggagacagagggagaggagcaggcccagtacttgcaagtgacaagctgtccaaagatcccgtcctcccctgacctaaagaaaagtagaagtgcctctaccataagtaagtctgattacatggagatacaggagggagttaacaacagcaatgaggactttagagaggagaacttaaaaacagccaactgtaccttggctaacacaaactatgtgaatattaccaaaatgttaactgatgtctgattgaagcctactaatgtactcacagctcaacaggactgatgcagatgttgcataatagcctgcattgtagtcagtgttctacagtgttctacagcatctggttctgcatggaaagcaatagttcgtgcaagtgacttttgatcttttgatttttgatttagaacacagaatatttatcatggctttcatgaaatcttcatcaccgacttacaggtttccaaagaggagagtcacccatggagccagcatctcagaaaggcacaatgcagccccctcacacccacacacaacctaccatagcaacactatcctatcttcctacctaaacatgagcacacctgggaggtgcattccctccaccccacccctaccaccctatttcagcccatctgccccttcacagaggaacataccattgtggcttagttctaaagtctggtgactactcaaaggtcattctcggttttgtgttgagaagaacacacagtcctgtgtgttggaactactttctgtgtcacaggctggggtttgtgaattgcagttgccaactagatgctccggaggcttatgtttcgtaacggaaaaatgctgcattctgctttttctctgcagtgtcgatgtgagggaagcccaggggggtgggggagggacagttaatatgaccaaatatgaattgccaagtttcacatttgttcccttaggcctatggggagaagctacctaattcagggacttctcagcttcagataccattttgcaagcttcagggtcaccgaatgtgtttgatttcttcttttactctggagtttgcaagacatctgctttcctggtggtgtggcccagctccactgacactgcagtggagtataccagtcatgcaatagaactgcatgggtgttcactgcatgaatctcaatatttaaaacacaggagataacctattttcctagtagccgatacagtattcctacttagagtattaatagccttgggatggtattgaacaggggtttttcacatcaaaaggcaaaagcccttcatcagggtaaaacaaatagactatttggaatggggaaccaaaacttctggctggccctctcagcccacctctggtctttcactgggaacacagaccctgccacaccaggagaataaacagaaaagtcagagtgtaaacactcacatgactgaactttggggattaatctagtcgtgggcatgactacacagcttaccagggtcctgaagacaggcaggtctgtgggttcaatgtatataaatatatatcagctctctctctctctctctctctctctctctctctctctctctctctctttctctctctcgtgttcctctagcaagctatagaaaaaattgcatttgaacattgtatatgcttatgcaatatcttgacacagggcaatttatgcatgtgtttgactatgtgcactagaatatatatatatatatatatatatatatatatatatatacatacacaagtgtgtgtatatacattatacatacacatatatatatatattcattctctggagttcagattcaggagcagatctattactcggtgggttggtggtgtaagaaacccaatgggtacagtaaacccactgggcctgggtttgctgtcattgcctcagacatgctccagtgttcatggattcctagatattagaattgtctttctgccctccatgtgctgcagcttcagtttcccacggctgaagcttgtcttactgagtgcacaagggtcctatagccctcacagctccagctatcctgggccaggcccacccaggcctcctccctagaatccatcccattaatcatctccattattatcctctgccccatttgattctctatcatttggttctacatccatcattttcatgaacctgtccataggcggatcctctgctttgaaaccaaggagtaaaactccttgggaccggattctgctaatctacacttaaaggaagcctcctattggtggaaatttcctaattccagaaccaagggatagattccctaaatgacccaaagcatcattttgattactaaactcagactctctctccctagcatactgataataagagctgccctttaaaaaaagaaagaaaggaaggaaggaaggaaggaaggaaggaaggaaggaaggaaggaagaaagaaagaagaaagaaagaaagaaagaaagaaagaaagaaagaaagaaagaaagaaagaaaagaaaagaaaagaaaagaaaagaaaagaaaagaaaagaaaagaaaagaaaagaaaaagaaggatgggtaaagaattaatcctcaccccaagaacaaataaagaatggatgagcactgtgcagccttgaagtagagagtgtgatgtgttgtccctaggaagagagtggggaaggcctttgcttccccatactgggtgtctttgccttttaacacagtggcttaaattctcacaaacacaatgaactgtggtcaggctgttcagtattgattccagtctaggtcttgctgttcactagatggtacctacagttgtctttggggagggggcaccagctcagggtgctagcccagggtgctcattagttcctggtcacccatatccccaggtgactgcagggcatcccatgccaggcacaaagcctctgtgcttctcttcttctcctttgtgggaggtggtgctgaatttcatgacatggggtggaagggacaaacttgggatagtagaaggttaaggcaaaccatacataaggtctagaccaagggaagttagttattcacaaaagccttggcctgggaaccataaaatgtccacacccatgcatgcacatgcatcataaaataaatgatagattattgtcacatacaaatataaaatacacagcacacatgcaaaatgcacaccagccaaaataatatgaggcataggcagaaaagatagacaaagcatgtatatgccgcataagcatgcaatgtgcataccaacatagaatagctgcaagagatatatttgccccgtgtgcaaatgcacagcatgcaactcagatgcaaaatatacaaatccaactgggggtcggggacaatggatatacatgcaagttacataagtgatgctttgttattgtttctgcacacaagctcagcttatatacacagtgcaccaaactatgctaggtacaccaaaacaaaaaacaaaaacaaaaaaaataaataaacaaacagtacccatgcccatgaatccacacaaaatgtaggcattgaatcatcattgactgcctctgcttccacatctaaaaattgataaatgaaggcaagggatcagatttaattgcttttccttgcccatatcaatatccctcaatattctccaaggagcctcttctttggcatccaacctcattcctgagacataactcctgaggtttcaagtggaaagatgtggcaccatatcgagcactggaacctctgggttttctacctttcgccttcctgcaagaatccctcagggtgaaagctgtgggaactgcaagagctggcaacctcttgtgggctcccttgctatcccttttctttcaaagaaaatctacactgaggacccgaactcctctccaagtgtctgggatctccagatttctccctattgtcttgaagcagtgatggtccaagaaactataggattctgaaccctgaatcaggttgaaatgccccgattttctttgagccaaaagatcttattaacactctttccaaagtagtgttgtctggatccaggtcagaaagttggatctatagacttagctcttaaaatgctttccttgctcgtggcatttcacttactcttaggcatgagtccaatgacgacaactcttgattcattcaatctagacttgttctccccttacttcccaacccaggctcccagggaactcaggcttcccattcaagtgttgtgccttgacaaaatcgcagaccagtttagctgaagtaaaatgtggtgggggacattaatctacggctagaggagcagttagcaatttttagagagcctggtatttgtcttctattctaacactaaatttaaatacttggcaatattacccaccattacagagcccaggggcttcatcctgctagtattaccagctggggcctctgcattttggcaaaggctttatacaaaatagaagttaaaagttgcatccagtcttggatcaagttttgtgggctctgcttctatatccctgagtatcttaaccctctgttcaggcctctatagaggaggcaatgagcagataatggacatgtggttcaaaacttgtacacttaacacactgagacttgagtttccaaagcaagatatcaatttccaccatagcttcatgaggcctctgtggcctcagacatttgtaaaagttgtagtttctgggaggttggacatgaaagagtccaggaaaagtagagaaactatcaggaagaaaagaaagatgcctctgtggcctcagacatttgtaaaagttgtagtttctgggaggttggacaggaaagagtccaggaaaagtagagaaattatcaggaagaaaaggcaacagagctgttgaatttcagagtaaatttatcaggagccaagttttcattgattaattaaaattaattcaggaacccaaatttaatttagttatggctctgtgcctttctagaacttcagtggtgtgttagagtcaagtcttagtgagaaaagtcagagcttctgaagatcctcaggcagggaattcaatgctacccatagtcgtgggaaggagttagaaacacatcttccccagagaaaaactatgggaagtacaaacaacatgtggaggccatgaggggagtgcagtcctctgacgtgttagcctaggatagagggtgacctcagagctcttcctcttccagtctgcatggggggaatgggatggctaaggcctgtgagggttctgatgtgtagggtactccaggttacacaatagaggttccttttgataaagtgttcatcatccaggttcgaactcatgcccttcactcattcacatcattagctacctgagtcaaccagcatgaggtgtatatgctgggagctgtcttggtagttatagtgaccattatttataccctcagacttggcccttattgagaccagcacacacacacacacacacacacacacacacacacacacaaagcagaaagcagggaaggagaggtaagggatcccttgcacactcctcagctaacctagtctacttttccctcctttctgctccccttttccctaaaactcagctccatctctcatagtttgtgtctaacgttcttaaagaggaaatgtgcaataaaagcaatagtgactgttttctttagcaatagctctttcaaaaatcttgctctcaggactgaaaagtgatagatgatacatacatcatcagatacgcccttgacctctggacatctgttcacggtttctgtacttcttcttcctacatggtcatatgaatgattcctgtctgctgaggtccgacctccctctggaatgaacatatacacagaggtgcagtgtgcactcaaggaaggcccacaagaaggctttcttttgacattctgtcttcttttttcatatacttttttcatgtacctctgtgtgtgtgtctgaacccctctcccactgccttgcctttctaccttttcttcagcagtaccctagaaacctttagggactgaaacctcacatctgagtgaccttatgccagcctgtcttgttgaatttgtgtctgtctgtcaggtgtaatggaagtctgtaggagagtgcttaccaatagataagaataaagcatcctgagccattacagaagatcttttccatgcactagaaaccattacttgattctttcacagccctctccagggaaatgaataccaaggaatgtagccatggggtgtacggatgggatcagttactcaggcagagttgggaatcgccctctgactctcattcacaataggctgacttgagcaactagagagactccatcagagcttcagagctttgggtagaggtgaacaggcacagaggcatgggtcgtcaagggatatcattagtgaaataagccccacctcccactacaggatgcacctgtgcaaaaatagtttttatatttcccagggttttggaaaggacccctttcttgaaacatctgtgaggtgagctattaacattcagactggacaggaaaggctggcaaccccaggagcccattccattccttctcaatctactttgctccacacacctttgcatagcctaacgttggaaaatctcaaggaggagggtgtcctggatgctttgcgatcctggttatttgaggagaaatgggaaaatgtgtggttcagcctttgtgattggaaagtaggattccctcttgccttagttaagtaaagcattgggaggtgacagaagaccttgcatggctcagagtcagccttctaaatctcagtgcttggtgcctggaaacagaggtgaagcagacaaaaaggacaggctgaatgatgctagctaaagtagatctggaagagggctaaagggcacggcgtggcatatcagatgctgctgctcctaccacttgccatttcctactaaatgtatagaaagacagtataattcttgtcaatcaaggttttagtccattggtcctgagttattagaggttttccatatatacatatacctgtgtatatatgtatggtatatgtatatatgtatgccattatttcaaaaatcatccacaaataggcggtgacaaatctcctcagtttcactaatgtggaatacatttgacattctaaggaatacgctgcatttacttgaattttaacatgaccttctttgcattcttttcacctccccagttctgctcttttccgcttaaaaacttgtctagcaggcatttattcaaacaaaagaacaggctcagggtcacctctttcccttccctgccagagggaaaggtcgattcttttcccttcctgcctcaaggatcaaagggaatcgagatcccagggccaggtgctttcttagcctttattctgtccgccttggttggctgtaacctaatctctaaagactagaagagttatgcccaactctgtagctctaggggagtgggacactcagagacttggctcagcactggtctatttagcttcctcttggtcagtgttagagtcctagggttggctttcatgaattctgaaatatcctccatgaaagggaggggggcggggatgggctttgtggcctttggtagaactaaatcacatgtagctgagtctgatcaaatgaaagaacagagggctgggcctagagcaactaaaacccacttgtgtctttggagatgagctgtagactgctgggtgggatcctaaatatgccctccattctgtcttgcctagcagtgttaaagtcatggggaaacacttttctaggcctcatcatctcctttattctgtgtgcactttacttagaagtgggtgggagggattcctcactagtatctgaagcagttgaggtgatacaggggtggctgtcatttcccccacattcccagaagctcgacaatctggtcaagtgagccatcatccagtagtagaagcctttaaccttgactgagcgtgaccagccactaagtgctgcggttgaagcagcctgtctctatggccatttctcgtcctgcatgagccctagcatggaaactaatctaacttcccgtgctcctcctcactcctaaaatagtcagatatgttccagctgagtgtgccgctgagaagcccttgcatcattctcctgacggatgcatagggcaggtgtgattacataatactgtggacagctgctgcagcagctacataattaaggggagtagagaagtggctgggtgataggaccttaggtagttacccagaggactatatgctgtgtctctgggtccttgggagaggcctccaggccctgcttctccttgaaaatgactccctagacg

SEQ ID NO: 928 - DNA, 650 bp, Mus musculus
tgcgtggcgcggtgcggcgcggtgcggctgcgggcggcggccgggcgcaccaccgccaccgcccgctgtccgggttctgcctgtgctggctgccacccaggaacatggaggctctggtacccatctgcaagggcaacgtcacacctccggaggacagccaggaggactcaggcttttgctgagctgtgcatcttgcctccttccttccaaaggcttcagacccaagctccactctcctcctcaagtcgtggtgcgcgcccctggccaagcatctcactgtccctcgagccccatccagtcctagagcacacctccaggacctgccctcctgctcagaatgactcaccattatttccagctcaagtgagaagatgtgacggggactgagctgcctatttgtgtatctgtgccatcagatctgctcttcgaagaagagtacctcaggctcctgcctggccaggtaaatcaaacaatcacttagtagcagtcatatagaggcaatgggggtggcatcagtgaccaaggcccaggtcccaaacaccctaccatgaatacctcctttggtgcaggtattgccaaaacattagcacagtgcctggcagagggctcccttctccactcctcctgtgcagctatgtccccagcatgtg

SEQ ID NO: 929 - protein, 128 aa, Mus musculus
CVARCGAVRLRAAAGRTTATARCPGSACAGCHPGTWRLWYPSARATSHLRRTARRTQAFAELCILPPSFQRLQTQAPLSSSSRGARPWPSISLSLEPHPVLEHTSRTCPPAQNDSPLFPAQVRRCDGD

SEQ ID NO: 930 - DNA, 48557 bp, Homo sapiens
agtccttacaacaatgcaaaaaccttgaaaagtgttactatccccattataggatgagaatgtgaagcagaggggtcataactcacaggaagtcgtgtggctagtgatggtgcagttggagaagtgcgtgcttctcctccttcataaccattgcctacccaacattttaaatatatttgatattgtctaaattgttttccttaagaataaatgttttatattgacatattttaactgactcatatttggttcataatcaggcaattctattttataaacagtctcaatctttgttttcttactgatccatttatatacaccctctcacactccgcatttctgctactaataccaatttctttttttcttttttctttctttctttttttttttttttttttttttgagacagtatctcgccctgtcacccaggctggaatgcaatggcaccatcttggcacactccaacctccacctcccaggttcaaatgattctcctgcctcagcctcatgagtagctgggattacaggagcccgccaccacgtccagctaatttttgtatttttagtagagacagagtttcaccatgttagccaggctggtctccaactcgtgagtttgtgatctgcccgcctcggcttcccaaagtgctgggattacaggcgtgagccacctcacctggaccaatttcttaatattctggcttctcgcagccatctagcctctttctctagttctcttttctgatcttaattcatgcattaggaagataggcaggactgaatgcgcttggtatctcatctcttcccttaattctacaaagcctctcaggtcttcccacaaccctttgctctaccatgctctctcactctgcccatcccagaactctatgcagatggctcttccaggtcaccagcagcccaaaagtagcctttccttgggtcttacctccttgacttctccatcttttggcatccatcacactgaactgccttgcttctcctcagtagcaattattcctcttcagtcttcttcaaggctcctctcagctgcctttcccctccatgtcctgtctcccaggctcagcccttagtccttcttacttctcctataatttcttctcaggccatcatatacattcccatagtttaactctatttgccactaactcccaaatccatatctctattcttagcctctctcgctttagctcctccatttccaacaatctgccagtcattgccaccaggatgactcactggaacttcccatccagactgtccaagtaaagcattttctttctccagtgatttggccctttcttctgacttccctatctctagcagataccatcatgcagatagtcacccaggcaaaacaaacaaacaaatgaacaaaagttgtcgtctttcatccctccatcttcctcacttactgtagtctactagttttaaaatataaaaagattctactcctgttcagaaagccttcagtggccttccattatctgttgatgaagtgccaactcaccctgcctttgcatcccacactctccagtgatagcccaacaccctttctcacccaagcttcctccaaccaaaatagactctgtcctgttctcaaatatatgccaagattttctgcctttctgttctgatgtatgctgtccctgatatcttcttctccaacactcaaaaggactttcctctcttcttacaacttagggtcttcctgagtatttgtgatatttatcatgttctactccttgtttttatctgtctgttccacctcctgaggtagaggatgggctccatacttgaagcacctgtttccccaccacacttacataccttgtgcacagcagatcctcattatacttttgatgaattgaattcagttggggctcagcagctgtgtaagaagaaccaagtttccaggaccctctcctctcctgaaaccaggcagatattctattacttgtcccactttctcatcttaaaaatgggcctctgtttttcccttatggtctgaacatctaccgtttacctctgcaagcagtgaaaagtggtcagatctttggaacaatagtcatagctactgagcactgcccatgtgccagacactgtttgaagcgcatacatgttttaacttctttaaacctctcagcaaacttgtgaaatagacactgaaattcccattttacagatgaggaaactgaagcacagacaggttaagtggcatgtctaagcataaacagctagtatggagggaaccagattctcaggcaggcccctggctccagggcctatgctcccaccattttgctataaggaaatgcagatttgaaaagaggagattttacttgtaggtcttgatgaccccaatcccaaaacccagagcctggtttggtcttcacaggtttgacctaatgtgtacatatgtgtatctgattgtgagtgtatgtgcagtggaattaggggagagccacctgtctttgcactctgctctttagctggtgttgttgtgtttgacgttatttccccaacacaagcttcctggaagaagacggtatcttccatgattttactctcccactggagtctgatctagcgcttgtcatctagcaagcgacccacaagtttaaggctgaatcacattttcacatataaagtcagtgcccaagccatgtctctcatttgaagcttctgttgtctgcccccacttctcccagcctcctgacacacacccactctctcacagagcaggtgcacttcagcagaatgtaagcaaatcagtgctgaatgtcaaaacggattttactcaattattaaattgcgagaaccaggagaagagcaaataaatatcccaacaaagttatgctatgaaatatgtgaaacccacccagatctaatatttaatttagactcaactgtctcaacagctttctaccatcccagattccagccaaaggccatcagacatggcttggggtgaaaactcggtagctatacaggcctaatgcaaagaccaaggctgaatgatgggccacccctcagggacaggtgcccacaggccagaggctgaaaagcttctccaaagatgccaattagctcaagcacaagaaccaaagcctgagctctgacatctgcataagtcaggctgctgggagctttgcctaatgattctgcaagaagaggggctctgaaccagcatctgcctcctgctgcccagcttcctcagccagccagaagggagatacaagcaccacctagtgctgaggtaaggggaccggtcattgacagctgctcactggctgtgatgatattttaagtatcaaggctacagtgaatgccgaagaggagaggggagggagaatagaggagtggagaagcagcaggggaaatagattcagagcatgaattcccagctcattcaactcaccccactgcacccaccagtcctcagcactggtgtcatagcaccatcctcagaggccaggaggctggcttcctgcagcctccaggcctggtgagccctccctctcccccaagccttttcccagcctgtctggcagacatgcggcatgtactgctgtgctcacggccagtagacccctgcttcccctcctgtagtggctctctgagaataaggatgtgtctgcccttggctcagcatctcaagcacataaagcagattctgcttccagaaccagaaaatacatgacagttcaagacacagaactgactctctcagtcactccatgccgctccagcagagggcttctcaggggccaatggaaaccagccaccaaaggctgtctcatcaggctgagtccagaccacccgaagggaacccataccacccaggccccacccaggggcagacccaggacccaggcaggtcctgaagtgctggaccactctgtcacagagccaaagtatgggtatgggtttagctgtctcccatggctgctcagcctgcagagcctactgaagggcctatccagctaccaagggaggacatgctgccagtgagctccaaggagccctgcagcagagcaggaaggggcaggggaatgctcccacccaccatcagctagggctggaactccaactcactctgagcacactgcagcctcccaagtggatgtaggttactctggatgtaggttactccaggtgacacattcttttctacaaaatttctttccagatcaaatctaattttattttatttttattttattttacttatttttgagacacaaaatattttacttatttttgagacagtgtgttgcccacactggagtgcagaagtgccatcacggttcactgcagtctcgacctccctgggctcaggtaatcctcccacctcagcctcccaagaagctgggaatacaggcatggaccaccatgcctggctaatttggggtttttttggttgttgtttttttggggtttttttttgtttgtttgtttgtttttttgtggagacagggttttgccatgttgcacaagctggtctcaaactcctgggctcaagcaatctgcctgccttggtctcccaaagcactgggattacagacatgagctaccacacctggcctcaaatttgattttaatgagcatcaagagaagctctacaccaacacctttgacttggtcattgggaagggcccaaggagtactgctgcatggcccacttatttcagagttcttggtggctgtccctcctctgtagtcctggctaccaccaggtcatgcagcccctctgcaggcccagcattggtgatagagctcccaaggctacctcctccactgttggacagcatttcaccagctaagagttggtgagcgctcatggtgtgcttccctccttgccagccattttccaggagttctttaactcatggtaagtattattattattctcatattcagataaggaaactgtggcttagagaaattgactcctttctttaaggtcacaataacttaaaattggcaaagccaggttacaaaccctgggttcttaactagaaaagggttgcaaactacaatacctgcagacacctgggaatcagcgaaactgtgcaaatgtaagaaaggtggaggaagtagcacttgtgaaaaaccacagtgcaactgctttattcagaagaggcagctgccacccacgtaccatttattgttacatgagagagtaggaacttgggtgatcagatcctccgatttttaaaaagaggctatccatatagatttgtaagcataatctcccaatttgtgctgatgactgatgcaagttttttaaatcccagggcagagcaggccaacaccaagtgggttgcagacccacatctgtgagcaggattcagggtggtgcccattgtgactctactctagagtccaagatcttaaccattagactttactgtcttaaaatatcagctagctttatctctggtgagtcacaatttttcttcctattatctccatctattggcctcagttctgtcatctagagcaacagggattcaaaaaacactagcctcctatgcccttttctaggctaaacatccccagccccataagcatccccattttggcttggttgcaggacctttaccatgcaggccccatgattctaggcacgctccagacacactcccaccagctcacaggactccccacatccactgtggaactaagtcctacccatcatgtctggtctgtgtcaagcagagcaaagcaggcttctagcccactaggactcatctgagactagaacccaaagtcacctggcctccttggcagctaagaatttgccttagtttaattgaagagatactgaccccccaaacccagtgggaggcttcttggcctctgcagtgattgtcaatttgtgggaagtgacatcccaaacaccagcactttcccatcattgtcctgatggtccacccctatccttgcagggactgttccagggtcagccctttaacacccatggttttcaggcccacacctgaccgatcttcccttctgagaagacagccatgacaccaagaatccctcttcttataaaacaaatctcaagctccttccagtatctctgtctcaatgttgagagattttcccacgattcatcagacccactctaagattcacccccatttcctgattctcactgtccagaaaatgccatgtgccagactatgaacctggctgtagccacctgtggatcagaaaaaaaaaaaaaaaaagggcgatgagtcaaagtaaggatccagagggtcagagaagtatccctggtggcttagccaaaacctccacacccaacagctatgggcttcaccatctgagtacctcttttgattccagtcccactctcaacttccctcatgaaatgaagaactgcaaatacggtaacctgctatggaaactgagaaaagcaaagcagcctatcttttattctcgctctgccttctggtccttccccggggccactggggctggagctgagccgagcagctgggttttcccctgagcagtgactcacagatgtagtttctctggcacaaatcttcagaacagtcccagctgggaagtcttcctggtggccaagtgatccctcacagctgccagcctggcaacaagggatcccagctggtgctaagtgatgaagaacaggtctgggctttgttcctcagctaaagaacctgtctgttccactcactggatcccagatgtaattcatcatcaaggtcactgaggagcacccaagcccttggcccatcaataccacttcagtaaagtcagatttctgagaggcgtcacaactaccactaaagagcatcagctcattgccaagtgcattacagaggtcctggcactacccatgttcctgccaagtgcttaggcattaaaattgactggggcaagcagaagggacacactgccaaggatacaccctccagtacaggaaggcaacaggctcacgcagtgtcagggctaggcaagatcatgatttttcacagttttaggcagcagaatcctctttccaaacaaaatctcatgcagaagtctagaattctggcagattcaagggtagctgctcagctggagaccaaggtggggccaggaactgatcccctgcagattccctgtaatcttcccaccccccagctctgcaacaccacccaggtacctttagcctctttcactgaatcgctggggtccacctgacaaggctgaaaacttgccactctggtcagcctcttggcattcagagggggaaactgaggctggtagaatatgacatgcatttcccaaggtcacatggtgaatatgtactacaaattcaggagaataaaaagtcttgtcaaccaagcttttagtgaaccagaacatctgtacagaccggcagtccataagggttggaagagtaagtgattacagacataaagttaatttttattttgtctcagccacttttttgctgcctgtcctcaggcaagtcacccaagtccagctggcctagggctggattacatccagtggccttttgaggcatcccctgctcatctttcattatctagaacacgacaagaccccctctcagagctgcccacccattccctcctcagccatcaaaggccttggcacctggctcccaggcttcccctcaaattcagttatcaccctgacatccagaatcctggggaccaaaacctttgaccttttcctctccaggctcctacaccctgactctgcttggggaccccactcaaggccacatcctgaactttgacgggacttgcactccttgggaattttaaactcaaacatcccactctcacctctctgccttcaagtttcttgcttctgaatcccatatgcatggtctctggcatgtttttgataccttccacccttgagcactgtcttctctccccagcctatcagtgtcctgctgtcagcactcccaccagtccagtagcccagaacccttaggcattgctttaagtactttcttgcaagatttccaactccagcaacccccttcctgctccctcaccagcacagtcccaccctgcatcaataacatgggggccttttcactcctttacccagtctaggggtcccaatagggaaaatcccatagccacaaggagaggaagtactgccacgtccttccttttcaccaggatctgggcagagttcggtctgtcttagtgaagacctttcagttccaggtgcctgaggaccctaacctcagccagcctctgtactctcagccaaagccaatcccaatccattctcacctcctaccatcaaagaagtgtcccaggtctgggccaggcgaggtggctgacacctgtaatcccagcactttgggaggccgaggcaggtggctcacctgaggtcaggagtccaagaccagcccggccaacatggtgaaaccccatctctactaaaaatacaaaaattagtctggcatgatggtgggctcctgtaatcccagctgcttgggaggctgagataggagaatcgcttgagcctggaaggtggaggttgcagtgagccaagattgcaccattgcgctccagcctgggcaacgagagcaaaactccatctcaaaaaataaaataaaaataaagaagtgtcccaggtcttatctgagcatggcccctccacctgtgctctgaatcccttcttacttctcccctccaggaattctctctccttattttcctgcatcttcaactactcattttgtatctatttctctccataagtttcttccatgttaaaacaaatgaaaaaccttaaacaaataaaaccttgtttaatcctacattcccttcacctaccacctaatttcatcattttatttacaatcaaatgtcttcaaagagtacctataagcccgttcctgcctcctcattgcccactcactcaacccatggagctccgcctctgcccaacatggctccactgagactgtgacctccgtgttgcttcctccaaatgacacattcagtctcttcttgcctgacctctcagctgcctttgagccagccttcatctgtggcttccaagacatcactctcccctgattcctcctctatctatggctgtaccttctccatttccttttctggctcctccttgtctttaggcttttaaatgttcccacttttctctcttctcttctacatgcacccctaccccctgcataatctcatacatctcagaggcctcatccgtacagacttctagatccagcccaggcctatctcccaagctccaggcaggaacatccaaatcccactgcactccccactcaggtatcccatggacccctcagactcaacaggtctacagggcttgtttagcctactgactccatccctgcagtatctcttttcagttcatacccacatcttctctgtctggaccactgcaacagcttcccggcaggtggtctccctacccctgcagtcattgccccctcagcagtccatcccccacagcagccagagtgatcttccttaatagaaaaatccagtcatgtcacctctctggcttaaaatcctttaagtttcccctacctccaaagtaaagtccaaataacgttggcagagccttctagaccttgtaagatctggtccctgctaccctctccatacacttctcttttattgcttgcacactgagctccagtcataatgaattacttgtacgcaactcccttcgccttccctgttgtctcctgccatgttttccaagtgctgattgctctttctaactctgcatggctaacccacccctgctagtctgcagtgctcagtttctgttttaagagaaaaacccgttcttgcactccctggctggggtgacaggaaacacctgaagattgttgatgaagcatcatgcaaccaggtcacctagaacctgaaaccctttgagcgctgaccaagaaaggaagtggtgatggggcacatagaagagtgagccatcatctggtttccagcgccaagacttctgcaggagagcctccgctgggctttcaagttggtgagagaagaggaggggcagcaagggtgagcatgcatgtgtggacataacaggcagggaatgatgtgagcaaagacagagaacaggaggtgactggtaggccattgctggggtgcagcaaagagtgaggtgagctgcgatggggagacacctcaagggccagacaagggatttgacaccttcatgaaaagcaacccggggatcagtaatggaatggaggctaaaggaaggcactccaggtactctgcgaaggattgtgaatgaggaccttgcaggtgtgaagtgactctagggtgaggggatggggtctgaggcttggaagtggaaaggaagggaccaatcccaaagcattaagtgtaactcccaaacagccgaccaaggccagacctgtgcttgagacagcagccctcctgcacggggcgttgtccatccgtgggctttgtgctgccatctggtggtggtggaaaggaagaccaggcttagtggttccggggctggctgcctggggtgtggccaggtggatagatgattgtgagtgaatactggagtttgctgaggctctttggggagtgagcagggggaggcagtgacaatggggtcctcaaatccatacagcttttgaaagatgcaatttcttggcacttttgattgtccctttttgcacagcacttagcataaggtctgtttcaaagtaggtgcttagtgtctgttgtttttctcaattataataatgacttaacaattactgaatgcctaccatgcgcccagtgcttatgtattttatctaagttattcttcataacaactttgagatgaagatgacatgatgattttgggtaataggagaaagaactgaaaccatgaatccattgaacagcttggtaaatatttactgagcacccattctgtgtcatgctgtgctgggcactggggacacggaggtgagtgccacaagtaggttctgactttctagaacttggaagagaaaagggatgctatgcaaataatacatagtaactcatttattttaattgtaactaaatatcctaaaaaggagaaaaagtacagagcactggccgggtgtggtggctcacacctgtaatcccagcactttgggaggccgaggtgggcggatcacctgaggtcaggagtttgagaccagcctgaccaacatggagaaaccctgtctctactaaaaaaaaattacaaaaattagtcgggcatggtggcgcatgcctgtaatcccagctacttgggaggctgaggcaggagaatcgcttgaacccaggagacagaggttgcggtgagccaagatggcaccattgcactccagcctggacaacaagagcaaaactccgtctcaaaaaaaaaaaaaaaagtacagagcacttagagatgttaactcacttttgagtccatttgatttaaaaaaacgcttcttccagtcaaacctacccaccactgcattacatgaattcaaatgataaatgaatacccttttctttcttttattcttcagcttttacttccctgtgtttaattcggtctcctcgtttttctctcgtcttaattaactcctgttttctgccaataccatacatttctgtctgttactatcatcatttgttgaatgagtatataaattaatgagtgaattcactgacacatttatgccacaaacaggtgtctgtcatccaccgagggtcagacaccagatgctcagtgtgcttatagatacacagttcctgccctcaagttgctcacaactagtgaggagaaaaacatagcaacaaataatttaaagtgctgaatacacacaggggaaggagagagtaactgtgctgaggaagaggtgcctcactgagctgcttctcagggtagtctacaaacgttaacagcatctggacaaattccagctatcacaccagatcctttgataaatgttctacagtggcacctccatttatgttgtgtcagggacataggtctcattattaattttctgatatattgagacttattcaatttctataataaaaatgcatttccaaaaccagtagttcccaaactttcatatccattggggattgtctggaatgatgatcttggggccattggtggggaccttaaaaatcactcgctgattggggatcatttggtgatttggtggtaattggggatcactaacagccactaaactcaggctctcaccccaagacattctgatttaatttatccaaaatgtgacctcagcactagaattttaaagcttccccaggcaattctaatatgcagccaacatttgggagccattcttgaagatcctcagggatctagcctgggacatgaatgatatcaaatgcaaatttgaggagaacacatcaggtcttgctgccaagaaagaggtaaaaccaggcatggtgcagcaccaccatgattcccaggggaatcagctctgctgagctctaaagcaatctacaggattatgaagctgtgtccatgtattcaataaacaatcatttagtatctacttttagcacaagtcagtccatctctgctctgaaggatctggttgggggagagaggcctaaaatgtacagacgaattctgtgggattggtgataatgtgtgagaagtctagagtgtcaaagaagcactgcagtggggcatctaatctgacctcctgccttctttcaagtcatcacctcttgtccagtcctctacagagacgcctcaaccaacaaatatttatggggcacctgtttaagtcaggcaccagatgccggacactggacaaggcccccatcaggcagtacagagatggacacaatgggtctctgctctcaaggagttcccagtctggggtgagggagttttgctctctcatttctcttatgcaaaatagctttgtgtgagtactgtcaccaagtggaaaccagtggaatacggaggatggtcaggcccattctaacacccaggaggcttcttcacagtgaacctaacaagatgaatggcgtttcagagggcgatcatggaagaaggggacagcatttcattccccacccactttgctgcactctcccactgctccctctttttataaagtccatggatcaaaactggatgcaaactcccagtcaagatatacccagtgtggaggacagaatggagaactgcttcctggcctttgcagcacccaggaccattaatgctcagggctaaatactgtcttttcccccatcagggcacaagaacaacttgtgatcagttaaaagcccttcaaccatcaccatcatctccaaacaataagactaacttgggagttaacagtggccttttaatcatccatatcttagtgaattcaagaaatgaggaaattcagtgttgcccaagagtagtccctctaaatatgtttcccgcattgcattgcactactttcagtaccctcttttcccacttcctattcttgctatgtcacttcctgtccacctcataggagtttctccctcttcactttgtccccatcaagcctggcattattattattttttttttttttgagacagggtctcactgtttttccaggctggagtgcagtggtgggatcgtggctcactgcaatctcgaacttctgggctcaagggttgtattaacattttttataattatgttagtcctagatgtctcttgttttattttagattccttcttcctttttgttttcctttcttacccactttcttcagacaaaatcaataaacatttattgagcatctactaagtgctgggtccaatgagggagcacagagagaaacccaggagctagccctagccctggaaaccgttatgatctaactgatgaaataaagacaaatggagatagagaaagataacatagcattggctggcatgatgttgtccgtataaacaagaggcttgggtggttaggacttcacacttcaagggagggagacttcaacatgggcagtggataaaatctggtactataaggactttgtgactagccaataattgaacacttactatgtgccaagcggtgtgccgagtgttttctttccagcgtctcattaatcctcaacaactccatgaaataaacattttaattattcccatttactgatgattaacttaaagcttccatagattatgtcactttccaaggttaccgagccagaaaggagctgagttgggagtctaggccaagcctgtctgaccctagacacgaaggttttggtcgtggtgctgcaccatgtctggttttacctcttctgttttcagtttcctgtgtgtgtgaaacagagacagcaattcctccttcacgtggttgacggtaagattaaatgagatgcaataaagcacttagtgcaatgcctagcaaaataggtgcccagtaaacagaggtatcatcatcatcgtcatcgtcatcacattcttcttatactaagacttcactggagatgcaggaagagggccttgaaagttattaactggtaggggtgggaattccatgcagggaggtggaaaaaacaaagactcaggtcccagagcacatggtgttgtcacggaaccagaaccagtctggtctggctggtgcctgaggcttgtgtagaggtgagggctgagataaagctgggaaattaagactcttgaggacaggtgtaggagtttatacttgattgtgtggactgtgggaacaacacttcaacatggttgtgtatatacgttttctaacatgcattaatggtgaaatttaagagatttttactttttgctttgaatagtaatatttcacataaatcaaaaaaccaaaataataaattataaaaggtacacactgagatgtctcattctcactccgccctgtccactccattccataatccctgtagataaccaccgagattcatttcttgtgtatcgttctagtattttttgtgcagatatgaacaaatacaaatatatctttcccttcctctgatttttgtactcaaaagtagcacactaaatacactgctttatcttgcttttttttcactttataatatatccagagcttttttctgtatcaaaacatagaaatactcctgcttcatttttatagtagcatagtagtccatgtatggctataacacagtttattttaccagtcccctagtgatagacacttgggctgtttccagtcttttactattacagatcatgcagcaatgaatgaccttgtgtatatgtcattttaatatacttaggtgtattcatagaataaattcctggaaatgtgatttctgggtcaaagggtaaatgtatttgtagttttgaaaactgttgccaaattggcctccatggggctgaaccaattaacactcccaccaacaatatatgaatgagagggcctgtttcttcagagcacagaaaataaatatatggctaaacttttgaatttttgccaaatcaataggtcaaaaaatatgatgtctcagtgtagccttaatatgtatttctcttaattatgaatgaaggagtgtatcttttcacatattaaggagcacatgcacttctttgtctgtggactgattgttcattgccatttcccactcttttattgtattgcttaccttttaccttattgacttctttcagctctttatatatgaagattagccatttgtctggataatgagttacagatatttttcccactttatcatttttctttgaattgtcttaccatattttttactgtgcaaaagttttgttgttgttgtaattgaatttatcaattttttgttttatggctttagttttatgagtcatatattgacagatattctttatgattataaaatatttccctgagatttctcctagtaatagaattttactttttacatttgaatattcagtctatttggagtttatactggcagagggtgtggtgtggctactcagtagtcattataccatttattaaaaagccatccctactctcattgttatatgagatgtcacctttatgtatacaaatttatatatgtcctcaggctatgtctgaacttcccattcaattccattggtctgtatatttatgtgctgggaccaccacactcttctgattattgaggttttacagtacggaataagtagtggggcatttccctacccattacaaataatgtatttacactgctctgggaagattgaaggggaagctgactgaaggtagcagacccgttagaatgcttctgcaatgggccaagggctgagtgagggctgtgtggccagaatgggcagaaagaaaccaaagtatcctgactctaaaggaagagttgccaagacttggagatgaagtcttaaaaatgaaggaggaagaagtcaggatgatgccaaggtttttctattggcagccccaggcttattgattttattacttctgaatggctgtaggacctataaagaatcttcaaaataagaatgcctttccaatcagacttttcaccgatatcaacctccatctccaagacttgccactatttatggtcttacaaaatagtcctgaattcactcttgtttaagttattatatttttcatgataaatgtagtgcagattattgaaaatgtaagaaataaagaaaaaaatccactcgcaacacaatctcaacataaccatttttggtatgttggcacatttttcccatcatttttcccagcatgtgtagtagttgttgttattgtgtagttttaacagctttattgaggtataacttatacactacaaaatgcattcatttttagactaagtattaatgttttggtaaatttatagatttatatatccatcacccccaaaagttcactcctgccacttgtcagtcaatccctactcccgccccaagccccaggctaccactgttctgctttatttctctatagatgtgccatttctggcaatttcacaggagtggagtcatatgatatgtgtttcttatgtctgtcttctttcacttagcatgtttgaggtgcattcatgttatagcatataccagtagtctatttcttttttattgctgaatagcattccattgtatggatatagcacattgtgttaatccagcagttggtggacatttggattcctttctgtttctagctatattgactattcctgctataagtattctcatataagtctttgtgtggacatatgtttttatttctcttggatggatacctataaataaattgctaatatagtaggtatatgcttaactttgtaaagaaactacaaattatttaccaaagtagattcaccattttacattttcaccaacaatgaatgagtgtttcaatttctccctattctcaccaacagatgttatcctcagtcttttatattacagttttgtagtgtgtagtgatatctttttgtgcttctctttttttttttttggcttcactgttctgatcattatgctttaaatttgtatttcataatgactaatgatgggaatatcttttcatgtgcttattatccattagtatatgttctttggtgagatgcctattcagttatcttgcccatttttaaatttgtttttcttttttactgagttatagaaattcttcatatattctgcatgtgagttccttgttagatggagtgagaagagcagagagggccaggtgcagtggctcatgcctgtaatcccaggattttgggagtccaaagcgggaggattgcttgaggccaggagtttgaaaccagcttatgcaacatggtgagaccttgtctctacaaaaagtaattttttgtaggatttgctaatatgttttcctagcttggatctatgttttcattttcttaatggtgtctttgaaatgcaaacgtttttaattcagcgaggtttaatttatcaatttgttcttttatacatcatgcttctttagcgtcatatctaagaaatctttgagtaaccgaaggtcacaaggtcaaaacattttctgttttttctagaaattatatagttttagctcttttggttaggtctaatgatccattttgagctgatttttgtttatgacattaggaaaaggtctatgtacatgtgttcatgttgcatatagctgttcagttgttccagcgccatttgttgaaagacttctttctacctttgcatctttatcaaaaatcaattgtccatatacgtgtgaatcaatttctggactttctttactactccattgatctatttgtctatcttgacaccaataccacattgtttttattactgcagccttgtagtaagtcttgaaataatatagtattagccctctaatcttgttctttctcaaaattgctttggttattctaggttccttgcagtattgtatagctcaatttgtcaatttctgttaaaaattctgccaagatttttattgagattctattgaatatgtggattaatttaagaagaagtgatgtcttgacaatattatcttctgaccttggaatgcagtctatttttccaattatttaggtctttcatttctaccattaatgtttcagaattttcagtgtataggtctttcacatcctttctcagatttgtccctaagtatcttatattttaatgctattgtaaatggggtttttaaatctcaatttataattgtttgttgtatttagaaaaatgattgatttttgtacattgatcttgtattgtgacatctctctaaactcacttatgaattctagtagctcttttggtagattccattggattttctacataaataaccatgccacctgtgaataaagataattttgcttcttcctttacaatctagatgccatttatttcttttccttaccttattgtgctgggtacaagctccaatagaatcttaaatagaaatggtgaaagcagaaatccttgtcttcttgattttagaaggaaagcattccgtctttcatcattaagtataatgttggctacaggtttttttatagatgtattttattaggtcaaaaaaactccctttattcctagtttgctgaaagatgttatcacaagtgaatactgaatattttcaaacatttttctctgtctattaagataatcatgtggttttgctttttcatatttttcatatggtgaattacattgatttcttaaagttaaaccaaccttgaatttctatgacaaactccatttggtcatgatgtattattcttttcttattattttgtatttgatttcatacgtctttattcggtttgtacgtctatgttcatgaagcatattgtcctgtagttttctttactggtgatgtttttgtctggttttggtataagtgtaatgctggcctcacataatggattgaaaagtattatcttttccattttctaaaagaatttgtgtagaattatttcttccttaaacatttggtagcattagtcagtttagcatctgaacctggaattttctttgtttttaaccaagaaaattagttaaaactaagcaggttttaaactacatatttattttttaaataactatggggtactgggttatttgtttcctttgtgtgaggtttggtagtttatgtctctcacggaatttctccatttcaaccaagttgtccaatttattgtcatagagttgtttagaatttccctcattgtccttttgaggtctgtagagttaataatagtaatgtcatctctctcatttctgatattggttatttctctttttttctggttagactggctagatacttatctattttattaatcttcttaaagtaccagttttgatttcattgattttatctattgttctctgttttatcaatttccattctaatctttattatttccttccttctgctcattttgggtttcacttgctctcctttttctagtttcttaagttggaaacgaggtcattgatgtaagatcttcttttctaatataagcatataattttatcttcactctgccatggctagaaatcctaccccttgttgttgctttttaatgaagttataatcaggctgtatatacaattttatgtattttattgggctaaggcattatgccatgtgaagctatggttaaaattagcacactaatccattttttatggaaaccgttaaaaatattagctaatgaacacttacccacccagcaaacaaggagtgggactctgcaggacagagcaagtcagtcaccaaagccagtatccgcacccaggaatccccagagattggttgtccaagagggtcatatggaggcacttcagttattttagaatttcaagaagcctgagagaaagtcacactattacatgtgacaagcctgcccaggcaaaacagaatgtcaagtgactctacttggggctgaattctcacactttagtgagagtgaggcagtccacagcctctcacgccagccagaagctatgttggttgttacaaatgttcaggttgttaacggtggatagacgcactcactcatcattacataataagagcagtttgttttgcaggcaagatgatccaacacacggggccgctgggggtgtgtgggaaggatattttaaaaggaactttcagtgataatgaacaaaactcaggagctatgtggatgacaggagcacctagatgaccgactttacccacttcaaatgctaccttgaccctagcactctctccaccctgcatcctcacctcagaccatctgttggttaggccaacagctcaccatcaattcatgccctgcctagaccaacagctcactgttcatgccctaccctgccctgcccagccctcctctctggccttctgccaagtggggttcttaacagcacagccttcacctccgagaaggcgcaatgggaaagacaggtgagacgatgggcagccatgcctgggagacagagtttgctggctacggtgggcagacgttcccaccaatcacagtagaccacaaaacaacaggaagacctgggctgtggatggggcggtgatcagtgagttcctggaacccgtgtttgccgggtgcacccaagaagagtgaggggatctctaagacactgtctacactgagagcctccaaggctaacctgcctgacatggttcacacagagggaaaggagaagagagggtctgaaaggagaggccgggatgtgtgaggacaggggtatgttagggatatccaatttggtctgggggctgagaagtcttacccaccaaatttctctctctctctctcactcactctctctctctctctctctctctctctctctctcgctctcgctctctctctctcattaagctgctctcaggaagctcacacaatcgcagttcacagcagcatttgctacagggcacgtgaacagggagaggtggtctcctaggacgttaagtcggcttggagagactgggagctgtccaggggagggctgaggagtttgtcaggcagagagtgtatgttacttaaccacactaaagcttctgtttctgggttttgtatttttagaatgcggaaggggaggtgttgtcagagaggtgacctcaggtgactgaaagtgctggggtttaagggcttaacaaataggtggcgaaaaatatcaaaccctcaaaatctcccctgaccttttatctcttaggacccgggatacgggatgcgcagggagccaggcgcggctggttaagaagccctgcctgtggctgtccactcccggtctctccctgctgcgtgggcgttgacggccgcagccctcccagattgccgcattgccgcccgagccacagtgtgcagataccgctgcatgtggcgccccctggcggccagtggcagctcgtgcgtctgtcttttctgcagagctgatttccaccttgtatgtgtaggaggggcctcctttacaaagaaccagccatacccttgggagtgggagcagatttcatagccgagacaggagaccttgtaagaacttcctatgtgccaggcacaaggttaaaaccggtattatcatacatgcattcattcgttttcctagtgtgtgccaggcatctcctaggaagtaatgtgtaagcagaggccccataaaggaattacataaagtaatgtgtaagcagagcaagtcatgagcatgtttgggggtacagtctcccagggagtggggacagccaggccacagggatgcattctttgggtgtggagaccaggaaggaggcagctgcagagggtggttggaaatgaagtcagaaaggtgtccaggggacagacggtacagagccttctgggccataggacttcaggcttagttctgagagtagtgaacaactactggactttgaacaaaggcataaaacaactcgatttatgttgtttataaaatcactctggcttctgcgagggcatgaataggaacagggaggcctgtgaggagcccaggtgagagtagagcatctggggccaggtttgcttcgcctgccggaagagataagacatctggttcagaagatggtctgaaggcagaggccataggaatccctgttggattagccaaaggctgtgtcccggggtttgggcctgagcaactggatgagggaggagtggtgctactcagagggatgggggttcaggtgtgggggcatgggaaggaagcaagaatttggtttgggatgtgccatgtttgagctgccaattagactctaagtcatgatgttcggtgcacctgagcagggctctctaccctctccatcctctccttatgttcctttcgtggctctcctgggtctttttcccatctgagggccacccaagctgcctcatcctacctccgaaaggaaaggaagcccacacagagcagcaattccacagggaaagaactgagggaaggcagccacattccagggccacaccctaactggacggcaaggtcagaggcagtcagggttctaggctccactctccagagaggaattaaaagaggataaaatgccttttctcacacactgacaggtcactcacatgtcagccaggagtgcagtggcacgatcatacctcactgtaacctcgaactcttggactcaagtgatcctcccacctcaggctcccaagtagctaagactacaggtgggtgccatcatgcccagataatttttttaaattattttttgtagagacagggtctcactatgttgcacaagctggtttcaaactcctggcctcaagcaatcctcctgctttggcctcccaaaatgctgggattacaggcatgagccgccgcacccaggccctctctgctcttctcactccatctacattctcatcctgggggatctcattctcacccttggcttcaatgacccctccatgatgatgactttcaactctccattccctaccctctacctctctcctgagcatcaggccagcattgccatctgccctgttgacaaggaacaggcccatcagagcagccccacaaacccccatgtatgtcagaactgcccaccatgtgagctccatccctcgacacatgcatgagtgcacacacacaggtgcacatgcacttcgcacaccacctctctgaagccctgtggcggcccctccacactctctctccctctcccatctcgctgatcactgaatcctacactccctgtaatgtctcccttttggtgcttttctcttcatcactgccttcatcccttctaccgttcacctattgaacaaatggcctgagtccagacccttgacatctctgaggggaagcaacctcctccttaccagtttcctgcctctgctcttagacccatcctttccactatactccacatttcccaagttatctttctgaaacatagattggatcctgtctctcccactcagaactctcaatggctccctatcacctacaggacaacctgaactcctcagcatgacttcaaggcctttctcagtcttcccccatcgacctctcattttaccatgtcctcccacactgctcgctcctggcactccatctggcgcagagtccctggcacaggtgaggctgcttctctggtctgtccctgttgtgcctttttcctggaatccactcacccatttgggtatttagctcacaaatatgtattaagctcccagtgtgctccaggcactgggggtacaggagagaacaaaatcctcaaaatccctcctcacacagtgtgagataggctgttgcagagagcccttctccagggagtgaatgaatgaagcaggcagtgaggcatgcagattgcccatgaagaatgcccaagcttcacttcaacacctctttcggggtctttggacattctgctcctccgtaaagacatctctcaatttccatccttggtgaaggctttcctcttcttaggtgcttttgtactttattcttcaatttaagccaattcattctgccttgggttagagtcaattgttgacaattctgcttccttatccatccttctagggaaggaactagtatttatcaagcacctcctctgtgccacgctctgtgtgtcccccacagtgcttggctcgatgcctggtttagagccggggctagaggacagaccatgactcagctcctgccttttgcacccagctgctggctatgtggctacaggcaagccactcagcctcaccaagcttgtttctgtaactgttgaatgggagtgaacatagcacctgcctctgttaggaattatccttctcacatagcctggagagtttcagttagaccctggctcggttgttcccaggctctgttgttttttccttaggaaccatgctggcttatttatgatctaactctggggtcccatgtttcttaaagaaagaactttttcttatttcctgaaagctcctggactttggaaaggtgcagctggaagagaagggaagtgatgcgcagccccctatgaagtcactccacattctgacttccaccctctaccccgctgtcccacagagctgacctgacaactgccacggcccctgaccctgactagatgaacctgggtggtgggggtgggggtggggctgcattgccagcccctcatcatctcaggaagtgaagcctgggccaggggctacagatgccccatctctccaggctgacttggggatctgcaggttacagagtccctgatttaacccagcagattctaatggccagagttcagagaagagaggaattcctttgaggcatgcagaacccttaaagcatggctctgcccaggtccaaagacccctggagagccctataccacatcctcaaggcagaaagaaactcaggtctctctttttctgaattggtgaggctcttttctcctcccatctggtttccacttccttaggcacgtccctgcacccatgtggccattgggtggcactgttggatgagcctagaatttcaggtgaacagcaagcatcccaagactcctggttgcgagtgtgagagggacaggaaaccacagaggttctcctccccaggcgccccgaccctctgtccctcctcctagctgtcgtttgtgccccaggctctcttccactcctaagtcatcttccctgtactcttctagatacacgttggttctgcaacaccaggaatgccaggatgatttagccacctcctcacttgtctacctttccctcccctgcttcaaagacttgggtcgatcgaagcaccaaagcatcactgttgctgacactaacaagtagtgccaagggattgcctttaaggaagatcaggagcggaacatctggtggcaaagaaaatctttctaatagccccattctagtgaccaccttcaacctcctcatagcaggagagtttgggagtaggggacttaggatgttttgttcttttaatcaattcagaaaatatgtatgtttgaaataaaaataaaaatacttgagccagagaggctgagtcactccagagcctcagatttgagttcccagggcaagccccactgcctgtccacacaagagtttactccattcaacaaacacgtttttttatccaactgttttctacctagtctttcatgcctctaattctacttccttagcattcaggtaaggccctaggtaagtggtgtgtggcaggcgggccctgctgtgatcttacaggtcgcctttgggtgccttaggccatgaaacttccagtagggccagtcattttcctcaggttgaacttcaggaaactcctcactgcaatttcagcccctttctgcaaggcctcagagtcaaagattccctgtgttccctttgtaatgacccttcttggactcagagaacatcattaagatgcactgagcatcaggtttgcactgtttggaatgtttgcaggattcgttttcaaaatgatttggcatctttgaaagtcctttctcccttttaaacaggcagtgacatgtgttggggtaacggttgatgtggggatcagcaaagtctgggctggaatcccagctctgccacttactagagccatgcaaccttgagcaggtcctatgacctctgagccttgatgtcctctcagcaaaatagtgacagtaggaggacccatggtgccagtggagataaaggaggtatatgcattcatctgcttaaggctcccattcctcagccaggtaaagttgaagaacgaatcatagaataagaagtagcccagctttcccattttacagatgaagaaactggggcccaaagaggggaagtgacttacaaggtcacctggtaataaagtcaggacagaaactggcaggccaagggcctttccatgatatcaacttgcttcttgtttttctgttctattcctcttctctattgaccaaaggccataaaagggagagaagaaggacgtggggcttagagtaaccttcaggcccagctaattcagccacataacgcagacactagggagtcaacctgtgttaggctacttttatgaagcaaaaacagtgatactgtctgcacttctgggataactgggccacactagggtcaaagtgttctcctctggagactttgatacatggcccactttgaagttagaaaacttccgaggatggccagggtagtgcaagacctcaagccacagcatataaggaagagttgaggacctgggaataatgacctcaaagaagagaagccatggagctcctcgccactgttttcaactttgtaaagtgctgatctctgcaaggtgcaggggaggggaggaagaattgctctctatggccacaggtgggacgcctgagtgaaagcttcaagaaggataattccaggtccacaaaaggcaattgaaaagttagctctgtccaaagttggaatgatccttggtaggaggcaataagcacatgtgagcagaagctggaagaccacgggtccttaggagagcttaaagcacagagtgactagtggacaggacgaggtccagcccacagtatacccactctatgagaacagcacagcaggatggataggagcatgaattctggagccacagtgcctgagttcaaaccgtggttcttgcctggactggctgggtgaccctgaacaagatgcttaagctctctataaaatagagagggagccaccagctctgggaaaccctcctccctgccctgctatcctctgatacaggggttgcctggtgcatcctcctcctggtagtagtgactggtgcaaggctggtcttccctcttgacccctctcagcctcttgggcaggagtcagaaatagcccctggctggccctgtggcaactcaagtttcttcagaagtgagggccctctaaggacaccaagtctagggctgaaaggcaaggagaggcagttaagctgtgggcaccatagaggctgtgcatctgctggtgtttgctggttcacaaacactgccagggcagcttctttgtgcccagcctggagcagataccagtatgcaagggcagaagagacatggccctgccctcagggtgcttccacctagtggaagactgcgtgcagatggacacaggcccctcaggacctggtgtgacaggtctgtgtccggagcatattgttggtgggtggagaccaggaagagggttaagaaaggcttcgtggaggatgtgacataagttgagtgtcagaagaagtcattgaagtgacagggaaggaggaaggtagggcattctggccagggggctgctggagtcaaagcagaaacacctggagccatctggaagctcacgtttcttgacaccttcctggaagtcactgagataaataccttgtgcccactatctcatttaatcctcagagcaagcattgggcattattaatcccattttacagattggaacctgagactcagagaggaaaaacaccccacctaaggtcatgtgaatggcaagcagtggaggaggggctccaccccaggcctgtctgacttcaagtcttaacctgacctgtctgttttaagccagttagagctttcgaggcagtttaatgtgatgccagtgtggacttccaggatggaggtttagagggaagacaggggaacatcagatcatgaaaggctttgctcgctttttaggaaatgcaggttgatcctagcaatagggcaccaatgagtagttgaagaggtgatagatcctacctgcactttagtggggtctctatagcaactgtggggagaagagaccagaggggaacaagtctgaagacaggaccaacaggggttgcagtgacccagactgtgcctgctggtggcttgaaccagggcggcgtggggagggagagggaatcagagagaagcaaacagacaccaaggccaagtgattggctgcatgtggagtgtgtcgggtgaaggaggaagaagacagttgataaggacatccaggcttctggtttgggcaactgggtgaatgttgttaccagtgtgttacaatcacctacactattcagcacagtaacatgctgtacaggtttgtagcctagggcaaaaggctctaccatacagcctgggtgtgtggcaggctatgccatctacgtttgtgtaagtacactctacgatgtttgcacaacgatgagatcacctgacacatttctcaggatgtgtctccatcgttaggtgacgcgtgactgtacttccaccaccttgctgtactgcctttgagtattagcagcagggggcctcatggtaagacaacgagcacactgcttgaaccagagcagcagctccaaaccatgagggagggactaccctcattagccattccttaacatgttcttttattttatttatttatttatttgagacaggttctcaccctgtcacccagactgtcgtgcagtggtgcaatctcagctcactgcaacctccaccgcgctggggctcagctgatccgcctacctaagcctcctgagtagctgggtctacaggcatgcaccaccgtgctggctaatttttgtattttttgtagagatggagtttcaccgtgttgcccaggctgttctcaaattcctgggctcaaacaatccactttcctcaacctcccagagtgttagaattacaggcatggaccactatacccagccttttttttttttttcaagacaggatcttgctctgtctgccaggctggagtgcagtggcacaatcatggctcactgcagcctcaaactcctgggctcaaatgatcctctcaacttagcctcccgagtagctggaactacagggacatgctattatgcccagctaattaaaaaaaaaattttagaggtggagccttatgttgcctaggctgatattgaattcctggcctcaagcaatcctcccacctcagcctcccaaattactgggattataggcatgagccaccttgtaataaaagaacatattcttttatttagccagtattgcggtgggatgagtgtgtagcagctcattcaagacaggagccaaggcccaggcctccatgaaggggccccttagaggcagctgaagttaatctgagaagccttcctgcaggaggctgaccttgactttggaggtaagtagtgggctggagtggaggcccatgccacttccaagggaagttctcaaatgtcaggcagatgcacaacacaacatcagcaacaacagtgacattaacagagtcctgttccacactgaccaggctttgcttctccatgcacctccatgggtattatcctctgtagtcctaaccaatgagatgttaacacacactaacaatgaaggtccctttccttccttccttccttccttccttccttccttccttccttccttccttcctcattctgtctttaagccctatgaagcaagggggtgggcggggctagtgtcctacctattttataagtaaactgctactcagaaaggtcaagtgagtgagcttgggtcgcacagaccacggccctggtcagatgccttgccttgtcctcccctttgggagcctttgggtcctgactcttgcaccaccactgcctcaagtccctcagttaaggtatgaacagttaatcaccagcaccaactcccttctaaaccagattgcctgtgaggtcaggttgcctccaggagagacgacccctggggaatctctgttcctgagaccagaaattgagcccagaggcctggcactgagctaacagtaaaagtgggcagtagaatggcatggtgacttataaagtcacacagtcttgatctgttccagcctcactactaaccagctaaattaccttggtcctctctgagcttcagtatcttcatctgtaaaacagagacaatgatatctttcccactggctggttgcaaggattaaatcaaatgatctctggagggctgtcagcccagtgtcctcctgccctgcctacctgtgagtgagtggggactgtgccagcacatgggtggatgggctggtggggagcatcaagcagaggcagcagtcatgccaggaaggggagctggttccctgggagtgacacctgagaagattcacaaatgggaagaactaagagattctccctccagtccctctgtgtgggtgtgggtgtgtatgcatacacagtcataaactcttcttttaagatgactgtagtcaccagtcactcactgtgacagccaccacagcccttccctctgctgaaggcagggcctggctctcaagcaggaaaccaaaccaaagggaagggagtggtctttggggattttcaccatgccccagggaaaggatcaaaggacactctggctgctattgtgtggccaaaaataagaaatggagcccaccatagaactggaaagggggctcagttaagttagctggctgtccattctttatagctaattttgtccttactaccctgtaaagtagctttgctctcccattcgaccaactaggaaacgaacagtaggaggctcagagagtgtcagtaacttgctcaagttcatacagctagcaagtgttagtgccgggaatacggcctgtgttcttttcctatacagcactgccaaaccaaggtactgacagacacttttcagggcagaagccctgaaatgtgcctaaacaactgttatgatggttcttttttttcccccttctttagttaatttctttttttgtcattgttcacatttaagtttaaaggatagagacaggacaacatacccctgaggccaagtcacaaaatagaagcagaggtcagaggaagatctcaaagagggaaatgaaattcaagagctgctcattccacctgcacagtgtggtgtgggggctaagggcacatgtcctagaatcacaaagacctaattccagtcctagagtcaccatttattaacctcaggcaggtgatttcacctctcactgcctccatttcctttccaatgaaatggtactaatgtatacattgacttctagggctgtgagaattaaatgttgccctgggtaagaagtgcttagcacagggtctgacacatggtaagcccatgtcaccaattatgacgattgattttccttcaagggcttttctctgtccacagcttctgttttcaagaaggaaggcaaaggaaatgtatacatatgatcagatggatagagtatctgactttggccacacaggattatctgactttaaatgacacgagaacccagtgtgccaaataggagaaacagagccccttggtgctggtcaggggaggctttcagaaggagtatatagggaagggaactggaggtcaatttggtagaggggtgggaatggtgagatctcaaggaaagtaaagggcggggcaatctgggaagcagagggaatggggcaacaaggacctggtgattgggagcctagagaaacaccccagagctaagctggaagctaagagctatgaggagagtttcacaaggaagcagagcagcgaaatcatcatgcattcagtgtctgctggatgctaaactcattcaacaattaaaacctcaccacacccttaggggcatcctgatttttcagaggagggcactggtgcccagagaagtgaaataacttatctagtaactgttagggagttacgtttccatctgactgcctccaaaacacccaagccgttcactgactgggacactaacaggccaggttcaaggtgctctaaaccataccagcccttctctatagtcatctgtcatcctttgggcccacggaggtcactgccctcccagaccaccccctgcagctctaggcaggctcccagtcttcaaccacacctcacagactaccacgatgaaacgccagaatccggagtcccgcttcatgggctttcagggctctccccacgaggtacacgcatagagaggagggtttcccggccggagggtaggggggagggcccagtggggacttcctggtgctagagcccatctgaatccagagctccgtgtctaccgcagtcttatctcaaggaaccaccactgtttggcacacctgtctaggtgaccctgacagggacctggagaacagaactagcaggggcttgaggctgtcgtctgcctcccaaaagcaccctggaccttctcggatgccctatctaggcagaaagtaggctgtgcctcccacacacatttcccgaaagcaaagggcatcctcgtctgcccacctagggtgctgtaagctgcactcctaagttcagagccctgtgggccacctggctttgcaagttctgccagagggcccgttttgtgagtagctgaccattcccaagggcagcggcgtgtcccccagccttccctgcccgggccctgggggagggagtcggggagtggagagggccagccctgcagtgctgcctgttcctgcggctcctctcggtgggggcgaacacagcagaagagtttctgccacactgcggaccgcacctgctgcatttccctgcgaagccaaatctttgctgggtaacagggaggtgggaagccgatctggagaaggggtcgcgctggcgggagaaagggcaagaaaggggtctgcagatcctgtctggaggcaccacaataatagcaacacgtctctcccggggctggatcccgctgtgggcctggggtagctgctattgattatctcctccttgcctacttcattacgttggcaggagcctctcaccagtgcccctcaacttctgccctcccccatctccccggcccggcagcacccagctgagctctcctggaggttctggttagtaagtcgggctctgccaaagaatgttttcctcgcggggcgggggctgaggcccgggggcccaacgaggtgacgagctcggtggcggcggagggcagcttgtcgccccggccccggccccggcccccgccggcccctttaattcgagttcgccgtcgagccaggtgcggcgctgcgtggcgcggtgcggctgcgggcggcggccgggagctccgtacgcgccgcccgcgggactgcagagccggctcccggctggccgcccgcaccccgccgccgcccgctgccggggttctgccggcgctggccgtaacctaggaacatggaggccccggtgcccatccggaagggtaaatccgtgtcggggcgttgcgcggcgcgtgctgccttccctgcccggctgcggcgcccagaggggctgcggggcacccggcggcgcagcctgcagcgcagcaggcttgggctgagtccgcggcggcaagcccttgccgaccactgccgtctgctcggcaggtcccagaccggggagatcaaggggaacttgcaccctgctcaagaagagtgcacagaatgggctcgggaccctctggggtttgcgtggcgcggggcggagggcacggagaggagctggtgggtggtgggaagtgcagctggcagcataaccatgtctggtaaatagcgcgggttggtaggacctgaaccacttgggacggccgggctgcattcgcctcttcggcacagaataacaaacggctttgctgcagagagggctttccccttcgctggggccgtgggctgccgccgagcccccgcgcttaaaaggaagctgagatctggggcggcagcctggcgcaggctactccccacccccagagatcaggttccgggattttgggttggacactgagcctcggcggtccctcggctggacgccgggggcttaagagctgaactgcgcttgggcccgcagcaggagccgaccgcgcgggcaggagggggttaaggtggcgctagcggccgcggccagcgggagggtctggtcctctgcgcggaggcgagcgctgagtgcgccgaacggaatcccggccggagcccggggcgatggggagagggcccagacccctccccgccctggggccggcgggattgggtcggcagggggccagtccggaagccggcttcctccaggctccccctctcgctgctgccaagccgcctcgcagctaggcaggcggagcgtttattctgtgctccctgccgaggagatgtgagggattttctcttgggggagaaatcagtggtcgagcgcctgcccagctcaaatgccacccggctcagagggaggcctgcggcccagggatcccggagggagagtaagttcatccagttttcgtacagtgcagactttgttgtgtggggtctccctagatgcgctctgaaggagtgtgtgtgctggggggtggggtgcttcttttccaggactggctgaggtcagagcttgtagacaggctgcagtgagctaagccctcctcttgggagctgctgtgtcctgacatgtgggggtaggagtgcttcttccagagtccttcctgagagcagctggggactagcaacctggatcaacccagggaggcccctggagaaggcaggcccagccaagcctgagtcttgctccctgggagaaaatgcttcaagctgatgggaagcctgcccagaagaggcaaggaggctgagggatagtcctcaggcctggcatcagaatagaggatgggcatgggggcctgttacctcccatgagggaagctgccagaccctcctaaatcttggcaccagctggttcaaatgccctggttccaccttgctgctgtttttttccaggcaacgtcacacctcctgaggacagccaggactccagcttttgctgagctttgcatcttgcctccttccttcaaaaggctccaggcccatgctcggctgtcttcaagtcccgcatgcccctggccaggcacctcaccgcccctccagcccagcccaatcctagagctcacctccaggacccagagtctgcccttctgcccagaatgactcaccattatttctagctcgagtgagaagacgtgatgaggagttgggctgcctgttggtgcatctcagattcctgcagcatctgatcagctctgcaaggaagagagcttcacgtctctggtcaggtaaatcaatctatcatttaataacagccttgtgtagaatcactggggtggaggccaatgagaaagacccaggcccaagctccccaaccatgaatacctccctgggtatgagtatctgagacattagtgcagcacctgggagagggtccacttttaacctattagcatggggttatgctccatgaagcctgtgtgctacaagcgggcctgtaccagccaccttcccccaatgcagggcattccagaggttcctggagagattgctacctgctccccctgatccccagacaagttacaaggtgaaagtaaattttgctttgtcgttgtggtggtggtgatcatgtgtctgaactcttggctgagagatgggagacaaaaagtggcaacccaggtcaggctgccaatgctgagtagcctcatgtcaataactgcctctgtctttcagccaagcgaggctgtctctccagctctcagagagctctcggggctctcctgcaggagaccaggccaatgctcctgtgcttcctggggccagtagcagcaccctgagctccctgccaccaggcagctgaaaggcatagcgtgaggtgcttctctcagtcccaattatgacagtggccaccggagacccagcagacgaggctgctgccctccctgggcacccacaggacacctatgacccagaggcagaccacgagtgctgtgagagggtggtgatcaacatctcagggctgcggtttgagacccagctaaagaccttagcccagtttccagagaccctcttaggggacccaaagaaacgaatgaggtactttgaccccctccgaaatgagtactttttcgatcggaaccgccctagctttgatgccattttgtactactaccagtcagggggccgattgaggcgacctgtgaatgtgcccttagatatattctctgaagaaattcggttttatgagctgggagaagaagcgatggagatgtttcgggaagatgaaggctacatcaaggaggaagagcgtcctctgcctgaaaatgagtttcagagacaagtgtggcttctctttgaatacccagagagctcagggcctgccaggattatagctattgtgtctgtcatggtgattctgatctcaattgtcagcttctgtctggaaacattgcccatcttccgggatgagaatgaagacatgcatggtagtggggtgaccttccacacctattccaacagcaccatcgggtaccagcagtccacttccttcacagaccctttcttcattgtagagacactctgcatcatctggttctcctttgaattcttggtgaggttctttgcctgtcccagcaaagccggcttcttcaccaacatcatgaacatcattgacattgtggccatcatcccctacttcatcaccctggggacagagttggctgagaagccagaggacgctcagcaaggccagcaggccatgtcactggccatcctccgtgtcatccggttggtaagagtctttaggattttcaagttgtccagacactccaaaggtctccagattctaggtcagaccctcaaagccagcatgagagaattgggcctcctgatattctttctcttcataggggtcatccttttctctagtgctgtgtattttgcagaggccgatgagcgagagtcccagttccccagcatcccagatgccttctggtgggcagtcgtctccatgacaactgtaggctatggagacatggttccgactaccattgggggaaagatagtgggttccctatgtgcgattgcaggtgtgttaactattgccttaccggtccctgtcattgtgtccaatttcaactacttctaccaccgggagacagagggagaggaacaggcccaatacttgcaagtgacaagctgtccaaagatcccatcctcccctgacctaaagaaaagtagaagtgcctctaccattagtaagtctgattacatggagatccaggagggtgtaaataacagtaatgaggactttagagaggaaaacttgaaaacagccaactgtaccttggctaacacaaactatgtgaatattaccaaaatgttaactgatgtctgattgaaacctattaccgtactcacagctcaatggaactaatgcagatgttgcataatagcctgcattgtagtcagtgtgttctacagtgtgtatctggttctgcatggaaagcaatagttgtgcaagtgacttttgatcttttgacttttgatttagaacacagaatatctatcatggctttcatgcacatcctcatcaccggcttatgaacttccaaagacgggagtcacctatcaagctaggatttcagatagacacgttgaggccacctcatatcccatacacagtgcaccatatcagtgccatcattccttcctaatgaaatgcacacaacatccaagagatgcactcccctccccaccatcccaccaccttatttgagcccacctgccctttcacagaggaacacaatcatggcttagctttaaatagctggtgtttgttcaaaaggtcatactcatttttgcattgaaaagaacacacagtcctgtgtgttggaattactttctgtgtcacaggctggagtttgtgaattgcagttgccaagtagatgctctggaggcttgtgtttcataacggaaaatgctgcattctgctttttctctgcagtgtcgatgtgagggaagcccgggggagggacagttagtatgaccgaatatgagttgtcaagtttcacatttgttcccttaggcctatggggagaagctaacaaaccaacagacctctaagcctctgatttcaccatttttgcaggctccagggtcacaaaaacatgtctggtttcttactggagtttgcagacatctgctttcccactgatgtggcccagctacactgacactgcagtgaaatttaccagtgatgcaatagagctgcatgggtgtttgttgcatgaatctcaatatttaaaacacaggagataacctattttcctagtagcctacacagtgttaatatttagagtattaataggcttggaatggtcttgaactaggggtttttttcccatcagaaggcaaaaatccctccatcaggggaaaaaaaatagactatttggaatggaactaaaacttctggccccccagcctacctatccctgttcttctaaacaggaacgcagacctctgcaaagccagaagagtaagcggggaaggcagcatctgaacacctcacatgactgcaccttaggaattaacctagtcgcgggcatgactgtacagtggaccagggcatctggtcctgatgacaggcaggtctgtggatccagtgtatataaatatatatcgagtatctctctttcacgcgttcctctacctagctagtgatagaaaagaaattgcatttgaacattgtacaagcttatgcaatatttttgacaaagggcaatttatgcatgtgtttgactatgtgcactagggtgtatatatatacatacatatgtgtgtatatgtatacacacacacacacacacacacacacacacacacatatatatatatatatattcattttctggagttcaggttcaggagcaaatccactgcttggtgggttggctgtctaagaggcctaatgggttaatttgtctcattggtaaccccactgggcctgggtttgctgccattgcctcagacactccggtatccatggattcctagacgttagaattgtctttctgccctccatgtgctgcagcttcagttcccatggctgaagcttgtcttactgagtgcacaagggccctgtggccctcacagttccagctgtcctgggccagacccaccccgggcctcctctctacagttcatcctgttcatcatctccattttcacctcttcccttgccacttggatcttattatcatttggctctgcatccgtcactttcacaaacctttcgctaaagagccagaatggatcccctgctttgaaaccaaggacaccaaggagtaggactccctgggaccaaattccactgatctggacctaaagggagcctcctctatgtggaaatgtctgaagtccgggactaagtgatggagtccctagatgatccaaaggcatcattttgatctccagacccaaactctctccccattaaactggcaaccagagctgctttttaaaaagaaccaaaggatgggtaaagaatcatttcccaccccccagaagaagtagagtgcaaatgagcactgcacagcctaaaggtagacagtaggttgaccctgaaatggcttcaggtagggggcttttaactcaccagactgggcgtctttgccttttgacggagtagcttaattttcccaaacagtgaattgcaggggtcgggctatgcaggggtggctccagcccaggcctcactgctgcctagttagcacctacagttgtcttggggcatggggcaccagctcagggtgctaggcccagggtgctcattagtgcctggtcacccacatccccaggtatctgcagggcatcccatgcccagcacaaagcctctgtgcttctcttcctctccttcatgggaggtggtgctgaatttccaaggcatggggtgggagggacacagatctttggaaaatagaaggtaaagcaacccatatctgaggcctaggtcagggatagatatcttatcacagtgtccttggcccaggactctaaaatgttcacatacagtcatgcacattcaccacaaaataggtacactgttgtcacacacaaacataaaacatgtaacgtgcaaaatacagacagaccaggttaacataaaagcaaacacagaagatatatggttataattgtatataaaatgcacactctgcacagatatagaatttacacagaacatacacaaaagacaaacatacaccacatacaaatatacaacctgaaactcagatgcaaaatacataaaaaactacatggacaaaatgcatatgcatataagatacacaaaggctactttaccattgtttctacacataaaatacacacaaactcagtatatacacacgatgcattaacttataataggcatacaagatacatagcacacatgcccaaaaatatcgcacaatacacatgaaatgcagacatatactcagacccattgccctgcccccagagctatgaattaacaggcacaaacaaaagatcagatgtaatcacctttgcctggcctgtgtctatatcccccaggatctttcaaggaatctctttctctattcttttctctcactaccagatttcactcctgagaagtaactcctaggtttcaagcaggaggatgggccaccacatcaagcagatatctgactaagaccaggaattgcatggggtctctaccaattcaccttcctcccaccagaaacctgggtgcagggtgtgaaagtacctgggacagctggtagcctaatataggcctccttgccatgacccttccttccttccagcaaatccgcacagacaacccaatagcccaggctccccttctcccagcacctgggatctccagattcagccctattctcttaaaagcagtaatggctcaagaaactgcaggatcttgagcccaggaccagggtaaagatgtccccaacattctctaagcccacagattttattgcccttccatcctttgcagctttgttgggggcacggtcaggaagttgagaccctatagagacctgtctcttaaaatgagccacctttacttgcttgtggcatttcacttgctcttgtgcataagcccaaaggggccaactcctgattcccctctgggtgtgttcaatcccgggcacgctcttccttttcctcttgttgggctcccctggatgccctgcctcccatccaattgctatgcaacccagttcagcttaagtaaaaagtgattaagaacatacatctaaggctaagcaagctaacactttttagagggcctgactttatcctatattctaaggccatatttaaatactttctaagattacccaccattttggattactcttggagctggttcttcccctaagtaggactagctgagagctgagtgcattttagcaaaggcttcacctacatcggaagtaaagagttgcagtcaggctttggatcaggcctcactcctgatttctgctcctgcagccatcccgttgtgtctcactctcccttccagtgatggtcgcagctcccagtctctacagaaaaggtaacaacagtagggagtggacatatgggtccaaaacgtgtgctttgctggaaacttgtgtttccaggtcaaggtaccattcctgttggcttcatcaagtgcctctgtggattcattttcaagaaacttggagttttcaggagaccgaaaaggaataggcccaggaaaggtggagagattgtcaggaagagagagtggctgagtgggtcaaatttcagagtaaactttttaggagccaacatttaattaagaaaataattaaggctctgtgctttctgaaacttcagtaatatttgacatgctctcttccttcttctctgcttgcctctgtccctctcacctgtgtttctgaggctagtgttggcatgtcaccatgaggttagccttttaaaaggggccccacgggagtgtgcctctagattgcgttagcctagtatggaaagggctcccatggaagctatgatggcctgagaccccagcctgggtgttcatgttgctgctccgtgttgggagggcccaggactagcttgttctacctattcttcctggatctctcactatattatagtgaggactctatcagtatcaacccatgtggagagaggacagcaccctctgaagctcctcaggctggggattcagcactgcccacagtagtagagtcacagaggctgactcccccctaaggaaactatagaacagtgtgcaaattgcatatgaaggtggcaccactacccctatgtcaggcaggggagcacagtgctttgacttgtttactcaagagaggggatgatggtgctgagctctgctccccagagctttcctggggcccattgtcataataacttgtatgtgggtgatggccgcctcatctgcgagggctataatatccatggtgctccttggttgcacaatggaggttcccctagccttggcaaggtatccattgccgggtttgaactcatgaccttaacctcattaacatcatcagtcacctgagccaacgcgcagagagggggatgctgggagctctctcagtagctattgtgaccatcatctatatcttcagacttagcccttgttgagtccaaccctgttcccctatcaaagcaaccagcagggacagatggaggtaggggctcccctacatgcaggaaggttctcttcctcaaactaacctagtttacttttcctttttttctgcttcccttcccaccaaatctcagcttcatctctcatagtttgtgtttgaatatttttaaagaggaaaagtgcaataaaataaatagtgactgttttctttagcaatagctctttcaaaatcttgctctcaggactgaaaagtgatagatagtacctggattatcagataatgcccttgacttctgggggctcattcacagtctctgtagtttcttcttcttcccacgtgttcacatgactcctgtcctcttgagatctgacctccttctggaatggacacatatgctaagatgcagtgtatgcacaaggaaggcctgtgagagggctttgtcactttgtctccttcctgtgtgcacctctctgtctccatgtgtgtctctgtcccctctccctctgtctccccatttctgcctgctgtcatacagcatccttacaacctctaggcatgaaaatcctaagtttgtgtgaccttttcagcccattttgttgactttccctcagtctggcagatgtaatggaagcctacacgaaagcacttcccaatagataagaataaagcatcctgagccattacagaagatcatttccatgcactaaaagccattacttgatccttttgcttccccttctcccttccccagggagacggatgctgagggaatgtggcctggaggtttgcacttgggatcagtagcctgggcagatttgggaattgccctctgactctctttcaaaataagctgacttgctcaaccaaagggactccgtgagagctgcagaaggaagcaggttcttgtgggtttcagtagaagtctacagggatagaagtttgggtggttagggcatgacattagtgaaataaagactctaccacccgctagagtgtgcagctgcacaaatatttgcacacatagccaggggcttcagaagagtcccctttcctaacatctgtgagcttaaatgttcagactggacaatcagggaaggctggcaaccccagggtcccattccatccttttttgatctaccttgctctatacacatatgtacagcaaaacctcagttaactgatggggaaacctcagggacaggaacatcctgattgctttgcaattttggttatttgagtgggaatgggaaagcatgtctggttcaacctttgttattgagaaaaatatttcctaagtaggttagcataactttcctgccttagttaagtagagtgtttgaagataacagggaccttgccttgctcagggtcaacattgtaaacctcaatgcttattgtacagtagtggacataggtagagaagaccaaagagacaggctgaatggctgctggctacaagacaggcctggaaatgggccactggggcacatcctggctcatcggagcccttgctgtcatttgcctctttctactgaaaggatagtaagaaaacataattcttgtcaatcgaggttttggttaattggtcctgagtttttagaggttttccatatatacatatatttatgtgtgtatatatatatatatagtatatgtatatatgtatactatttttaaattatagaattatacattgaccaatctccttagtttcacttatgtggaataaatttggcaatccaaggaataaactgcatttatgtgcattttttgaatgacctcctttgcattcttttcacctctccagttctactctttttttttctgcttagggacctctctagaaggcagatctttcataaaaaaagaacaggctacaggatcacctctttcctttccctcccaggtggctgcctgactcagggataaaagggaagtctgatctaacagccaggtgctttagcctttcttctgtctgccctggttggctataacctcatcactgaggatcagaaaagttattccaaactttgtactcgaggggagtggaaagcttgaagacctggcaaaggatttatctatttagcattctctttgtcattggtggtgccctaggtttgaggtttgtgagatctgaaagtaacattccaatgaagaactaaagcacatctctgccacacagaaggtgaggtttgtggcaatcaatggaactaacaaatccattctgttttttattatgactaaacctaagttgagggtgtgggtattagagcagctgaaattcagttgcctctttgggggtaagctgtacacatcactcaagaaacagctggatgcaagctaaaacctgctctcattctccctcttgcctgctagtgtgttagatccatggaagacagtttctctcagcctcacctcttgcatttgactgttgctttctacctagatgggagtgggagggatttttcactgtatctggagcaattgaagtggtgcaggggtgtctgccatctccccacacccacagaagccctccagtctggctatgttagttgtgatcaggcagcagaagcccataacccagacttgacatgaccagctggtgcactgaggcagttgaggtggcctgtctggatggctacttcttgtacttcatgaacctcagcatggaaatggatataactttctgtgctcctctgcactcctaaaatagtctaatatgttccagatgagtttgcagctgagaactccctgcatcattccactgatggatgcacagggcatgattatgtaataatgtggacagctactgcaacatctagatcattgagggcagtgtagatgtggctgtgtgctaggacccttggtagctatccagaggactcagtctggtgtctttctgagtctctgtgagaggcctctaagccctgcttctccttgaaaatgattccctagacaccgaatgccttgtttgtatgagtgaataaatgctctgggctgctagagaaagcaataggaggagctgggaggaagagaatattcaggggcgcactttgctaccaaacaatttccatgtcagctgctaacattactgcctttttagcctatgaagtgtagggcaaggactttgacctgccaggtggggctggaaaggagcacatcagctccaggctaagaaatgggatagaaaagcaagaagagaggcctggctggctttggcgggggtgagtctcagctcctgagggtttgaacatgctctgtgcttgccccagttctgccttcacgtgggatccagcgacccagtttccttttgttgtcgtgcttggatggttccttcatttgaagggccccaggaagctggaaagtcccatgatcaagctctagcctgctgagcaaacaataccccagccaaattggcctcttcctggttttctgcatccctgcacccctctctccactaaggataatcttggaacagttgcgattaatggtgccagcaatcaaggaagattctctagttttcatcagggacatagctgtaaagctcatgagtggaggatgctatttccttttccagacctgtgtgcttatgtgcttatataggctgcctctggagactttatattgtgtgtgatgtgtgtgtatatatatatacacacacatatatatatatatgtatatatatatatagagagagagagagagaggaaatggccgccactcacttaggctcatgcagcacagactccagttagggtttgcactggcttccttgctgcttgtgcatgaatcttcagctgccctcccatgtcctgtctctaataattgctgaaaactcaaagaggtagataaataagcctccttgggatcaatagcagaaggaactccaaggctgatggtaaagcttcgtaaggatgatgccgaaagggaactggggtctccatggtgataagaggctggggaccaatgagagctgaaggcggagcaggacttgcggggaagactcatgggagttgggagtcatttaactatttgtttgcttcttgaaaatttagacaccagctgtaactacattgcacaggatgtattgatattatcattcttgctgacatattctggaagctttcagccccaccaacactgccccacccaggacttctgcagctgagagttcctgtgtcagtagggtctgatatttgtacataggttatacatatatgtgtacatatgtgcctcaatgaacattgcctgtccacctgatcatgggtgtacatagacttcatagagctccacagtcttttgtaaatattgacacaagtaaataagtatataaatatatattactggggatttattttaacatcattctgtgtgatatgaaaaaaataaaatttttgacagacactgatggttttcacttgtttcttgcctgctgggattatcatccctacaacatgcaagtgtgcttgcctcactctcagcctagtttctgtggccatgagggtccaggcagagaccaggcaggatgggagagggtcctcctggatgcattgggtatcatcttggtgtgtgcctgcctgcccttgactgggagccctgcgcagacgaggcagagtatgtggatgggagggtgggtgggtgcgtttgagatctccccaattacatcaacacttcctgtatcttccatggagctggaggatgtgtgggggcggggtacccagtttgaagaccaaacacagtctgggaatcatttaaatgcagccgcacccacatttgcaggccttgtcctcaaacccacccccacctctgcccattactgctggcccaggggtctggaccaaccgtgctgtccactctcaagtgaggagaatgtctatcttggcctcctgagatggagacacagcagcaccttcgtggagaaggtcctaacacacacacacacacacacacacacacacacacagacactgctgaggcacatctatgtgatttcctctgagggctaatctagtcctgaactcctgcaaatttagaaggctcaaaagaggccatggtgtggagtatgagcacagg

SEQ ID NO: 931 - DNA, 2203 bp, Homo sapiens
ggcacatagaagagtgagccatcatctggtttccagcgccaagacttctgcaggagagcctccgctgggctttcaagttggcaacgtcacacctcctgaggacagccaggactccagcttttgctgagctttgcatcttgcctccttccttcaaaaggctccaggcccatgctcggctgtcttcaagtcccgcatgcccctggccaggcacctcaccgcccctccagcccagcccaatcctagagctcacctccaggacccagagtctgcccttctgcccagaatgactcaccattatttctagctcgagtgagaagacgtgatgaggagttgggctgcctgttggtgcatctcagattcctgcagcatctgatcagctctgcaaggaagagagcttcacgtctctggtcagccaagcgaggctgtctctccagctctcagagagctctcggggctctcctgcaggagaccaggccaatgctcctgtgcttcctggggccagtagcagcaccctgagctccctgccaccaggcagctgaaaggcatagcgtgaggtgcttctctcagtcccaattatgacagtggccaccggagacccagcagacgaggctgctgccctccctgggcacccacaggacacctatgacccagaggcagaccacgagtgctgtgagagggtggtgatcaacatctcagggctgcggtttgagacccagctaaagaccttagcccagtttccagagaccctcttaggggacccaaagaaacgaatgaggtactttgaccccctccgaaatgagtactttttcgatcggaaccgccctagctttgatgccattttgtactactaccagtcagggggccgattgaggcgacctgtgaatgtgcccttagatatattctctgaagaaattcggttttatgagctgggagaagaagcgatggagatgtttcgggaagatgaaggctacatcaaggaggaagagcgtcctctgcctgaaaatgagtttcagagacaagtgtggcttctctttgaatacccagagagctcagggcctgccaggattatagctattgtgtctgtcatggtgattctgatctcaattgtcagcttctgtctggaaacattgcccatcttccgggatgagaatgaagacatgcatggtagtggggtgaccttccacacctattccaacagcaccatcgggtaccagcagtccacttccttcacagaccctttcttcattgtagagacactctgcatcatctggttctcctttgaattcttggtgaggttctttgcctgtcccagcaaagccggcttcttcaccaacatcatgaacatcattgacattgtggccatcatcccctacttcatcaccctggggacagagttggctgagaagccagaggacgctcagcaaggccagcaggccatgtcactggccatcctccgtgtcatccggttggtaagagtctttaggattttcaagttgtccagacactccaaaggtctccagattctaggtcagaccctcaaagccagcatgagagaattgggcctcctgatattctttctcttcataggggtcatccttttctctagtgctgtgtattttgcagaggccgatgagcgagagtcccagttccccagcatcccagatgccttctggtgggcagtcgtctccatgacaactgtaggctatggagacatggttccgactaccattgggggaaagatagtgggttccctatgtgcgattgcaggtgtgttaactattgccttaccggtccctgtcattgtgtccaatttcaactacttctaccaccgggagacagagggagaggaacaggcccaatacttgcaagtgacaagctgtccaaagatcccatcctcccctgacctaaagaaaagtagaagtgcctctaccattagtaagtctgattacatggagatccaggagggtgtaaataacagtaatgaggactttagagaggaaaacttgaaaacagccaactgtaccttggctaacacaaactatgtgaatattaccaaaatgttaactgatgtctgattgaaacctattaccgtactcacagctcaatggaactaatgcagatgttgcataatagcctgcattgtagtcagtgtgttctacagtgtgtatctggttctgcatggaaagcaatagttgtgcaagtg

SEQ ID NO: 932 - protein, 499 aa, Homo sapiens
MTVATGDPADEAAALPGHPQDTYDPEADHECCERVVINISGLRFETQLKTLAQFPETLLGDPKKRMRYFDPLRNEYFFDRNRPSFDAILYYYQSGGRLRRPVNVPLDIFSEEIRFYELGEEAMEMFREDEGYIKEEERPLPENEFQRQVWLLFEYPESSGPARIIAIVSVMVILISIVSFCLETLPIFRDENEDMHGSGVTFHTYSNSTIGYQQSTSFTDPFFIVETLCIIWFSFEFLVRFFACPSKAGFFTNIMNIIDIVAIIPYFITLGTELAEKPEDAQQGQQAMSLAILRVIRLVRVFRIFKLSRHSKGLQILGQTLKASMRELGLLIFFLFIGVILFSSAVYFAEADERESQFPSIPDAFWWAVVSMTTVGYGDMVPTTIGGKIVGSLCAIAGVLTIALPVPVIVSNFNYFYHRETEGEEQAQYLQVTSCPKIPSSPDLKKSRSASTISKSDYMEIQEGVNNSNEDFREENLKTANCTLANTNYVNITKMLTDV

SEQ ID NO: 933 - DNA, 2280 bp, Homo sapiens
agcgggcctgtaccagccaccttcccccaatgcagggcattccagaggttcctggagagattgctacctgctccccctgatccccagacaagttacaaggtgaaagtaaattttgctttgtcgttgtggtggtggtgatcatgtgtctgaactcttggctgagagatgggagacaaaaagtggcaacccaggtcaggctgccaatgctgagtagcctcatgtcaataactgcctctgtctttcagccaagcgaggctgtctctccagctctcagagagctctcggggctctcctgcaggagaccaggccaatgctcctgtgcttcctggggccagtagcagcaccctgagctccctgccaccaggcagctgaaaggcatagcgtgaggtgcttctctcagtcccaattatgacagtggccaccggagacccagcagacgaggctgctgccctccctgggcacccacaggacacctatgacccagaggcagaccacgagtgctgtgagagggtggtgatcaacatctcagggctgcggtttgagacccagctaaagaccttagcccagtttccagagaccctcttaggggacccaaagaaacgaatgaggtactttgaccccctccgaaatgagtactttttcgatcggaaccgccctagctttgatgccattttgtactactaccagtcagggggccgattgaggcgacctgtgaatgtgcccttagatatattctctgaagaaattcggttttatgagctgggagaagaagcgatggagatgtttcgggaagatgaaggctacatcaaggaggaagagcgtcctctgcctgaaaatgagtttcagagacaagtgtggcttctctttgaatacccagagagctcagggcctgccaggattatagctattgtgtctgtcatggtgattctgatctcaattgtcagcttctgtctggaaacattgcccatcttccgggatgagaatgaagacatgcatggtagtggggtgaccttccacacctattccaacagcaccatcgggtaccagcagtccacttccttcacagaccctttcttcattgtagagacactctgcatcatctggttctcctttgaattcttggtgaggttctttgcctgtcccagcaaagccggcttcttcaccaacatcatgaacatcattgacattgtggccatcatcccctacttcatcaccctggggacagagttggctgagaagccagaggacgctcagcaaggccagcaggccatgtcactggccatcctccgtgtcatccggttggtaagagtctttaggattttcaagttgtccagacactccaaaggtctccagattctaggtcagaccctcaaagccagcatgagagaattgggcctcctgatattctttctcttcataggggtcatccttttctctagtgctgtgtattttgcagaggccgatgagcgagagtcccagttccccagcatcccagatgccttctggtgggcagtcgtctccatgacaactgtaggctatggagacatggttccgactaccattgggggaaagatagtgggttccctatgtgcgattgcaggtgtgttaactattgccttaccggtccctgtcattgtgtccaatttcaactacttctaccaccgggagacagagggagaggaacaggcccaatacttgcaagtgacaagctgtccaaagatcccatcctcccctgacctaaagaaaagtagaagtgcctctaccattagtaagtctgattacatggagatccaggagggtgtaaataacagtaatgaggactttagagaggaaaacttgaaaacagccaactgtaccttggctaacacaaactatgtgaatattaccaaaatgttaactgatgtctgattgaaacctattaccgtactcacagctcaatggaactaatgcagatgttgcataatagcctgcattgtagtcagtgtgttctacagtgtgtatctggttctgcatggaaagcaatagttgtgcaagtgacttttgatcttttgacttttgatttagaacacagaatatctatcatggctttcatgcacatcctcatcaccggcttatgaacttccaaagacgggagtcacctatcaagctaggatttcagatagacacgttgaggccacctcatatcccatacacagtgcaccatatcagtgccatcattccttcctaatgaaatgcacacaacatccaagagatgcactcccctccccaccatcccaccac

SEQ ID NO: 934 - protein, 499 aa, Homo sapiens; identical to SEQ ID NO: 932

SEQ ID NO: 935 - DNA, 24715 bp, Mus musculus
  misc_feature (1)...(24715): n = A,T,C or G
ttgtagaggacccaggttcagtacccagcacctacatggtggctcacaaccacctgtaattctagttccaggggcctttaatatgaccctgttctggactctttggattcctgtaacacacacacacacatgtttttaaaagtccattataggggctagagagatggctatgctcttccagaggtcctgagttcaattcccagcaaccacatggtgactcacaaccatctgtaatgagatctgatgccatctcttctggtgcgtctgaagacagcaacagtgtactcatatacatgaaatgaataaataaaatctaagaaaaaagtttaaaacaaatttttaaaaatgtctatgtgtgatggatgcttgtcaccaacagctttagcctctaacaggctgtagaaggttcttccagatgagatattgtcttaatttcatttctgtcgatgtagaaaatatcctgctgagaagcagcttgggggagaaatggtttattttctcttagcgctccaggttccagtctattacttcagggaactcacagcagctggagtgtgaagcagctgcccacatgaccaccagccacaaccacgggcaagagcaagccatgcaagctagcattcttactcagcttttcttacacagtccagaccccaaaccagggaaggggctgcccatactcaggatggatcttcctactcatcagtcaatgtaatcaaggcagtcccctatagatactaccacaggccagtctgagctaggcaatccctcagtgaggctttctttccaggtgactctaggctatgtcttagatccagcgggatagacggggtaaatgaccatcacagtcagcctgtctcaggtccagtgggatggacagggggtaaatgaccatcacagtcagcctgtctcaggtccagtgggatggacgggggtaaatgaccatcacagacagcctgtctcagatccagtgggatggacagggggtaaatgaccatcacagtcagcctgtctcaggtccagtgggatggacgggggtaaatgaccatcacagacagcctgtctcaggttcagtgggatggacagggggtaaatgaccatcacagtcagcctgtctcaggtccagtgggatggacgggggtaaatgactactgcacagagcctgtctcaggggtaaaggtcctttgcaccaagcctaacagtttgattttgatccctggaattcacatggtgtgaggagagaactggctcctcccacaaggagtcaccaaaccacagtggcactgtggcaaatccatgcctctctcccaaataaataaatataatgtaaacaaacaagcaatcaaaaatccaaccaacaaacacaaacccctggcagagactatttgactcctgtcatctactcgtggctaagcccgacttccacagacgcctctcacccagctcaagcgcaggcagggccaataagctctttcaacatctcctaagaatgatcccttacacagacttcgtgctgcacagctttatgaatgcggcagaaacccagctttctttgcttataggtatgttcctagtgagtttagctgaaggatccgataagagaggcatagaaaaattaaacgagcaagcccagtggtctataaaaagttgaagacatgtttgagtaaacggcagcattcaggtggattcttgccctgaaccgtcctcgagaaccataacgactttagcaactaaagctcccttcttacctgtgctgcctggttttatgttaacacagctagagtcatcagagaggagggagcctcagtaaaatgtctctctaagaacaggctatagactgccttgtaggccttttattttgcttttacttttttgagacagggtctcactatgtgctccagatgtcctggagcttgccatatagaccaggctagccttgaactcaaagatctacctgcctctgcctcccaggtgttggaaggaatgttttgtgccactacactaggatggaaggagattagtgattaatgagagagagtatagcccattgtgggtgaggccatccctgagctactggacctgggctctataagaaagcaggctgagcaagccatggggagcaagccagtaagcagcatcctccgtggcctctgcatcagctctgcctccaggttcctgccctgctgagttcctgccctcgctgctgttgatgatgcactgttctatggaagctgagtgaaataaacccttcctctccaagttgcctttggtcacggtgtctcacaacagcaatagtaacccaaactaagtcctgactcaagggacaagaatattctcatggataagttaggtaacaccgtgagccaggtgctctggcgtgtggggcaggatttgttgtttttgatcacgatgagatctgagtgcactgtcgctctcttcagacagaccagatccgggtgcaccggatcccattacagatggttgtgagccaccatgtggttgctgggaattgaactcaggaccttggggagggcagtcagtgctcttaactgttgaaccgtctctcctgtcctgtgatgagattttaaataaaatagaattcttgggtggaaatagctgggttgacaaagtgcttgccatgtagatgtgaggacatgagtttgatggtcagaagtcatgtaacaatcaggccacagagcacatacgtgtaattccagtgctgcgaagcagaacaggtcggtcctagggcttgtgggccagttagtacagagactctagttgaactctgttgaaacgagaggacactctgatcaaaagcaacttcaggaagaaaggggttggtttacagtccagagggacagagtctatcagtgtagaggaaggctgcgggagggaggggcagcctggtagtcagggattagagagatcacctttcatccccacacaggaaacagagtaagagaagttagtgggacgaggtacacaacttcaaggcccactcccaggggcatacttcctccagcagggctctaccacctcatgggtttctaaacgtcacagacagcgccacctgctggcgacagtgctcaaaagcaggaacccatgagggaactttcatagtcaaatcagaacatcgcctgggtcatagagttccaggttctgtaagagatggtagctcaaggaaacaggctggacagccctgcaaaccaatcctggaacttgccctttgaactcactacccccaggagaattaccactggcgtagtccactctggctgctgggcctttctcgcaggcctgcaggctaaagtccgaggtgctgcaggttggtccttctaaggtatcctctgcttgcagatgggtcttcccaggtgtgcccttatgatggtatctttgtctgtctctccatgcttcctgcaaggatactatccgccattttagttcggggcacacattaaaggcctcactttggtttagttgcttcttcaaagactgtctgcaaatacatcctcattctgagattctaggtcttagagctttaacagataggctttagataatacatctcagcccacccctcccatcccactgcgttacagacagggactagtaaaagtcacgaaccagggctggagagaagtctcagggggtaaagtgggtgacatacaaacacgagggtctgagcatggatctccagcatccgtgcaaaagccaggtgtggtggtgcacatctgtaatcccagtgttggggacaggaggagacaagctgggattcagtggtcagagagtctaaccaaatcaatgagctccaggctcagttagagaccgctgcaaaaatgaggtgcagaataactgagggctatacccaacattgacctctgtcctccagctgatgcaaacacatgggcacacacctatatgaatgtgctcgtgtgcacactcacgtgtacacacacacacactcatcatgaaagaaaatcatgcaggtggctgatcagagcatcctgagagcatccacgtgtggtatggctgtgttgtgattcttcacttccgttcagctccacaactggcgctcagtatcctttaatatcaataataggacaatgcactggcgaagccgtgccggcaccagagaggtgacatttgagtcactgggtaatgtgatgaatcaaatcaataactagagcggatgtttactgtacgtcacccttcctgtccccatcacgcgggtgtgtgacacatcagtgctggattgtacccagacgcggaacaacgttcctttggcagctttgtgaggtggccttctgggtcacaaggatagttagagacacctctcctggaagaacaataccccaaataaaagcatcggcctgcacacgttgcctgcagcaccctggggtggcacagggttctgggggctcgactagtgtttacagcatgtgaactaggctctgtggaacagagctctgactgtgcactgtggctatctgctcctgtgtgcttgcctcttcacgatgggatggacagagctacatggcctaatgcacaaagttgcttctgggcactctgcagtgggggtggggggggctgggtccaggtcctacctttaaaagagattagtacacacctttcaatatggtcaaggtcataccaaagacaacaaagcaaccaagagcctgcctggcctgagccagcatctgtgacgtgagaagcagggacacctgcatagctccgcgcctcattcctcggctccagaggtttgttctggctgctgttgactgtcccatccttcagatccgcatattgaggcctgaggggtctcacacggacaagccttccctgtcttggaggctggataaccacgtccgaagtgccagtgcattcagtcctggtagagctcgtgccctgattggtggacagtggacgtctttaactgtttttacatgcccagaattctcaggcttttcccttttataatggcatcgatcacactttgagggtcccactcccctggtctgacctcactttgcttttctcctgtggcccccatcacactggagattagagtttcagcagacaatcatgcagggtgtgcatgcccagagccttgggactcctgcatgtcgatgccaaaactgtccggcttaggaagcaagcttgaacacggccatccgtctgtctcactcacacaggatgatggggacgtgggcattctgatggactgaggaagacaggctggggctcaagggttaacggtggagctgggcgtccctgagaatgtcttcatcaacttggttccatcacgtctgtgcctgcctggcacccagacctgagcccttgtgtgaaatctcagtaagaggaggcaggaagcgggtggaaacagaaaggagggcaccgggacagggaggagagcaaaatgtcatgatacaagtgtgggaagatgccacgatgaaacacgttattctgagtatagaacccaagattcagaacttctgattttatccgtggtctgcctcaaaaagccctctgagttgtccaggttaaggctgctgcggatgataaggggagagaggtccagtagtgagcctgggctaagccccaagtggacagtgaggtcacctcctcagtgagggcagctacaggctttcaacagctaatgccaggataatgaactagtgacaggctactaactgaatcaaattggcgggatgggggagtctccgacgctgttctattactgtgaggagacaccatgaccaagacagcttatgaaaggaagcatttaactgggggcggggtgggggctgcttagtttcagagggttagttcatgaccatcatggcaggaagaagcatggttgagcagtagctgagagctcatgtatgatctataaagatcatacatgagagagagagagagaatgaatatatgtgtgggtctggcataggcttctgaaacctgcaagcaagctcccctgtggcacccctccttcatgaaagccacacctctaaaaaggccaccccttccaatccttcctaaacagttccacttagtggggactaaccattcgaatacatgatgagcctatgaggccactctcattcaaaccaccatggggtgtgatagatgaccaggtaggacacttacagaacccaagcactgggctaagggatctggcattaatggtgctaaggcacctactgtgtgtgaggagtggccagggacttgggacaactcacattcttgtggatcataaccccaataagcaagacacattgtgatggtttgtatatgcttgacttaaggagtggcactattagaaggtgtggccctgttggagtaggtgtggcactgtgggtgtgggctttaagaccctcatcctagctgcctggaagccagtcgaatgctagcagccttcagatgaagatggagacctctcagctcctcctgcaccatgcctgcctggatgctgccatgttcctgccttgatgataatggactgaacctatgaacctgtaagcctgtcccaattaaatgttgtccttataagagttgtcttggtcatggtgtctgttcacagcagtaaaaccctaacaaagacacacattaacaaaacagggcatgggatatcaacatgacatacttagtgtgtaaggaaagagggtgaagatactcgggtaggagatgccggcttgcaaattgaagtttgcccattatgagtgcagaattggggctgaagtgaggcctctgtgggtaaaatgcttacaagacaagcatgagggcctgagttcatagtcccctgaaaaaagacaggagcagttgtcacacctgtcatcctaatggtgggaacagaggcaggaggatccctgcagtatgctgtccaggctgtctagctcattgatgtgctctttgagaatatgtggaaatgctgtggggaagacatctgacattttcccttggccttgctgtgttcttccagggacttacgtatgaatatacatgcatgnnnnnnnnnnnnnnnnnnnngatcttctaacctcagaaggattgctggccttacaacaagtggaaagagctattgaagaacaatttgttacttatatagattactctttgcctttacatctgttaatttttaataccattcatatgcctacaggattgttgtggcaaagggctcctctagtgtggatacatttgaggatatctcctaaatgtccccccccccccccccccgcctccagagagagaaggagtggagggagggagggaggggagcagggagagagggagggaggacgagaaatacaggctgcagttttaaatgaagttgatcgactaaagtaggggaatgagttagctatgtgggggagagcatttcgggtagagggaatagccagcaacccagatacctgaaatccaatcctacaacgattattaacttagttgttacacattaaaatcccctttgtgtgccagtaacctagggtttcactttggttttgtgacagggtcttgtagggcaggctagctccaaacttgagattttcctgctcccatctcccaagtgctgggcttgcaggtgtgctccaccacatctggatccctttgttttaagaaagagttccgcagctagctaaagataggatacctttcacgggcgtcgcagcataggtgtgaagccacaactcttgtgctacagcttgaactctccctggacaaattcgaacaagcatctgtttccgccaaccacagacaaaaggtgtgactccacctaagttcaacctggtcaaccaggttcctcattgggcttacagagcatgtgtaagggatgaagatgaagatggagacctctcagctcctcctgaaccatgcctgcctggatgctgccatgttcctgcctcgatgataatggactgaaatgggagcacgggtcaccccaaatcagctgcatcaaagaagagagactcacccggggtatagatggagtcctccattctgtcaccctccacacttaagcgccttctgaaaccatgcacagctgtgcacagtgacatccagctggcgggggagggggagggctaggcacaggaggagtggctggaatctcaggtgaggtcagatgacctttctcaggcccctccccttctgtgaggcctaatctggaacagggatctctggtgagatggctgctgtgctcagagggcagtgtatgaagcagtaatgctctatacaccctcacacaccacctgtggggggatggttgaagcctcagagcctttctgggacaaggtgacattgtcattgacagcctattgaggagagatgctgatttccattgaggcccacgccttccatcctaacttaattaggccaggcagtaaaaccttcactaataactgtcaggacccctgagtcaccagggaatgacaaagcttggcaagcaacctctgtgggaagggaaagtgtgacttcactgctgtctccctctacaaccgtcctcggggggtcaccaaagacccctcaattggtcagcttgctccataccaaacctgttggcagaccacgaatgacttatacacacgtctgcacagaacgcgtccatgcaaacattccatcaccgatttctagtttttgtttcatttttactttttaaagacagctctggctgtcctagaactcactctgtagatcaggctggccttgaactcagagatctacctgcctctgcctccagagttctgggattcaaggtgtgcaccatcacttggccccagcatagacttttaaaaagatgtatagactttgatccctctgctccatctcccaagtgttggggttgctgggctgcatcaccctacctgtttatatggtactgaagcctgagcccaggtcctcacagaagccccaccccaccccacccccagctgagctgcatcctaggccaatagtagagcattttgggaaaagaaaaacagtctctttaccccaagcccactacttccagcttcgtaatattccataccaatcctatatgacacatcttggggtgacccttttgttgctattctttgtagttattgtcatctactaatttataggcttggctggggccttaagtttaacactgagagcctgtaggttaagtgaagactcatggatgtatcccaggctacccttaaattcagaaacctcttgcctggggcatgtttggccatagttgtcagttacttcatgcacatactcttgaaaacttgtgtgtgcacacatacaaacgtaccacatgtacactcatgtgcgtgcatgcacgtgcacgcacacacacacacacacacacatacacacaatgttctgagatgagtaggctgctaacagaaccactttgctgggttgagtctagtgaagccggctggccaggccgcctggggatgtctatcagtcctccttgctgggtactatccagccctaaggaaaccttactctgaggaccgagtgcttgtgatcttacatgcagccaagcacatgtgctggatctgagctttgagcaatgcttgctgtgtctttgctattttgaacaactggtttaatacaacctgacaactcatctatttactggtgaaggattttttggaaaaagaagccgagatatttcacgtcataccccgcatcgcttctgctaacattcataaatccttgtccttctgccttggccacatcatgtctgtccccatctttcacctgtgatttattgctgagtgacttattttgccagatttataaacttcatgatgctctgaatacccactctgaacaccagtcaacaagccagtaaatttattgtctatgaattgttactctgaaaaattacatcaatgcaaagtgattgcctttcagcctccctagccaataaattcattctaatttttttggaggggacgtatgaggtcacaggatgatagataaaacgggcaatccctcaatgaggagtgtcggaagttctccagagcagacgcccagacggacttctcgccgcatcatggacagggtgcccttctgctgcctgctcttcataggacttctgaatccactgctgtcccttcccgtcacggacactggtgagaggactcttcagcttccaggtgaggtgactttttgttttttgtttttttttttcagttctgggtgccactcaggggcaggaggaggaggaggaggaggaagaggaggaggctggctgaaaagggtcctctgtaggagcaaccatgctttgaaaagaggctctgagggatccttactgcaggtcttagctttagcgatgggcatggtcttctctaaacaaagtgcgtatttcatgtaacaaatgtacttccgaactttccttgtcacttttgttcataaaaattggacagacttaaaacattaccttgggttttggagtgaaatggttgaatacaggagtagtgttttccaacgacagagagtagtgtactctgttgtgagttagaaagcacgcctctgcgtgtgctatatgcaacgaaaaggcttaattaagcagagcggcggctgaagctggggaccaaagaggcatccaagtttgctttccttttgacttaatgttctattcaggttcagctgaaaggggacaaaattagaaattttaccacagcctctcagtctggtatcaggttgtgtattagagtccataaaaaatttgttaactgggtttaatatttgattttagatacctaagcaaaatttcctttatgtttattgtgtatgcacacacacgtaccagggcccagatgtggaggtcagaggatcctctggttctccagcacgtgggcaggcttggcggcaggcaacctctgctaagctagttcactggcgtggctcttgggtcctttcagaccttttcctcagcaagttctcttcctgccactgccactggaccgtccagcctccgccagcattctgagcatctcagagcatcactcacgttctgtccatcggctgctggggtcactgagttcacactggcacggaacctgatgctcaagaccaggcatgagccaatgctcttactttaaaagagcggtgcaccctgctcttcctctctaaatcagagaccaggagcgtcagatactgatgccacgttaaacagctacgagggaagggcttaggagagggcaggcgcctttagtgtctctccactgtctttcatcaaggttgcagatgagtatttgtccctctgcagcattccagggtcttgtgtggctttccagccagactccctgagcatctcaacatgctggcacctgcccaaggcacatgtcccactgccagccgccactggtcgcacacaccgtgcactctgtacatttacacctgttatcatgaagaccacgcctcacacacacttgtcatacacgctgcctgcccttatacttcacatcacacacagtgcacacagcttgcacatagcatatacccacatatattcaccttgtataccacacttgcatttaccacacttccctccgcatacacacttcacatcacctttcacacacaagtcacaacgcagcgtttgagcttcccgagaatgtccactgtgaggtgaaatagaggtgccacagtcaacttcactatgggaacacaaatcaagaggcaataggtcacagtagatacacagaaatgaggatcagtcagacttctggctcctgcccaaggcaggtgctagggtgaccacatcggcagggaggggtggcccatgggttcctccatggactcctgatgactggcatagcactttatatctgctaagtgccaccgtggcatgtcaccagttctcacctctctgtccccggcactcatcgacgatgggaaacagaacagccaagtgaagcccaggttaggctacttgtctgtctgtaccccacagtgcttgaggaagacgctcttcgggctctggaggagctggagaggatggccctcctgcagaccctgcgtcagaccatgggcacggaagcaggggagagccctggagaagcaggtaaagcactcttggggttgtgggcggatcccagagctactagagagagctcgaaaagctgaactgtataaaccttcttagtctatgcttttaccaaactctgtgtacccttctgagacctgaggctagcctgggctacataacgagactatattaaaaacaacaacagcagcaatgaggaaacgtcctttttgggttgactttcaagtaaaatgtaaacagggtaaaatgacgaatgacagacatggggactcacacctgtgaactgggagtctgaggctagcccgaggtcctactgcaacacaaacaactgataggaaagaccacagctttgactattttcttctgttgctcagaacacgtgggtagaggacgaagagtctttcagtagacattgcttactgacagtactgtcagtccagctatagtttagaatccttgactgctctcaagtacacactgcctcagtctggaaaggactggaaatgagacacgatttaggggtgttccacttgtcttttcttcttcgcacatgcagtgtgcctgcatgaggtgggctcatgtgggggtgtgggaggcccaaaagtgacactggctatttttctccagctctctccaacttatttatggaggctgggtctctgggcctggagcgccttaatccagctgtttacctagcccagggatcctgtctctatgatctgagtgcttaaggggccaaggtggcctctatgcccccccagcttttacctgggttctggggatctcaactttggtccttcagcctgtgcaccacgagtcatctcccagccttgggatcccagattctgtatgttttgcaataagcataactggcgggtgtggtggcaaatggcacaggtggttttctgggaggccagcctggtctatatagtgagtccctgcttaaacaaggaaaaaggaagagaaaacacagcggcagatctaatgagaaggtgtcaaactgttttccaggtcccagcactgagactcccactccacggggaagcatgaggaaggtaagacgctctggcctttgagagagagaaacggaacttctcataattcacgacccaagagtgttctaaggaatcacaccgtaaaataattggccagtgttcttatgaggcagaatttttctaaaattcacagaatttgtaactgtaacaagaatgtaacagatgcctactctgggtaaattgtaacaagaatgtaacaagcgcctgttctgggtatactgcagtaggatgcaagagaaaggagcagcaggtcaggctgctgccaggcttgccatccactgtcttgccacatggccccattggcagtgccatccctaggaagctggtaagaaatgctcagactccacccctccctgctagtcacacctgcaattcaacagctctgcaggggaccagtgatagattagtcagcttggggcacccaccaggcagcgtgggaagggtcgaaggatgctgtgctcgcctccccaggatgaaaagggttgcaaaggctggaccagagacacctctgtggctggaatcgccactggcatcctggtagccatcactgtgacaggggatcctagagacagggagcactacctgaagccctgaggggactaagtgtggcttccgtgtgcagctgggggaaagtcatcactcagaggtttacatccttctgaacagtaggacagtctcaggcggggttactactgctgtgacgaaacaccaggaccaaagcaaccgggcaggaaaggatttatttggcttacacttccacatcactgctcatcactgaaggaagtcagagcaggactcacacagggcaaggacccggaggcaggagctgatacagagaccatggaggggtctgcttactggcttgcttcccatggtttgctcaccctgttttcttatacaacccaggaccaccatcccagggacagtaccatccacaatgggctgtgccctccccatcaattgctaagaaaatgccctagaggcttgcctgcagacagatcttatgggagcattttctcagttgaggctccttcctgactggtgactctagtttgtgtcgttgacagaaaactatccagtacaaggattatccctagggtctcaaactgtaaatggaggacgtgcctactgtattctagaatcacaagaaaatatggatcaacctttaaaacaagccaattttgacagctaggatctatgttacacagaaggcaagtgtctagaaccccaacagaagcctggcacagagaggttaggggagctcaaggcaaccgcagagttaagctgactggacgagagctccagagacccagcccgaggagtccccagaaaggactctgactcggggctgtttatctattgttctggtcttgtggtttcaggctttcgctgggcaaaattctaacactgtactgagtcgtctcttggcaagaaccaggaaacaacataagcaacacggggctgccccagagtgcttctggaaatactgcatttgaggagacacaagcgcccgttggtctctcagaaccattgcttcaggaaacgggcagagcagatgcttgaagcaaaatcacgctaacgacgccttgttcttcattatgagaaataaatcctctatgtttctcaagttatcgcacacagtttagtttactttgcgtatacaccctgaaaaatcgacagcccacctttgcccccatttatcttggaaatgtacgagttgggctggaggtagctcggcggcagagagcctgcctagctatatgaactctgaactctgctccatcctgggctttgcaaaaagggggagaaaaccacttaagtaaagagcacacagctcagaggaggaagaaaaggcataaagtcagaaattatttaaaaataaattactttcttgacattttctcaagccctaaaaggtgaatatgtacattgctttggggtgtgattggagagataggacctcatgtatccagcaccagccctgaactcctgattctcctgccccactacttcctgagtgctgggtgtgcaagtggatgtcaccgtatccagtgccggttggtggtgcagaggctggaacgcagagcttcgctcgctcctgaggcaagcattcgctagtttgaaaagctctaatgtaaaggcagtggcgggcggggcctggggatgctctgaactgtttcttgggggcaagcttgtgtgttcacacccttgctctcagcaggctcaagcacttgaaaacttccctgctctcaacctctgtgagcgagcttcagtgtccagatgactcgctttgagtgctggaaactcacttcccttcagctaacaaaggcaaaatacttagtgttcttagagctgacaccaggattcaggctgtggaatgggatcggcgggttattcatctttaaggcccacaaatacccaagtagaccagcatttcatgcacaactgtggcagtctgtagatgaccagacactttgtctgggtgccacaggccgtgactgaccacagagccacaggctggaagcactaagtctctcacagaagcaacgttcctgtatgagaaagtttgcaggtgagcatcaggtctgtgccaaccatgaggcactgtgtaaacctcactctcccttgtccccaaacatcaccagtgccttcaagtaactgtgacaaagatgttctaatttagacacgacagcaacagctcagtagggaaagcaggtgtgcagattcaagcattcagctgtcagatctgcctatgaggctcgtggctccttagtgtcagaatcaaactagctctctctcccttttggcaatcccaagaagcctaaatgggtttctagtgtactagcataatctacaaaaccgtcactaggcgtaatgatttggggcgattatcttaggacagactgctaagcccagtcactggagctgagtcctctgtcgactctgcagcctccacgggctcttgtgaggctgggacgagagactttctatagagtacttacactggaggcagaaactgtaaatcctgggctctgtggccctaggtgctggcatgagaggaaggcaccactgggcaggcctgagacttgctggctgggatcaggctccagattctgatgtctgactttgctccaagtcactcagagtttgtgaaacacaaggccggccgtcctacagaagcttcagggtaattttgataattccgcttcactggcataaatgatagcattatccatatgcttacaggtatagacatccagggctcagtaaactctcagggctagaatggagactgaacacagtggcagatgcctgtcctccagagtgggaacagagacgagcttacacggcaaacagttgtgagtgtggtgatgtggacccagcacggggccttcagggaccgcagcaagcaagtgtctctggctgacaccaagtgtgctcaaggctcgattacacaatgaagagcattctccacttgaacacatatactgtttattgtttttactcaaaaagatacccaatgaaaagataaatgtccactaagtacaagcaaattcacagttaattatgaacaaattgccaatttggttaaagtttgccaccttgtgaattataatattttatttaatccatttatttacacatcctattttcataaattttgacctctgacccaagaaaataaagctttggggggaatatttatgtagacattcaagtctacaacacacacttttcttaccaattctctagttattaatacacaagtcagtgagcttgagtttccactgggtatgacccccatggggggcagcaggctctgctggaccagcccacagcagcagagattgccggtgtactgatggcatcctagcagaggtgagacgtggtaaaggactttacagacctgactacagcaccattttcaaatcaagcctggcataatacagactccataaggtgtggacaaaggcaaggaaataaggaactgcagagaaaacggggatccagaaccagcaggaaccagagaccatcaggtctgctgtatgtacagaaacgcagaaggatcctggtagcttcgctagagaaggccaacctgacaaacgcaggcctcccaaatcacttcactaccaggatggactaggttctgagaagtctctctgttcacacagcaggaacacgtgtcaggaactgctcaataccagaaagctccaagaaatgtcacaggcagcatcttaaaatgtttctgacaccttccaatagaactgcggtccagaaaaagcactattttagaaaagaagtctgagccacagagttgggagcactgggtacagcggcctctatgacagtctcctgaccacaatgacaatacagttatcaatagctataaactgtcagaggagaacaaagtgttcctaaaacaaagcaaaaacaacagccaaaaaaaaaaaaaaaaaaaaaaaagaagaaagaaaaagaaaaagaaaagaaagagaagtaagttggactgcaggaagtgaagcaggaaaaggccactgtaaacctcctccccgtcagttccttcctgacctgcacgggtggctccactgccatctcgagttcaagaaggaactttgggcttctttaaaccagagcaccagacagtgagaggacagacgcgtgaacaatcacactcacttctgaggcagaaactgcctggagagcgtggactcatgggactctgctgtcaccgagctggggtccccgagctcccttaagtgtagtctcccaaactcttacccctcttcaagggcaaacaaaaggcagaccgctggtcgtcatcgtgtcgtttggtgaaaaggaaaggttaactgtttgttttggtgagccggggcacacacatctccatgataacattaacgtaatatttaaaactgttgaaaacactattgtttgggtaagaagctttttgccatgcaaggcttaacttcagtcatccaaggagtaagtcctggctagctgacagatcttaaggaaagagcccctgtgaaaggcagctgccacaggaacttcatggacgagaatggggtcaaacaaccaaagccacgagtcccacagttcctggggaatgatgcgctctgacgctctgagagaaagctggaatgtcttaccatcaggaagagaagcaccatgctgtacaaaacctagatcaatgtggtaagttcacggacaccccgtgagaaacacacaacctacagacagaagttcttcaagtattctagtgggaaagtgatcttgtaacaacataaaaaagcaaacgagacgaaggcctgcgactcgttccaactgtaacttactcagggtgacctctgaaatctgctgtcagacacagcccaatgtcttcaggtgacagatgagttagagaagacgtcttgttgactgttttactatcatgaacaagagccaacgtctgctcatgttttgggaaaaccaagaagggagacctggggagacaggtcagcagtggagagtgccagcctagtggatgtgaggccctgggtttgatccccagcgccaccaaaaccaaaccagaacaaagccagggaagaccttaatgtcaatgactggcgtttcagagttagactgtggtgaggtaacgcacggctctgtgtcccacgtgacctggagggggtgtgacatctttacagctgctcaactggtgtcttctgctgggtgctgttccaggacctctgcagtgtcacccactgaacctctgtcttcacaggcgacacagctctccaaaagagaccaaaggcaagcgtgttatttgacgttaatgccaatcgaagagtttaaaagtaaggaacaggctgagccgagggaagatttactggttggtttttgtaaacgtgacagacacaaacccaggcatgtctgggatgagagaacctcaactgagagactgcctccatcatactggcctgtggtcaggtctgtggtgcagtctcatgactcatgagggatgtgggaaggccccactcactgtgggctgtgtcacctccaggctggtggccctgggtgctataagaaagcagactgagcaagctatggggagcaaaccagtgagctggccctctccacggcctccgcttctgttcctgctctgactttccctgtgaggtgaaacatcccttctgagtgcttctggtgcgtctatcacaaggatagaaagcgaggacagaaagtggagaggaggaatagacgagcaaacataagcatcagtgaactgagaggacacctacagagaaagccaccaaagccttctaaccctgtgaaagacaaaactgagataaagctccctggaggaataaaggcaaggctggaagaagtgagaactaaaatcctgaagaccaggtaacggtatataacggatgcagtggagggaacaaaggaaaagatgtatgtgagaagaaaaagcctgaaaatcttccctatttaatgatgatctgaacatccaaggtcatcttcctgaatgagcatccaagaggctcaacggcctccagacgggatcagctcagacatacacacccagacacatcacaaccactcaaaccaaagcaggagaggacacgccacacacgggattcttagaaaatcatccatagatgtctcagcagaagttctggaggccagaagacagaatgctgatacaatcaaagtgctaaaagggaaaacaaaacaaaacaaaaaaaacctccttccaccaagagtcctttatctgggaaaactccttaaaaagtaagggagacattagacaatccaaaaaaaaaaaaaacaaaggcctggagagtggggcatgatgtcaccctctctgcagtgtaagcagtgctgagggtggcactggagatggcagggtggttaagagcccaggctgcagcagagagctcggttagatttccggcatacacagctctagaggatctggcgccctcttctggcctctgtgggtaccacgcatgcacgaaggtgtgcagacatatgtacaactacacacaactgaacacaaagaggaggaacggatgaagggatactgcagctgggtcagagggatggtaacccaaggctgggtgctgttacagccctggcttgccagtccatgatatgacttaggacactaacacccaagaatgacctgggtttctgtcccagggttctcaatgcaccaacaagcagcaggaaatggataaggagctcctgtggagtgagaaagtttccttcaggatgcgcctttcttatactttggatttaagcttttaaagaggaatgtatatttgaactatgtatctccatacctcccctcagctggtcacaccccagggaagtatctttatcaccctaaccattccaactggtgggagagaactagttcatcatggttgtggaatggtgtttcagacacataaggaaagaactgtggctactcacaagagacttttaagactgggactgctgacattcccttacaaaaaggaggtagggagtcactagaccgtcaccgtagaccgtcactgtagaccctcactgtagactccagcctcttccctacacttacctcccaggtctgcatggtttcacctcaggtgtcctgtgttctcaggaggttctgagggtctagagtgcagaagggactgaagggggtggagatggagcgctccatcggtggaactatcactcatgctggggtgagatggtttcagtaacatggctgtctaggggtcgcctatgctctgtaatgtaagctctattaacttactggtttgccaagacggcctctactttacagtacttggtctggggctgggccctacctggcatgaaccgacatttgtttatgcttctcctcctaggaaactttacacggtaaaacagacctgtattcaaaccccagcacacatgactttacatgtgcacactctgtattcagagcacacaggtaatcgttcagatgaaggacaccaggtgcctggcacgcgacagtcatgatgcgagggagggcatgcttacctggaggtgtccctcctgaggggctgtgtggctgtggatccaggagcgcaccttggccagctcctccctctgcgcgggagagaacaggggctgctgctgttccatgctctggagcttctccaggtcctgcttcagcacctcctctcgacccctaagatcgagaaggcctctgagcgccgcgcgtcccccccagtgccgatgcacttcgtctcttaacttacgacacactcaggttgtctgccacactcacgtggcaaacctttgcttcttggtggaaaaccgtgacgctaaaacgaagcacatcaggaaatgaactttcccggcccccctccgccaggacaaaggcaaacatctcgagtgtgcgcgtcctggaaggacagcacgtgtgcgtgtgtcctggttgtggtgaacagcgtgtttgctctgtatggagctgcacatgtgtggctgcaatttttcctccaagaatcatttgttgcttgaattgagatgaacaaatttgtaagcacatttttttaaatgattgtatctaaaacatttaaaagtcatcttatgccgggcatggtggcgcacacctttaatttcagcactcaggaggcagaggcaggtggatttctgagtttgaggccaggctggtctacagagtgagttccaggacagccagagctatacagagaaaccctgtctcaaaaaaccattaaaaaaaaagtcatcttatgtagaaaaaccacattagaaaccaaaagaacagccagtgtgatggcttgaaagggatggtcacttctaggcaagtgtggctacaggacgctgtcctctatccttacgtacacaccacagctgggaaggcacttgccctcttaccaagcctgagtctgatctctgggacacacatgctagacagcgagaacaggcttccacatgtatgccatggcaacaaaataaatgacagtaatatgaaagttttaggattaaagagataactcatccaaacgctaagtggggtttgcagagtgcttccgtacctctcgggcacctggtatgtcatgagaacacactctggtgtccgctctatcattctccagatggactcttcagccgccccgggaagggcttcgtctctctgtctatcctgtggcctctgtctgttttcagagacttcagaagcatagtcagtgctactgaagtatatactgctggcactgcttcctgccaaagatccacagaatggaaaacacccgtcagacgttcacgtgccagagaggtcctgttccaactttggcacctagctgtccatctcagcagggacagtttaagatgttaaccagatacttaccagatgaccttacaatttcaaatgacttatagcattattgatcacaggcccagaccagagacagtccagtaaccatctatacaatgcaatcccaataactatccatacaatgtaaccctcctgagcaacagaaaggacgactaccaatacacataatgaggatcaaccttaacagcactactctgagagactcttaatgcaagaagctctcatgctgcactacaggaactgaggcggtagaaagcacaccagtggtgtcaggaccgaggtcgactatcagtctgactagaaaacactctcacagcacacgtttaaacacttggtcccctggtgatggcagggtcctgggaagtggtcaaccctttggggcaggatgcctgagaggtgggtgtggggggggggggagataggaatttgaatgttacaacatggccccacttcaggtctgagctgattcttgtctgctatgtctaggtccctccacctaaggctcagatggtctagcctccactccttctcagccgcgatccacacagatccatgagcccaagcaaatcctcctctaaattgcttccagcagatattgtctcagccatgagaaaagcaactcacacagaccgtaaacggttacgggagaactttctagagcagcaggaacagcctaagtgcttgtaacagttacaccaatgtctgttttgtcaaatataacccttcccgaaaggaagcctacaaaaagaaggggggtggggagccccaaacttcctttctatgctggtgtccaagctacaaggccttgggcagagtgatctggtaacggtgaggggctgttttcctggtcacctacctgaggcagcagcagacggacactcctgctgcgctgttgccgtggccagctcaccagaggtgcagtgacggctcctactgccactgggacctgtaacacagtgctggaggggaggacacaagggcacttagcactcccaagagctagctagcaggcagctcttcaactttacctgtcacgtggaatgagattcacatatgtaggtgaggagtggagactcagggctggcgtcaagaatgtgcttaaagtttctttggaactactgtgctctgaccccggctgcatgtcaggcaccacccaagggtgggcttctgtacacctctgtcatctggcaagtggacccggacactttatatgctctaagcatagtgtgtcaaactctaaaaacacagtagcaggcaaaacagagtcccagccctctgagaagacaggctacacagggtgaagcaccacggaaatactgcatccttcagtcctcagcggaagccgtgagagagccatcttcccagctttctcatgaagacacaagccaagatgaacgcaccactgcagtgagcccatctcactagtgacagagctcccatgagaaccaaagtcactgtctctattttctcaagatttatatgactaggtcagcgagatctagtgaaggcacctattaccgacgacctgagtctgatcctcaaaacccatgttataaggagagaaccacctgcccagaattgtcctctgacctctgcgtggacactgtggcacatgagtgcccaccccaacagtaaataaaacgtactttaattagaaatatttattatgtctgtatgtataggtgcatacgtgtttacaggtgcctgaagcagccaggtaagaaccctgggtccttcggagctggagttaaggggtttgcagcacagccgatgccatgctggggtctcctcgggccctcgtgactacacagcaaccactgagcctcttatccagctcctgagctgctgtcttatttcttagcccccaggctttttttttttttttttttttttttttcatccaggctatccaaagtagtgactggggagacagcccatcagttaggagcccttgatgtgcctccagggaccctgggtctgttcctatcacccacacgtggcagcttacgactgtctaaaactccagttccaggggatccggctacctcttctggcatggccccggagcataccacacacacgctggcaaaacactcctacgcataaaacaaaacactaatttttgatttcccactaaaatgcaggaatgccagactctgaggtttaatctgataaatatctcgaagtgcttttataggttaagagtttggaaagttcaagatacttgacctaaaaattttcagttttgaaaatggcttgtat

SEQ ID NO: 936 - DNA, 538 bp, Mus musculus
ccagagcagacgcccagacggacttctcgccgcatcatggacagggtgcccttctgctgcctgctcttcataggacttctgaatccactgctgtcccttcccgtcacggacactggtgagaggactcttcagcttccagtgcttgaggaagacgctcttcgggctctggaggagctggagaggatggccctcctgcagaccctgcgtcagaccatgggcacggaagcaggggagagccctggagaagcaggtcccagcactgagactcccactccacggggaagcatgaggaaggctttcgctgggcaaaattctaacactgtactgagtcgtctcttggcaagaaccaggaaacaacataagcaacacggggctgccccagagtgcttctggaaatactgcatttgaggagacacaagcgcccgttggtctctcagaaccattgcttcaggaaacgggcagagcagatgcttgaagcaaaatcacgctaacgacgccttgttcttcattatgagaaataaatcctctatgtttctca

SEQ ID NO: 937 - protein, 135 aa, Mus musculus
PEQTPRRTSRRIMDRVPFCCLLFIGLLNPLLSLPVTDTGERTLQLPVLEEDALRALEELERMALLQTLRQTMGTEAGESPGEAGPSTETPTPRGSMRKAFAGQNSNTVLSRLLARTRKQHKQHGAAPECFWKYCI

SEQ ID NO: 938 - DNA, 85920 bp, Homo sapiens
tggttattgtctagaagtttttggaccaggtgtggtggctcacgcctgtaatcccagcactttgggaggcccagatgggcggatcataaggtcaggagtttgagaccagcctggccaatatggtgaaaccccatctctactaaaaacacaaaaattagccgggcctggtggcgggcacctgtagtcccagctactcaggagactgaggcaagagaaccgcttgaacccaagaggcggaggttgcagtgagctgagatcacgccattgcactccagcctgggcaacagagtgagactccatctcaaaaaaaaaaaagaaaaaaaaaagaagtttgtagtcttgctatgctgcccctttcctggtctcataactagagagtacaagctcctcttagttttttatgtgtttttttgagatggagtcttgctctgttgcccaggctggagtgcagtggtgtaatctcagctctctgcaacctctgcctcctgggtttaagccattgtcctgcctcagactcccgaatagctaagattacaggtgagcgccaccatgcccagctaatttttgtgtttttagtagagacagggtttcgccatgttggccaggctggtctcgaaatcctgacctcagatgatctgcttgctttggcttcccaaagtgctgggattacagatgtgagtcaccacgcctggcctcttcttggtttttgctttgttttgtccacgctattggcatttttagagtgctgcttctctagttcccagtcagagggaaatgaggcagaaagaaacccattgccatgttgtttcttgggtctggagatcctgacccaattggccttcctctctctgcctttctgagaggttttcagcagtactcagcaggacaaatacggaaaacatgacatctcaatctttccagaagagatctccattttgaaattcaacctgggaacaatttcaaaagacatcccgttggtatttctgaacatcttgccagtttttcataagttctaggagatggtgtggttattttttatagcaacaagcatatgaaatcggggtaggactttttgccttgccagtctgtaaataaatatctgcttaggattgaaatttgcggagcagtaacacaaatacttcactaacatgtaaaagaaagcctggcagctcacgcacagatcggttcttggttcctaacagatggaagcagtggggataccttcacaatcctggagtcataacactgcattccaaggaaaccatcggatctcgaatctcagtaaccctcaagacgaaaataagtgctgctgaattgaaactagagctatgattgggatatggctaatattttatggtttagtgattcatgcttaagattcatgcttttttagctaatgtagaaaataaagaaaatagttcttaaagaccaatacaaatatttggtaagaggaaacaaatttcaaataatctctagaggaagttcatccttgctgttacctctcttgtggatgagtttgttaaaattattattactattattattataattttttttagatggagtctcactctgtcacccaggctggagtgcagtggcgcaatctcagctcactgcaacctccacctcccaggttcaggcgattctctgcctcagcctcccgagtagctgggattacaggcgcccaccaccacgcccagctaatttttttggtatttttagtagagacggggtttcaccatcttggccaggctggtcttgaactcctgaccttgtgatccaccggcctcagcctcccaaagtgctgggattacaggcatgagccactgcacccggcctgtttttgttttgttttgttttgttttgttttgttttgttttgttttttgagacagagtttcgctgttgtcacccaggctggagtgcaatggcgccatctcaagtcactgcaatctctgtctcctgggttcaagcaattgtcctgcctcagcctcctgagtagctgggattacaggcacctgccaccacgcccggctaatttttgtatttttagtagggatggggttttgctatgttggccacgctggtcttgaactcctgacctcaagtgatctgcccacctcggccttccaaagtgctggggttacaggcatgagccaccacgcctggctgagtttgttaaaattaaaggggagaatgtttgctgcttagagatgttctgcagctataatttatggaaaataagtgttaaatgattcaaatagacaacaaaatatacgtatcttaaaattttttttttagcatttatgagaccagtacaaactactcaagaggaagatggctgtagctgccgatttccagaagaagaagaaggaggatgtgaactgtgaaatggaagtcaatagggctgttgggactttcttgaaaagaagcaaggaaatatgagtcatccgctatcacagctttcaaaagcaagaacaccatcctacataatacccaggattcccccaacacacgttcttttctaaatgccaatgagttggcctttaaaaatgcaccactttttttttttttttgacagggtctcactctgtcacccaggctggagtgcagtggcaccaccatggctctctgcagccttgacctctgggagctcaagtgatcctcctgcctcagtctcctgagtagctggaactacaaggaagggccaccacacctgactaacttttttgttttttgtttggtaaagatggcatttcaccatgttgtacaggctggtctcaaactcctaggttcactttggcctcccaaagtgctgggattacagacatgaactgccaggcccggccaaaataatgcaccacttttaacagaacagacagatgaggacagagctggtgataaaaaaaaaaaaaaaaaagcattttctagataccacttaacaggtttgagctagtttttttgaaatccaaagaaaattatagtttaaattcaattacatagtccagtggtccaactataattataatcaaaatcaatgcaggtttgttttttggtgctaatatgacatatgacaataagccacgaggtgcagtaagtacccgactaaagtttccgtgggttctgtcatgtaacacgacatgctccaccgtcaggggggagtatgagcagagtgcctgagtttagggtcaaggacaaaaaacctcaggcctggaggaagttttggaaagagttcaagtgtctgtatatcctatggtcttctccatcctcacaccttctgcctttgtcctgctcccttttaagccaggttacattctaaaaattcttaacttttaacataatattttataccaaagccaataaatgaactgcatatgataggtatgaagtacagtgagaaaattaacacctgtgagctcattgtcctaccacagcactagagtgggggccgccaaactcccatggccaaacctggtgcaccatttgcctttgtttgtctgttggtttgcttgagacagtcttgctctgttgcccaggctggaatggagtggctattcacaggcacaatcatagcacactttagccttaaactcctgggctcaagtgatccacccgcctcagtctcccaagtagctgggattacaggtgcaaacctggcatgcctgccattgtttggcttatgatctaaggatagctttttaaattttattcattttatttttttttgagacagtgtctcactctgtctcccaggctggagtacagtggtacaatcttggatcaccgcctcccagtttcaagtgatctccctgcctcagcctcctaagtagctgggactacaggtatgtgccaccacgcctggctaatttttatatttttagtagagacggggtttcaccatgttgtccaggctggtctcaaactcctgacctcaggtgatctgcccacctctgcctcccaaagtgctgggattacaggcatgagccaccatgcctggccatttcttacacttttgtatgacatgcctattgcaagcttgcgtgcctctgtcccatgttattttactctgggatttaggtggagggagcagcttctatttggaacattggccatcgcatggcaaatgggtatctgtcacttctgctcctatttagttggttctactataacctttagagcaaatcctgcagccaagccaggcatcaatagggcagaaaagtatattctgtaaataggggtgaggagaagatatttctgaacaatagtctactgcagtaccaaattgcttttcaaagtggctgttctaatgtactcccgtcagtcatataagtgtcatgtaagtatcccattgatccacatccttgctaccctctggtactatcaggtgcccttaattttgccaagccagtgggtatagaatgagatctcactgtggtcttagtttgcatttgcttggttactgatgagcaccttgtcaaatatttatataccatttgtgtttatttttttaaataaaatgcttgctcatgcttttttgcccatttgcaaaaaaacttggggccgggtgcagtggctcatgcctgtagtcccagctctttgggaggccaaggtgggcagatcgcttgagcccaggagttcgagaccagccttggcaacatggcgaaaccctgtctttacaaaaaatacaaaaattagccgggtgtggtggtgtgcacctgaagtcccagctactcagtaggttcgctttgagcctgggaggcagaggttgcagtgagctgggaccgcatcactacacttcagcctgggcaacagagaaaaaccttttctcagaaacaaacaaacccaaatgtggttgtttgtcctgattcctaaaaggtctttatgtattctagataataatctttggtcagttatatgtgttaaaaaatatcttctttgtggccaggcacggtagctcacacctgtaatcccagcactttgcggggctgaggtgggtggatcatctgaggtcaagagttcaagatcagcctggccaacacagtgaaaccccatctctactaaacatgtacaaaacttagctgggtatggtggcgggtgcctgtaaccccagctgctccagaggctgtggcagaagaatcgcttgaacccaggaggcagaggttgcagcgagccaagattgtgccattgcactccagactgggtgacaagagtgaaattctgcctatctatctatctatctatctatatctatatatatatatatatatatcctttgtaatttatttttccctttttaaaattttttataaaattcttttttatttttatttttagcagaggtgaggtttctgaggtttcattatgttgcccaggctggtcttgaactcctgagctcaagtgatcctcccacctcagccttccaaagtgctggaattgcagacatgagccaccgcgcccctcctgtttttctctaattaatggtgtctttctttgtctttctggtaataagcaaaaagttcttcatttgatttggttaaatttataactgttttctcatatggttaacattttttcttgcctggctaaagaaatccttttctgcccaatactataaagaggtttgcccacattttattccaaaagttttaagttttgtctttcatcttgaagtctaatgtatcaggaactggcttttgtgcctgttgggaggtagtgatccaattccatgtcttgcatgtaggtaaccactggtccctgcgccatgtattcaatacgtcgtctttctcctgcgggtctgcaatctcacctaccatccatcaagtttccatagggccatgggtctgcttctgggctccctgttctgttccattgtcaatttgtctatcctgtgccagtatcacactgtgtttattacaatagctttgtaacagctctcgatatccggtaggacatctccctccaccttctttttctacttcagaagtgtcttagctaggtcaggcacggtggctcacgcctgtaatcccagcactttgggaggccgacgcggatggatcacctgaggtcaggagttttgagacagcctggccaacatggtgaaaccccatctctactaaaaaatacaaaaattagtcaggcatggtggcatgtgcctgtaatcccagctatttgggaggctgaggccggagaattgcttgaacccggggggcggaggttgcagtgagccgagatcgtaccattgcactccagcctgggtgacagagcgaaactctgtctcaggaaaaaaaagaaaagagatgtcttggttattcttggttctttattattcaatataaattttagaagctgaatttgaaaagatttggattggaatttcattaaatctacaggtcaatttagggagagttgataattttacagaattgagtcatctggtgttccaataagaataagagaacaattattggctgtacaattcttgccaaatagtaggcaaagcaaagcttaggaagtatactggtgccatttcaggaacaaagctaggtgcgaatatttttgtctttctgaatcatgatgctgtaagttctaaagtgatttctcctcttggctttggacacatggtgtttaattacctactgctgactatccacaaacagaaagagactggtcatgccccacagggttggggtatccaagataatggagcgaggctctcatgtgtcctaggttacacaccgaaaatccacagtttattctgtgaagaaaggaggctatgtttatgatacagactgtgatatttttatcatagcctattctggtatcatgtgcaaaagctataaatgaaaaacacaggaacttggcatgtgagtcattgctccccctaaatgacaattaataaggaaggaacattgagacagaataaaatgatccccttctgggtttaatttagaaagttccataattaggtttaatagaaataaatgtaaatttctatgattaaaaataaattagcacatttagggatacacaaattataaatcattttctaaatgctaaaaacaagctcaggtttttttcagaagaaagttttaattttttttctttagtggaagatatcactctgacggaaagttttgatgtgaggggcggatgactataaagtgggcatcttcccccacaggaagatgtttccatctgtgggtgagaggtgcccaccgcagctagggcaggttacatgtgccctgtgtgtggtaggacttggagagtgatctttatcaacgtttttatttaaaagactatctaataaaacacaaaactatgatgttcacaggaaaaaaagaataagaaaaaaagaccttattttaaaaagctttttataactgttgcaacatcatatcataaagggtaatcatgaaataaggtgccattctttgtaaactttggcttttagtgccgaaggatgctaaagatttccagtatgagattccttttgctttcaacaattgacttattagttacataaaaatggatgctgttgatcgggtgcagtggctcacacctgtaatcccagcacttggggaggccaaggggggtggatcaccagaggtcaggagttcaagaccagcctgaccaatatggtgaaaccccgcctctactaaataatacaaaaattagccgggcgtggtggcatgcacctgtaatcccagctacttgggaggctgaggcaggaaaatcacttgaacttgggagacggaggttgcagtgagccaagatcccaccactgcactccagtctgggcgacagagcgagactctgtctcaaaaaaaaaaaaaaaagaagaatgctgtttttggccagtcacagtggctcacacctgtaatcccagcactttgggaggctgaggcgggtggatcacatgaggccaagagttcaagaccagcctggccaacatagtgaaacctcatctctactaaaaatacaaaaattagccaggcatggtggcacacgcctgtaataccagctactcgggaggttgaggcacaagaatcacttaagcctgggaggtggaggtggcagtgagctgagatcacaccactgcactccagcccgagagacagagtgagactctgtctcaggaaaaaaaaaaaaaaaaaaaaaaaaatgctgttttcccagcttgggcaacatggtaaaaccccatctctaccaaaaatacaaaaaattagctaggcatggtggtgcatgcctgtagttccagctacttggggggctgaggtgggaggatcatttgagcccaggaggtcgaggctgcagtaagccatgaatgcaccactgcccttcaacctggatgacaaagtgagaccttgtctcaaaaaaaagaaaaaactgttgttacatcaatattgattcagatagctgtatttaaaattcactaagccattgaagcctttcaaacaacttttccaaattcattgaagaggcagattctgacacattcattgaagatgctgactattggatccaaatgactccttcactgaactagcagccatccaggtgtctactctgcaccaggaaccacatcaggacacaagcacaaggataaaactcacttcccacctggaactttcattctaggggaatgacatgtctaacctgataagatccacacatccacatgataaggtaaaactcacttcctgcctgggaactttcattcgaggggaatgacatgtccaacgtgttaagatccacattggggtacaagatgctttctctaagaggaatcttcattcaacacaacgccaccaggcaccaagcaccatggatggacggcaaaaggggagtgagagcagctgccctcctggtgctcacggtggcgggtgggggggatgtggggaaggggcagctgtgcaccagggagctccgctgggaggcaggggagggagggatggagttgggggacggggagggggaagggggagggaagggggcgggggagggaggggggaggggggagagggaagggagggaaagcgggatgcagaggaagcgatgcctgtccaggcagtgtgcttctcagaaggagccatgggcccaggcacatgggagggagagttggggctgggattgaggagaggggaaggaagccacagggtgagcagggaccagagagccagattttataagttatataagaaactcagattttggccgggtgcagtggctcacacctgtaatcccagcacttggggaggccgaggcgggcggatcacaaggtcaggagatagagaccatcctggctaagacggtgaaaccccgtctctactaaaaaatacaaaaaatgagccgggcgtcgtggcggaggcctgtagccccagctattcgggaggctgaggcaggagaacggagttaacccgggaggcggagcttgtagtgagccgagatcgcgccactgcactccagaaaaaaaaagaaaaacaaacaaacaaacaaaaaccctcggattttagtcagaagcagtggctcaccctgtaatcccagcattttgggaagccaaagtagcaggatcccttgaggtctggagttcaaaaccagcctgggcaacatagtgagattctgtctcttaaacaacaacaacaacaacaaaaaaaaaacaaaaaaaaagcagctttgattttaacatgtggtcactaggaagccagtgaagagatttgattggatttgccttttagaaagtgctccctgactgcagggagggtgtaactgaaacgcgggttagtcactcacttgcagactccgattaacaagagcgaggtgtggtatgaagacagtgatttatcccaaagctagcttaggggaagaaatacaggtgtcctatcttaagtgtcccgcttcacctttggagcagaaagacggcacgttgaaaaggcaggggaggaagtgagcagggccgggcgtggtctgcaggctagatctagtgctttatctactgggcggctgagctagagactgccggtgccttcatgggcaggactaggccgaaaactccccaggtaggacagagtcccatatctctcacgtctcttggtgggagggagttccgaggcaacctcctggagggtgagagttccgtagcaggcatgcatgctttggtttgtaaatcgactattagctcttgaggagagtcttggagcacagagttagaggaacttgccctctataaaaacaaaaaaaaaagaaagaaaaagctatacttgcattttaaagggcaaagtaggaagtggggaaccaggggaatgagaaaaggagagagagagagaaaaaaaaaataaacgatttcttagaaaaatgggggtacgtggttacaagtgaatggagacaggaatactgcagaggggactgctggctcctggcagggcagagtgagaagtcctgggatggagcttggggagggaggagagctgttccagggacagctctggactctgtgggggccccagtggagggcacatgaggtcacaggcagagccagagggatcaccggaagttgggagttcgagactagcctggccaacatggtgaaacaccgtctctactaaaaatataaaaaagttagccgggcatggtgacacacacctgtagtcccaactactcaggaggttgaggcagaagaatcacttgaacctgggaggtggaggttgtagtgagctgagatcatgacactgcactccagcatgggcaacagagtgagatttcatctcaaagaaaaacaagaaaagggggatttgcgtgttataaagttcctgcccaggttcccaatcaggtctgtttatgcaaatgaaagactgaaacttgcttagttttgattggtttatgccgctgagtcctcattagtcgatacagctgagccctggttggtggaggcaggtgagctccaaaagtcccaacattaagaaggtgctggttttcaggaatctcagagtacctgtgtgacttctagttagcaaatggctaactattttaaatttaggctcagttagccactagggatctatcttgaagaattccctctttcaggttcatatttcttcacagaaataaaacagtgtgaccacagtgagaaagagatgagcctgtcaaacccagatcagggagataagatggtatttgaccagcacatgctggcataccaaagaaatccctggatgatagttcttaaagatttcttttcactactgttgtttatttaaggtatataacaagccagaatccacagaaaagtcttccatctgatttttttttttttttttgagacagagtctcactctgtcgcccaggctggagtgcagtggcgcgatcttggctcactgtaacctccgcctcctgggttcaagcgattctcctgcctcagcctcccgagtagctgggattacaggcacctgccaccactcccgctaatttttgtatttttagtagagacggggtttcgccatgttggccaggctggtctcgaactcctgacctcaggtgatccactgcctaggcctcccaaagtgctgggatgacaggggtgagccactgtgcctggcctgatatacttaattaaacaattttgaggccatttagtgtcagggttaacttcacgggctttggacccagtaattttgaggttggattgcagccaccaccttttcgtagcagagggtccttaggcagtttacataatcctctaaaccctggtttcttcatctgtaaaattacgtggggctgtttcaaagaataaatgaataaggtatttagcccagtgcctcacacaaatcaagcacccagtaaatgctcttcttggattctcatttaataaacatgagtaacgtatttagccatgctcagtacaataacactcacttctattaagtaatttagaatttctgatgcaagaaatgcttataattcagtgcaattatgatcatacatcctgcaattgtgctgtttccaaatatagaccctggttctaagaggtcccaagaaggcaatcgaagcaaactgtgtaatgtgggggacacccgctgtgcacctttgcggtctgatagccgtcttgggtcccaattcctccttattcactacaaaagtactgggaagttgaaatgagcctgggcttccctttgatgtaaggcattctgtagaggcagtcacggtggctcacaccgagatgggaggatcgcttgagcccaggcattcacgactagcctgggcaagttaatgagggttaatgaggcctatgtcaccacagaatataatttaaaaaaattagcctggcgtagtggctcacgcctgtagtcccagctacttgggaggctgaggcaggaggatcacttgagcccaggaggttgaggctgccaacaggttgagtgaaccatgattgtgccactgcactccagcctgggagacagagcaagtccctgtctgaaaaaaatcccaaaaacaaacaaacaaaaaatattctgttgggggccagtggaaaatttcttctttgctctctaaagagctcctgaaaatcaactgacaaaagccaaattaataggagaaaaggcatacaaatttatttgatcatagttttatgttacatgggagccttcagaatgaagacccaaagatacagacgtcaatttttatgcttaggttcaacagagtatggacagccatgtagagataggattggacaaaaaggctctgatctgatgctagtggactgagtggggagaccctgggggttctgtgtagggccttcttggcctctctgtgcagccttcattccttctgggtgtgaggcaggaccctctctggaatgggagcctggtgacctacagccaaacaaggtaggtcagagaatttctttatggccggtttttacaaagaaaggcagggtgggcgggcagggggagttagagtaatcttctcaggttttaaggctggctttgggaaaaaggggttctggtttctgtgacccaccttggggaagggggattcatgtttcatggtagcctttgcggggagaatgaggggccagagacaggagggcaggagaagtttagagaaaaacttgcttctgaggccttcattttgaactccagcaatgtcatatattaagctttacaaatgaatcctccttaaacaacacgctgttacttttaaaagacaagttcctggatggcttgtgtaaggttaacacatacatatgctttgcagatgaaaatgactgtactgtgtgtgcttctgtggcacaagagtgctgtttaaggctgggcgcggtggctcacgcctgtaatcttgggaggtcaaggcgggcagatcacttgaggtcaggagtttgagaccagcctggccaacatgttgaaacctcgtctctaccaaaaaatacaaaaattagctgggcgtggtggtgggcgcctgtagtcccagctacttgggaggctgagacagaagaattgcttgaacctgggaggcagaggttgcagtgagccgagattgtgccattgcactccagcctgggtgacagagtgagactccgtctcaaaaaaaaatataaaatagtgctgtttaagaactttttaaaaataaaattcctcttttgacctaaatttttttttcttttttttttttttttgagacagagtcttgctctgtcatccaggctggagtagtgtagtggtgcgatctcagctcactgcgacctccacctcctgggttcaagcaattctcctctctcagcctcctgagtagctggattacaggggtgcactaccatgcctggctaatttttgtatttttagcagagatggggtttcaccatgttaaccaggctggtctcgaacttccgagctcaggtgatccgcccacctcggcctgccaaagtgctgggattacaggcgtaagcccagtactaaaaaatattttttaattaactttcaaaaagctacgctgatacgctttggctgtgtccccacccaaatctcatcttgaactgtagctcccataatccccgtgtgtcctgggagggacctggtgggaggtaattgaattatggaggcaggtctttccgcaatgtaagataagcctttgaggccaggcatggtggctcacggctgtaatcccagcactttcggaggccgagatgggtagatcacaaggtcagcctggccaatatggtaaaacccagtctctactaaaaatacaaaaattagctgggtgtggtggcacgcacctgtagtcccagctactcgggaggctgaggcagaagaatggtttgaacctgggaggtggaggttgcagtgagccaagatcatgccactgcactccagcctgggcaacagagcaaaactccgtctcaaaaaaaaaaaaaaaattgtgcctttgctcctcctttgccttctgtcatgattgtgaggcctccccagtcatgtggaactgtgagtccattaaacctctttttccttataaattacagtctcaattatgtctttattagctgcatgagaacagagtaatatatatgccaatttacataccaatcaatgacgcagagccacaaaatttctaaatcagaggggaaatagaagtcaaggcccagggggagaagtggcctctcaagcttgtgtagctggtgtctgatctgaccagtactgggttctactggcttctaggggtggtcttagtttactagtcatgatcccttttttttttttttttttttgagacagagtctcactctgtcgcccaggccggagcgatgcaatctcagctcactgcaacctccacctcccaggttcaggcaattctcctgcctcagcctcccaagtagctgggatttcaggtgtaaaccaccacacctggctaacttttttttttttttttttttagacggagtctcactctgtcacccaggctgagtgcagtggtgtgatcttggctcactgcaatctctgactccaggttcaagtgattctactgccccaggctccggagtagctgggattacaggtgcataccaccatgcctgactaatttttctatttttagtagagatggggattcgtcatgttggccaggctggtctcgaactcctgacctcaggtgatccactgcctcagcctttcaaaatgctgggattacaggcatgagccaccattcctggcttaatttttgtatttttagtagagacagagtttcaccatgttggtcaggctggtcttgaactcctgacctcaggtgatctgcttgcttgcctcggcctcccagagtgctgggattacaggtgctagccaccgtgcccagcctactagccataatcttaaaaggtaaacaactacctgtgaagttgaggcttcgaaaacttagtattccggaaggaatgataattgtgtatttcttttcctcctactctgagtttggagttgttgaaataggggcctaagggagtctaaaaaacaaaaaatctctgacataatgctcagaagctcactgtcagttagttatttacattttgttgtggtcgctaattttttttttttttttagagacatggtctggctctgttgcttaggctggagtgcagtggtgtgatcatagctcactgcagccttgaactcctgggttcctacttcagcctcctgagtagctacgacttctaatttttaaatttttttaaatttaaaaaaatgtttaaatttttttgtaaagatgaagtcttgctatgatgccctgctgctctcaaactccttgtgttcagaaatcctcccgcctcagcctcccaaagtgctgggattgcaggcctgagtcattgtacctggcataacctgatttcttgacacctaaggacagtcagactgcttccactcacactctttcactttttaaatctactagtttataagatcaaccactcacaattttttgtttttgttttgagacagtctctcgtcacccaggctggagtgcagtgacacgatctcagctcattgcagtctccacctcccaggttcaagcaattctctcgcctcagcctctgaagtagcggggattacaagcgcgcaccaccacacctggctaatttttttgtatttttggtagagatggggtcttactatgttgcccaggctcccaacctcaaactcccaacctcaggtgatcctccccccttggtctcccaaagtgctgggattacaggcgtgagccactgcgtgcagcccatactctttcaataattattttagcttcagtggcaaaggctaataatgatcgtatgtgtctctctgattgcaatgatgggatgtttatagataccaggcacatactctccttgatcacagcttcactagagactctttggctaagttaactggtgttcaatattttgaattcgcatcctggaccttcctcctactgcccgtgttcgtggtgttgctgttgggttggtaccggcatccatattggtgttctcactgttggtgttgggttagtactggtgttgatattggcattcatggtgctgatatctctctatagttttctgtccagcctgtactcaagacaggaagtttgaagagtttctgtgtgcaagtatgaatttcaagggggtagtagggagtaaagtcaagaaaaaaaatctggaatgatcttagaagtttcccctccctccctccctcttttctttctttctttctttctttctttctttctttctttctttctttctttctttctttctttctctttttctttctttctttcttcctttctttcttttctttctttctttcttgctgtgctataaagtgagataaacagttaagacgttcaccagttcctgtggcagaggcctctggctgtatggacgaaggaaaggtgtgtgccttgattcaaatgcaagtgaaaccagcatctttgcaggaacatggaaaggaatgtttagaaaaattgattcccatttcaatatttagtataatttactccacttatcatgaaatgcttcttcacaaattttatgaaaacaggagctgcccctattaagaaccccatgcacctcatgcaattctatgggtgttgaaagaagtacttgctggccaagtgaaagcctcaagactgaaaggcaacattatattacagcagcagttggttcctcaaaacaagatgctcacctggaaagaattccgtgtgttcccgacccccacccacccactggctgtgaaggagcccttcaggcccccgtgtgcccagcaagacaagccccccagacacccctcacccggcaagacactgccccacttcatcactacgaaatgtccaagaagagagctaaatgtaaaaccaatcacccacctttccctaggaaaccgtcagcccaacctcaacaaaccctacattcctgctgaccttgaaaccaccagaaaataagaaacaattcaccaaggaagaaatacaacttgtccttaaatactgaagaaagatgttcatttcatccagggaagagctgatgttgcagtattaagcctggaggccatctagaagcagaattcccctcttccttggaacactgcagtctttttctcttgaggccttcaacatattggaagaggcctacctgcactgtggagggccatctgctttattcaaagtttactgatttattaggccggtgcttaagtaattgctgtggttttcgtccacctagttttggatggcaaaaaccgcaattacttttgcaccaacctaatacatgttaattacggcctggcacggtggctcacgcctataatcccagcactttgggaggccgaggcaggggcatcacctgaggtcgggagttcaagaccagcctgaccaacatggagaaaccccgtgtctactaaaaatacaaaattagacgggcgtggtgacatatgcctgtaatcccagctactcgcaggaggctgaggcaggagaattgcttgaacctgggaggtggagggtacagtgagccaagatcgcgccattacactccagcctgggcaacaagagcgaactctgtctcaaaaaaaaaaaaaagaaaaaagaaatgttaatcacacataaaaaaaagataccctcacagcaacatctggattgatgtttgaccaaaaactgtgtactatagcctagccaaggtgacaggtgaaattaaccatcgcagaggtatttagctgtgttggcaatgtttattttctaagctgggcagtggatatgcatgtattcactaaattatcctttaagtcccctttctatgtgggcttttttttttttttttttttttgagacagagtctcactctgtcacccaagctggagtccagtggcacgatctaggcttactctaacctctgcctcccgggttcaagcgattctcctgcctcagtcttccaattagctgggtttacaggcgccaccaccacgcccggctaatttttatatttttagtagagacagggtttcaccatgttggccaggctggtcttgaactcatgacctcaggtgatctgcctgcctcatcctcccaaagtgctgggattataggcgtgagccactgctcccagccccttttccatgtcttaataacacataaatattgcataacacgtaactatttaagtaataaacagcaataatcagaatatattctaaaatcaaagtaaaaacaaattgactacacgtctttactttttttgttgtttttttttttacgagatggagtcttgctctgtcacccaagttggagtgcagtggcacaatcatagcttattgcagcctcaacctcccaggctcaagagattctcccacctcagcctcccaaatagctgagactacaggcatgcgccaccatgcccagcttattatttttttttttttttattttttgtagagacctggtcccattgtgttgcccaggctggactcaaactcttgggctcaagctatccttccgccttgggcctcccaaagtgccaataatgtgctcggccatctttacttttcattagacacattccttaaaagccaggtataagataaaaatttatattagaactcccccaaaattaggttataattaaatcaatgaaaaaatattgtaagataaatttatttttaaaaaattattctaagatctaaatttctaaaatcacaaaaccctaaaattctaactttagcagttatgggcaacaaacttctttcgcctaacccttgtgtggaaggtacatcagacgggtaataaaacacatgaagttcgtttttgaaatccaaatttgaagtactggttaagtaaaaacaaagtatcagtttattttcatgggaaagatgaaagctctcacattctgaaggggctgtggctcttcatttcttccctccctcccttctcttgctattgctaagcctgacacttaaatgtagctatgtgacactcctgtgcaagcttctactcctgcaacccccaatcttttggatttccttaggaatttaaaaattagacaataggccggacgtggtggctcatgcctgtaatcccagcactttgagaggccgacgtgggaggatcgcttgagtccaggagttcgagaccagcctggccgacatggtgaaaccctgtttctaccaaaaatacaaaaattagccagggatggtggcgggaacttgtaatcccagctactactccggaggttggggcaagaaaatggcttgaacccgggaaagggaggttgcagtgagctgagattgcgccattgcactgcagcctaggcgacagagcgagattgtctcataaataaataaataaattaattaattaataattaaaaaaaggaaggaggggaaggaggggaagcaggagaaggaggggaaggaggggaagcaggagaaggaggggaaggaggggaagcaggagaaggaggggaaggaggggaggaggggaaggagggcaggagggaaggagggagggagggagaaaagccagacagtaaactggagaacaaaaaacgctctaccacaagagggcagtagacaccaccagcgcgcaggcctccctcgggatcaaagggaaggctctgagcgcggaaggaaccccgcattctctaatttaggcctcttcttcagggatgggaaggagatggctaaagaggttcagcgacttacctgaaaccacgccgccagtggcccgcctctgttaaaggctaacgtgccgcctaattaaagggaaggaaataggaggcgctggccggggaagctggctcacttcttcagcactttgggaggccgaggtgggaagatcacgtgaggtcaggagttcaagaccagcctggccaacatagcgagacccccgtccctataaaaaattagattaacaacaacaaaaagaattaggaggctccttagtagggacgcccttcccccataacttaatagtccaacaatgatgtgcaagtcgccaaaagaaagaaaatgtatggggagtggaagtatagaaaaagccgcactgacgacccaggccatctttaggcccctgtgatgtgaatgggaatgattttcagagtctttaccaaaatgactacattgtcagaacttccccgacttcccgctttcccccagagaatcaccccttccctgttgaggagacaggcaatctgcccagagcccagagagaagataatttctaacttccatacaaaaaagcagggtggtcccatcaggacaaaactctccctgaaggagtcaggtctgtataaccctcacccggagggggcagagatagcctggagcccaaaggctgtgtctgatcccagaccctgttgtaggagctggtggggaattgccaccctccgcagtcctccctacccagagccacagagccccaaagcttccctcccagcctggtgttaccagcgctgagtccagccctgctctcagccaccccggtcattctctcccacctcatccatcaccctctccctcgcacccactccctctagggtcgctggatttccttctgctccttgaatccactaaacttttctctggcttaggacattggagtttgctgttccttctttctcaaatgcttttccctacagacctcacacgttccgtgatctgctgggccagtctgtgtggatcctcacaggcatctcaaacccaggatgttccaaactggccgagggtttttgttttggtggcactggattgaaccatctcctccacgaagtccatttcctcacacgaagtccgtttcctcatttgtaaaatgaagacaatagcacctaccttacaggctttttgtgaggattaaatgagaatataaatatatatatacacacacacacacacacacacacatagatgaatatatatacacatccaagtatatagcagctgtatgtatatatttacatacatacatatgtatatagcatatacatgtatacatataaagcaagtagcacagtgcctgatccatagaacacctcaatgaatggaaacctttacagtaaatgctaacattttcctccataaagcagctccttccacctcctctccaaggcagacatcagattagtaccttttgactctttcctctctttcaccacccacatttaatgaaacaacaaatcccagtgtgtatttctagaatccaatccattcttcacatcctactctcactgtcctaattcatgcctgtgttatttctggcctggattactgcagtagtcttccaatagcctgcttcacatccaagctccattacttaatctatgtagaatgaaagcttaccatgcgataacagactactatgaacgggtttttgccaatacatttgaaaactcagacaaaatgaccaattccctagaaaaaacgtaacttaccaaaactgacttaagaagaaagaaaatgtatggatagtcataaaatgattagggaaattgaaacagaagtaaaaatctttgtcaaattaaacttagacctggatgactttccaggtaagttctcttaaactttcatggagtggatcattcctattttataaaaactcttccagagaatagaagaaagtggtttatcttctcctaggtattctgtgaggccagtgtaaccttgatactaaaaccaggcaaggacagtaaaagaaaaagaggcaaaaacatgaaacaattttttttttttggagatggaatctcactctgtagcccaggttggagtgcagtagcatgatctgagctcattgcaacctccacttccctggttcaagcaattcttctgcctcagcctcctgagtagctgggattacaggcgccagccaccactgtgcctggctaatttttgtatttttagtagagatggggtttttgccatgttggccaggccagtctcgaactcctgacctcaggtaatccacctggcttggcctcccaaagtattgagattacaggcgtgagccaccacacctggccaaaacaaaatattaatgtggtgtttcatgcccacacattatttaacctaccttgctcgcttccttccttccttccttctttccttctttctttttttggagacaagttctggctctgtcgccaggccaagtgtggtggtacaatcaaggctcactgcagcttccacctcccaggctcgggtgatcctctcacctcagcctcctgagtagctggcaatacaggcatgcaccactgtgcctggctaatttttaaattatttatagagaagaggtttcactatgttgcccaggctggtcttgaactcctgagctcaagtgatcctctcctgccttggcctcccaaagtgctggaattacaggtgtgagccattgtgcctggccattcatttgatatttctacattcaggaagtggagctaagctttcctccacttgagcatggagtgacttgcatctgatgattccaggttataaaaagtctgtggcttccgggttgggtacactctcgctctctctgcgattgctgtctctggaggaagccaattgctgtatctgagaggcctacatgttgacagtcacacagtgagcctggaagcaggtctttccctcgtgaagcttccagatgacttcagctctgaccaacacattgaccacaacttcctgagagaccctgagccagaactacatagctcagccactcctggactcctgagaaaacatgttataacaaatgcttgctgtttcaagacactaaattgtgggataacttcttacgttaatatagttcacaaacaaaatctaacagtgtttaaaaaagatcataaagacaggtgcagtggttcgtgcctgtagtcccagctactcaggaggctgaggtgtgaggatcacctgagcctgggaaggttgaggctgcagtgagtcatgatcacgccactgcactccagcctgggcatcagagtgagaccttgtctcaaaaaataaaaaggactagataagaacttccttaactgataagggatatctaaagaaaaaaattagtaaacattattattttatttttttaaaacacctaactgcatcgactcaaagtaaacattattcttaatgagaaaatgttgaaagtgttttacttatgagctgaaacaggataaagatggtcacgatcgctgtagggtccctcaggcctctgttttctttctgtgtccttaccgaaaatcagattgccttgactgctctctgatatggtttgaatctgtgtcttcagcaaatctcttgtctaattgtaatccccaatgttggagatgaggcctggtgggaggtgattgggtcatggggcggatgctgttctcattatagtcaatgaggtttcacaagatctggttgttaaaaagtgtgtggcacctccctcctctctctcttcctcctgttttggccatgtaagatgtgcctgtttccccttcaccttctgtcatgattgtaagtttcccagggcctccccagccatgcttcctgtacagcctatggaacctcgagccaattcaacctcttttctttataaattacccagtctcaggcatttctttatagcagtgtgagaatggactaatacagtaacccagccaactgtataggttttgtccaacaggcttgaacccaaatcagggccttgaacatttccaggcactgatgaaagtatctaggtttacttgaaaaaaactgtccctagctctggaccaaaccttcatataactctatattctgggaggccgaggtgggtggatcacgaggtcaggagatcgaggccatcctggctaacacagtgaaaccccgtctctactaaaaaatacaaaaaaattagccgggcgtagtggcaggcacctgtagtctcagctactcgggaggctgaggcaggagaatggcatgaacctgggaggcagagcttgcagtgagccgagatcgcgccactgcactccagcctgggcgacagagtgagactccgtctcaaaaaaaaaacaaaaaacaaaactctatattctgagcccccttgctgtgagatacctggtcagagcaccccttctctctctgtccatcttgagggtactctgcagttctcggtatataagttcccctaataaatgcttttttccaggctggcatttagtgctttttttctttgtaaatttaactggcctgatctcaggacagcttgcggtactcctttttgggaattcccctgcctccacttttgggggtaactccagccacaggtttggacaaaacaatcgccacttatattttacatgtattggggtttctagacagtaacttatgacaagaaaaaagaaatttaaattttgaagattccaaaggaagaaacaaaaccattcttatttgcagatggcatggttgtatacatggacaaccctaaatctgtagaatactagaaataacaagagaagtttatcaagatggttggtcataatattaatgtacattaatcagttgacttgtaacctattagcaacaatgcatagtaacaacaaaaccagaaggtacctaggaatgctctaccaaaagaaggatgcgacatatataaagattatgaaacatggtcgggcacggtggctaatgcctgtaatcccagcactttgggaggctgaggtgggtgcatcacctgaggtcagcagttcgagaccagcctggccaacatggtgaaaccccatctctactaaaaatacaaaaattagccgggcgtggtggcgggtgcctgtaatcccagctactcaggaggttgaggcaagagaattgcttgaacctgggcggtggaggttgtggtgagccaagatcgcaccattgcactccagcctgggcaacaggctgagcataactctgtctcaaaaaaaaattatgaaacattaatgaaagacattaaagaagacctaaaaaatggagagacataatatgttcatggatagaaagcctccatattgtaaagatatctttctctccaaattgatttatagagtcagtacagtttcaataaatgtctcaacagggattttcaaggaacttgacaatatgactctaaaatctttaaaatttatataaacaagcaaagggtgaagaatagcccagtcattcctaaacaagaataggatacagggactttccctaccagataaacaagcattaaaagatgtagtaatttacaaagtgtggtatcagcagaaggaaaaagaagttgaccaatggaatgggaatggagatcccagaaatagatttactacacgtacagtgattttcaaacaggaatatccccaagaactcattgttaacatagtaaaaagtaaacagattcttagaagctatataatgactcaatgcacatcatcaaatatgccaagacaaagaaaatgtagaaacagaaatctcatgtaatttggaagtgaaaatgactcaaatataattttatacataatttataaagcttttttttttcagccaggcacagtggctcatgcctgtaatcccagcaatttgggaggccaaggtgggtggatcccctgaggtcaggagttcaggaccagcctggccaacatggtgaaaccccatctctactaaaagaatacaaaaattagccaggcatgggggcacgcacctgtagtcccagctactggggaggctgaggcaggagaattgcttgaacctgggaggtggaagttgcagtgagctgagattgcaccactgcactccagactgggagacagagcgggactctgtcttaaaaaaaaaaagcttctttttcaatatacaggttctgatgaacctaattgtcaaagaaaaattgaaaaaagtctagcatctggcacagaaaatcttatcagatattacagtgactatattataaaaatttttacataataaaataatttatttttctaaacctatatggaataacattttaaaacttcttaaagacttcctcaggaacatttcattttccactaagaacaacacacacatacacacacaaatattaaaattgtattcaaagcctataatttatacttcaatattataagattaatgctcagttacatgaatgtttggtagaaatcacctgtaaagccatctgggtttaggtttaatttgatgaagttttaacctctgtcttaattaatccatctagaactgatttttatgtttggtgtgaggtagggacactttttttttttttcatggataaacatcccttccccacttatctgcaatatcacttttgagaactcaagtatctaattacagaaaaaatgaaaacacagtttttgagcttaactgagatattgaagttcaaataacacctagaaaacaattctactctacactgataatattttccttgggaagcattttcaggagcattttcatttgaaagggagatgtggcatttgctccctttacttctgttatcttgtctgatgacagaaacacagactgtcatttatctcaagtactgatataaaggtgcatgttgcatctagggtttagcatatccagcactggcttggaaaatggagagaacccagactttgtaccataatggcttgacgcatatcctcaaatatgccgggactaagaaaatgtagaagcagaaacctcatgtaatttggaagtgaaaatcactcaaatagagttttatcaataattcataaaactgctttttcaatatacacagatcccatgaagcatatccaactcttttatttcagttacaaaatgaaattcctgaatgaactttagcgatttttgagtaaaaagttgagattgggcaattcaagctcttgtttggctcttattttgaaggaggatttttcagtttccatcacgtcagatggtagttatctgtcaattaataattgacaatttactgattttaaaacaagcctgcactcctcatcttccttttactgagattttcagtcctgagaattttctcctgcactaagcacagcagctttgaatcactctgttccctaagagttaaagggaataggattaagggggaaaaaagatcactgtagacattttcagtttaggcctaatttttatttatttatttatttttttgggatggagtctcgctcttatcacccaggctggagtgcagtggctcaatctcagctcactgcaacctctgcctcccgggttcaagggattctcctgcctcagcctcctgagtagctgggattacagatgcccaccaccatgcctggctaatttttgtatttttagtagagacagggtttccccatgttggccaagctagtctcaaactcctggcctcaagtgatccacccatttcagccttccaaagttctgggatcacaggtgtgagccaccgtgccaggcctaggcctaattttaaccgacaaattgagtcatatgctgtccttatgcacaaagccgacgaagaagatacaaattaaacatctggacagatataaaaaataatagaggcaaaaaataagtaaaggattataaacaacttccaggtttggttttgtttgagacagggtcttgctctctcgcccaggctggaatgcggtggtgtgatcagagctcattgcagcctagaactcctggacttgtgccaccactcccggctaatttttgtgtttttggtagagacagggtttcaccatgttgccgggctggtttccatctcctgacctcgtgatctgcccgcctcagcctcccaaagtgttgggatcacaggtgtgagccaccgcgcccggccatattttttattgcaaaaatgttattctgtttattcagggtggggtccatgggcctctacccctggaatgacacgggaattcattagcaatgcagagtctaagggcagggccggggggttgggcagtggctcacatgtgatatgtgatttgtccttagtgcactggccagaggggcagggttctgtttcattcaccacagcccttgtgctaagaaatcagagaagaggtcgggcacggtggttcatgcttgtaattccagcactttgggaggccgaggagggtggatcacttgagatcaggagtctgagacgagcctgggcaacatgatgcgaccccgtctctacaaaaaatacaaaaactagctggatgtagtggtgggggcctgctacttgggaggatgaggtaggagcatcacttgagcctgggaggttgaggctgcagtgagctatgatcgtgccactgcactcccgcctgggagacagagcaagagcccatcttaaaaaaaagaaaaaagaaataaaaaaagagagagataaagaaagaaaaagaagaagaaaaaaaaaaaagaaatcagagaagtggtgcaaacccagagagaacagtggatggggtagagttcaaacatctccatttactttggcaagacgcagagtgactaagcaacagttaagggggccaagcacccccaccactgggcagagagagcttggcacggcagccagacccgaattctctctctagctatgcctctgactcactctacggtttttagacaaagaagaatctatcatttcccaattgtggcattaaagtgaatgatggtgtgggttttttccttctgttcaaggtgagggagagaaggacggtcatattttagtgggttgtaagtgaatattaaaaagtgcgacgaaatatatgggtgagtgtatggagacagtcttgagggcaataccgtgttaggtgcacccacttccagccctgcgactgtgccctccaggagcagcgtaaaaccaggcacagaggtgaccaggccagtcaatattcagctcatggtcttagagtcctcacaagatgtttgtcgtccacatggcaacgctgttgggggtctgtgacgtgtcatcacctatttttgcaaaattggtatttctggaagcatttaaatccccaggtttggtttgttttatttatttatttatttatttatttagagacagggtctggctctgtcgtccaggctggagtgcagtggcacaacctcagttcactgcaacgtgggatcaagtcatcctcccacctcagcctcccgagcagccggggctccaagcaggtgccaccgcactggctaatttttgcatttttagtagagatggggtttcaccacattgtccaggctgacctcaaactcctggctcaagtgatctacctctcaaagtgctggtattacaggcgtgagccactgcgcccggcctaaatccccttaatattttgttcctactatgagccagtctctgtgttcaaggattgcaaaatcttgacaaactgtccaaaagagagaaaaagtaaataagcatagtatagacatttaataacattcattatcactttattcagcccacaaaaacttactaagctccttgtgctacgagctaggagcatgaagataaagaaagcatagcctcttctctgagatttcacaagtattaatactaaaccaaacaacgcaggcagaataacaacctctaaagatgtccgtgtcctatgccccaaaaactgtgaatattttacctttcatggcaaaaaggacttttcagatgtgattaagttaaggacgttgagatgggagagttccctggattatctgggtgggcctggtgtaatcacaagggtccctttaagtgaaagacaaaggtggggccgggcgaggtggctcacagctgtaatcccagcactttgggagaccgaggccgctgaattgcttgagttcaggagtttgagaccggtctgggcaacatggcaatatcccgcctccccgcctctactaaaaatacaaaacttagccaggcgtggtggcagggtgcccgtaatcccagctactcaggaggctgaggcaggagaatcacctgaaccttggaggtggaggttccagtgagctgagattgcgccactgcactctccagcctggatgacagagtgacactccgtctcaaaaaaaaaaaaaaaaaaaaaaaacatgcatgaggaagaacaagtgtcagagtcagagagagacttgaagatgctgtatcgcaagctttgcagatggaggcagggccaagagcccacgaatgcaggcggcccctagaaactggaaaaggcaagaacactgatgctcccctggagcctccaaagggaaggaagcccaggtgaccgctcgatcttagctcagtgaggcccatttcagactcctgacctccaggatggtaagagaataagatcgtgttgtttgaagccaccaggtctgtagtatagtaacttactacagcagcaacaggaaattcatgcaccgaccctgaccatgcagtgacaagcgttctgcagcgctgctgtcaggcacaacggagctacagctactgcagggcaaggtaggggtccagggaggccgctggccggtcctcccagccctgaatcttgagggatgggtggaacttcaccaggcagagggctggcacgtgtgtatacacgtgtgaaactgtcgccaccatcaagaccacaggcagagccatcccccaggacctcatgcccttttacctccttgaatcccccatctccaaacaaccactcacctgtctgctgtcactatagatgagcttgaatgttctagagtttacataaatgaaacaatagagtatgtgctccttttttgatctggtttctttctttataacatttataataattatttttaattgacaaaaattgtacatgtttatggtacacagcatgatgtgttagaatatctatacattgtggaatggctgaagcaaactaatgaacatactcattgcctcatatacttaccaatttttgtgatgagaatactcaaaatctactcttggcaattttctttctttctttctttctttctttctttctttctttctttctttctttctttctttcttttctttctttcttagatcgagtctggctttgtcacccaggctggagttcagaggtgcaacctcagctcattgtagcctcagcctccccggttcaagggattctcctgcctcagcctcccaagtagctgggattacaagcgcccaccaccacgcctggctaatttttgtatttttagtagagaccgggtttcaccatgttggccaggctggtctggaactcctgacctcaggtgatccggccctcccagcaattttcaagtatataatgcatcgttaatgatagtcaccatgttgtaaaacagacttgaacttgttcctcctctctaaccgatactttgtatcctttgctcagcatcacctggtaaccaccattctactctctgcttctatgagttctttttctggtttctttcactcatcataatgatctggagattcatccatgcatgtatcgatagctcattccttttcagggctgaataatattccactgcatggctgtaccaccatttgtttgcccattcacttgttagcaggcatttgggttgtttccagttttgtgggggggggtggagggtatcacaaataaagctgggatgaacacatgtatgtgagtctttgtggggaagtgttttcttttctctcaggtaaatacccaggaacagagtggttaggttttttttttttttttttgagacagtcttagtcactcagattgcagtgctgtgatccttccacctcagcctctcgagtagctgggaccacaggtgcatgccaccatgcctggttcatttttttttttttttttttgtggagatggggtctcactctgttgtccaggctgatctccaactccagatctcaagtgatcctcctgccttggcctcttaatatcctttactcttaataggttgtgagcatctttctatgtcaatgtttaatttacctcatcattttaatgctgctattaacatcttcgtaaatgcatctgtaaaccttctgattatctccctaggatgtgttccttgaactggaattgccagatcaaagatgatctacatttaaagatttttgagtcacattcctattatagggcttcctaaattttcaccatgaagacagaagagccacctgggctggtatttgcttccctctgtccatggcccttagggagagggtaggcacttctgaggtcacttgcaaggacggagaaaaacctgactcttagcccacggcagttaagtcaagagaaaggcttagaatgtgaagaagctgaggagactttttagggcacttaagaaaataattcttgtggttgattttgtttttattattttcattccactcttaatggagggaggaggggctctatttttaaagagagcttaaaagaggaatttttttttttttttttagatggaggctcgctctgttgcccaggctggagtgcaatggcacaatcttttttttttgagatggagtctcgctctgtcgtctacgctggagtgcagcggcgcgatctccactcactgcaagatccgcctcccgggttcaagccattctccttcctcagcctcccgagtagctgggatcacaggcacccgccaccaagtccagctaattttttgtattttttaatagagacggggtttcactgtgttagccagggaggtctcgatctcctgacctcgtgatcctcccgccttggcctcccaaagtgctgtgattacaggcgtgagccactgcgcccggccaaatggcacaatgttggctcactgcaacctccatctcccaggttcaagtgattctcctgtctcagcctcctgagtagctgggactacaggtgcccactactcccggctaatttttgtatttttagctaatttttgtatttttagtagagattgggttttgccatgttggccaggctggtctcaaactcctgacctcaagtgatccatctgccttggcctcccaaagtgctgggattacaggcatgagccactgcacctggccggatctttctcatattgagttgaattctactttcttttcttttctcatcttttcttttctttttttttttttttttttttggtgataagatcttgctctgttgcccacactagagttcagtggtgcaatctcggctcactgcagcctcaacattccaggctcaggcaatcctttcacttcagcttcctgagtagcggggaccacaggctcacgccaccatgcctggctagtttttgtaaattttttttttttttttttttttgtagaaatgaggtcttcctatgttgcccaggctggtttcaaactcctgggctcaagccatctgtccacctcggcctcccaaagtgctgggattgcaggcatgagccaccacacctggccaaattctactttgttacactttttcatttgtcctctctgggcctttttttttttttcatcaaaaagtccactgccattattgtcacagctaatatatgttgagcgtttccctttatgagcaccctaaccccacaccagccctcgaggagttatgcgcatactcttattatccacaatctgctggtgaagaaatcaagaagcagagggaagtaacttggctaagagcccatagttggttggaggcagggcaggattctcagccagaaagtctgtccagagccccatggatctactcacatccacaagacaactctcaaaatgttcacagtcagcccctgtgttcctccaaccatcccacagctaattgttcttggttgactcaagtattccttaatctaagtgatggtttccatctggacacaactgggtttgtcagaagttctgatgaaatctcacacttgtcgtgtggtctgacgaagtaggagcacagaattttaacctccttcgtcttagacattgtgtctttgatgagatggccagaggattttcagcagccagggcttcaagttggctcctgcagacaatggaaaccttggagtagagacagcactgaaaagggagaaggaatgaaaagaaaggtacagacattttccggaaaaagttatactactgaccttattagtgaatgagcgttggcagtgactcacagatgacgcatcagaggttgaacctggactctgggggaacaggggtcctgatggggtggggtgggagtggggacatgcaggcagagccagtctgagggatggggaggaggaaggaagaaaatgctcagtgctgttttggaattgttgcatttcagcagaaagtgccatttatgtgaaaatgaatgtgtggctggaaacacagcttaggtggaaaagaggattagagagacagatgtggaagccataaactgagaggtaaaagttaaagataaacttaagtgtggcccaacaacgaaatgaatcaatccgagatttgggttgttttggttcacttgatggagagaagcaagtgttcaacgtgaagctgttgaatgtgctcagttcctagtctggtcctctaaaatcttagaccacttaggcaagagccaggccaagacccgtaacatctttcacaaatgcactttggtctttggaaagagctccttgtgctgctgtggtcacttttgcctttgagcccatctgaaattcaatcctattaaacatcagtctaagtggcttcgttttaaaaactgttcactgatgaatatcccaagttcacttataatctgctttaaattccagatacatttatcgctgcattaaaaaaagatttaatcttttttttttttttttccttttagagacagggtcttgctctgttgcccaggctggagtggtgggtcaccgcaacctccgcctccttttggactcaagcaatcctcccacctcagcctcccgagtagctgggactacattcatgtgctaccatgtccagctaattttttttttttttttttttttttgtagagactgggtctcatgttgtccaggctggtctcaaactcctgggctcaagtaaaccatctgcctcagcctccgaaaggctaggattataggcgtgagccacaaagattgaatctcagtgttatgtgtgattacattcattattgggaaaaagaatttcatccttttgcttcctactttcctacttttagtctctacattgccctccagattgtaaacatgtgcccaagtccagtggcaatggaggggctcctctggctgctcacaccctgctgtggagggagacacactgcagggtgttgcctgcaaggagggccacttgtagggctcccacaatggaaaaagccgctccaaccctaatgccatcatggaacctctcaaataacagtacaaaacagcctggcaattttcatgatactgtcatggtccatgtcccccacatgccacttggtagtaaagaacagggaaaatacagagagaaagaaaaaacagcctggccacaggaagggccagattgagccttttttttttttttttttttttttttttttgagacggagtcttgccctgtcgcccaggctggagtgcagtgacgtgatcttggctcactgcaacctctgcctctcaggttcaagcaattctcctgcctcagcctcccgagtagcagggacctgccaccatgcccagctaatctttgtatttttagtagagatgggtttcaccatgttggtcaggctggtctcgaactgctaacctcgtgatacccctgccttggcctcccaaagtgctggcattacaggcgtgagccaccatgcctggccgagctttttttccccctctgattattttctgaccaaaaacaagcagtcggagagttgctgtgtaatgtaatggcggtgccaattagaaaactgaagcagaaagtgagagaaagactgaaaggcaaggaaaattatgttctgggataatgccaaggtcttgatgacttaattcattctttggcaactgctaatggctcctttgtgagccatcggtttcacttccacctggcagaacccgctcccgtaagctcatctgtgagctgccttttaatgaaaaatgtaccacggagactgattggtctacatcgttcagaaagcaagtactactcattcaaaataatgtgttacagttacagatgtgggttacttaaaattaacactagcttgaacaatatattaagcattcctgtccgagttggataaagctatttagaaatgacaaatatttttctctgttccaatttataagtattaataatttatgtcacttggaataaagtcgtcatctgttccctcagcctgggccgagatgggtttggagccagcagtgctgatagcaggagacagccgggggttttgaggccctcccccctcccggggagactcagagtgggcagggagcaatttgtgtcagaccttcccgacgtcaaagtcctgctaccgggtagggcacagatccacatggaggtttacacctgggtacctgggataccttacacctgggaacaggtgcggtgcagctgacttccgatgcgtcggagaggcaagatcctttgactacagggatggagcaagaaactggggccccacaagggccacacaggcccagggttccgacctccacctcccacccgcccccccccaccccacccccccaccaccacctgggcctctggcccgataagcccctccttgcctctcctggcctcgcccttcctgatttccccacctcacctttcctggctctgccccacatcgtcctagtcccgcccagacttgaccacgccctctagctctgctcaccaccctaggccatgcccattcttcccttgccacgcccactccttggccccgcccctctggcccatgccatgccctctcaagtcacgccccgcctcacctgcttcaccttgccagaccccgcccagccctgggctgtcctcacctcgctcccctccccggccccgtctctatccaggctcagtagaattctaggcagcaggagtggaggctgggtgggttgtgctggaggtaaccttaaggatcccgagtcgcggttccctgccttgtcctgtcttaaggccggcctataccggggccatctcctgtccttcctgggaggaagtatcccatactccctgaggctggcatgaaacctccgtttgggccgccattgtccacctcccagacccatgggctcgacccagatgttggttagcaaagtacctaccaaggctgccctgtggttacatgttgactaccaaggacacagacaaatggacaaggaagaaacaagaaaggaaaatttacctttggaaaactttccaaagatgttcccttttggtccctttccaaatgagaattatatacaatgaaataaaagttgtggatggatggatggatggatggatggatggatgataggtgggtggatggatgaatggatgcatggatgatgggtggatggatggatggatgtctgaatggatgagtggctgaatgagtgggtggatggatgggtgggtgggtggatggatgagtggatggatggatgagtggatggatggatgaatgcgtggatgatgggcatatggatggatggatggatgaatgataggtgagtggatggatgaatggatgcatggatgatgggcagatggatggatgggtggatggatgggtgggtggatggatggatagatggtgggtgtatgatgggtggatgatgggtgtatgggtaaatggatgggtgggtaggtggatgaatggtagataaaatgggtggatggatggcgaaagatggagtggataaatggatggatgggttgtggataatgagtgagtgtgtggttggatggatgaagctactcttaattatcttttggaaaagtggtcctgagaatcaagacattgaaatattccactagaaaagatcagatgttggctgggtgtgatggctcatgcctgtaatccctgcactttgggagaccaagatgggaggatcgcttgagcccaggaatttgagaccagcctgggcaacatagtgagaccttgtctctgcagttaaaaaaaaatgcaaaaattagctgggtgtggtggtgtgcacctgtgttcccagctactcaggaggctgaggcaggaggatcatttgaatccggaaggtcaaggctgcagtgagtcatgatcacaccgctgcactccagcctaggcaacagagtgagaccttgtctcaaaaaaaaaaaaaaaaatcagatgttatttggccaggtacatatgtatcacacagaaaacatgttctttaattaatgctgagcattgccagcaaatatttattgagcacatattgtgttcccggtgataaagatacatcaatgaaaaaatacaggcataccacagaaatattacagattcagtttcagaccactgcaataaagtgaatattgcaataaagtgagtcacacaaattggtttccctttgggaggccgaggcaggtggatcacctgaggccaggagttcgagaccagcttgaccaacatggagaaaccccgtctctactaaaaatacaaaatttgctgggcgtggtggcacatgcctgtaatcccagctactcaggaggctgaggcaggagaatcacttgaaccggggtggtggaggttgcagtaagctgagcaacaagagcaaaactccatctcaaaaaaaaaaaagaatattttattgctaaaaaatgtcaatgagcatctaagcctttgacaagtcataatctttttgctggtggaagttcttaccttgatgttgatggctgctgactatcagggtggtagttgctaaagtttggggtagttgtggcaattccttaaaaaatttttaaaaattgatacatgataattgagcatatttatcagtacatgtgatattttgatacatgcatataatatgtaatgatcaaatcagggcatttaggatatccatcattttgaaaagttaccatttctctgtgttgggagcattttaagtcttctcttctagttgtgaaatatgaaatatgttgttgttaacatgtaatgtaaccatagttacattattgtgctatcaaacactggaacttattccttctctcaaactgtttgtttgtacccattaaccaacctctcttcaccccctccccatacttcccagactctagtaactatcattctactctctacctccatgagataaatatttttagctctcacatatgagtcagaacatgtaatatttgtcattctgtgcctggcttgtttcatctaacataatgaattcaagttcaatccatgttgctgcaaatgacaggattttattcttttcaatggctgaatagtattctattgtgtatatgtaccacattttctttatctgttcatcccttgatggacacatgttgattctatattttggttattgtgaatagtgctgcaataaacatgggagtgcagatatagctttgatgtactgattttcttccctttggattaatacccagtttttcagtttttttttgagaaacctccacactgttttccataatggctgcactaatttacattcccaccaacagtgtataagaattaccttttctccacattcttacctgcatttatttttttgtctttttgataatagccattcgaattgggatatgtatctcacagtgattttgattttcatttccctgatgatcagcaatgttgaacattttttcatatatctcttggccatttgtatgtcttcttttgagaaaggtctattcaaatcacttgcccactgtttaatcatatgatgtgttgttgttttctgttgagttgtttgcgttccatgtatagtctggatattagtcctttgttggatgaatagcttgcaaatattttcttacattctctaggttgtctcttcatgctgttgattgttttctttgctgtgcagcagagttttagttcaatatagtcccatttgtctatttttgtttttgttgcctatgcttttgaggtcttagccataaaatctgccaagactgatgtcctgaagcatttcccctatgttttcttctaaggtcttaacatttaagtctttaatccattttaagttgatttttgtatatggggagagatacacatctagtttaattattctgcatatagatactcagttcctccagcactatttatttatttatttagagtcaggaactcactctgttgcccaggctggagtgcagtggcactatcatagttcactgcagccttgacttcctgggctcaagcaatacttccacctaagcctcccaagtagctggaactacaggcactatccaccacactcagctaatttttaaagtgtttgtagagatggcgtctccctttgttgcccaggcttgtcttgatctccagggcccaagcaatactcccaccttggcctcccaaagtgttggggttacacacatatgccaccacgcctggacaccatttattgaagaggatgtcttttacccagtgtctgttcttggtgcttttgttgaaaatccatttgctgtgaatatacggatttatttctgggttttctgtgcttttccattggtctatgtgtctatttttataccaataccatgctgttttggttactaactttataggatgttttgaagtcaggtaatatgatgcctttaactttgttctttttgctcagcattgctttggctattcaggatctttgtggtcccatacgaattttagggctgctttttctttttctgtgaagaatgtcattgcattttgatagggattgcattgaatatatagattgctttggggagtatggtcattttaacaatattaattcttctgatccatgaacatgagacatcttgcagtttctttgtgtcctctttaatttctttcatcagtgttttgtagttttccttgtagaggtattttacatcattggttaaattaattcctagattttttatttattttatagctcttgtaaatgggatttatttcttgatttctttctcagttcattattggtgtatgggaacaccactgattcttgtatgttggttttatatactgcaacttaattcacttatcagttctaagagattttttggtgaagtctttagattttctctatgtacaattatgttatctgcaaagagggacaatttcacttcctctctttcaatttggatgccttttatttctttctcttgcctgattgctctggcaaggacttccagtaatatgttgaatcagagtggtaaaagtgagcatccttgtcttgtttcagttattagaggaaaggctttcagcttttccccattcagtatgatgtcagctgagggcttgttatatgtggcctttattatgttaaagtatgttccttctatgcctaatgcattgagaatttttatcattaagggatgttgaatgttatcaatactttctgtgtctattgggatgattatatgattttttgtccttcattgtgttcatgtgaggtatcacatttgtatgttgcgccatctttgcggaatccctgggctaaatcccacttgctcatgatgtattatctttttgatgtgctgttggattgagtttgctagtattttgttgaggattttagtgtctatgttcatcaggaatattggcttgtagttttcttttttctgctgtgtccttgtctgggtttggtatcagggtaatgctggccttgtgaaatgagtttggaagaattccttctcttttggaagagtttgagaagaattggtgttagttctttgtaagtttggtagaattcagcagtaaaatctttcagtcctgggctttcttagaagactttttattactgattcaatctcattatttgttactggcctgttcaagttttctatttcttcctggttcaatcttgatggttgtatgtgtccaataatttatccattttctctaggtgctccaaattgttagtgtttagcttttcataaaagtctccaatgatcctttgtatttctgtggtatcagtttatcagttgtaatgtctccttgattttctttatttttgtgttcttcgccgcccccctcccccctccccaccccactccccggttagtctagctagcagttttattgattttatattttcaaaaagtcacatttcggcttttttgatcctttgtgattttttaagtctctatttggtttagttctgctttggctctgatcttttaaatttttattttattttaaaaatttgagacagggtcttgctctgtcacccgggctagagtgcagtggcacgatcacagctcactgcaaccttgacctcctgggctcaggtgatcctcccatctcagcctcctgagtagctgggactataggtgtgtgccaccatgcctgcctattttttagaattttttatactgatggagtctcactatgttgcccaggctgatctaaaactcccaggctcaatcaatgctcccccttcagcctcccaaagtgttgggattacaggtgttagccaatgtactatgctttgatctttattatttctttccttcactaattttgggtttggcttgttcttgtttttctagttccttgaggtacaacattaggctttttatttgaaatatttcttctttttagatgtaggcatttattgctataaacttcccttttagcactgcttttgctgtatcccataaattttgatatattctgttttcattttcatttgtttcaagacttttgttgttgttgttgttgttagacagagtcttgctctatcatccaggccggagtgcagtggcacaatcttggctcactgaaacctctgcttcctaggttcaggcaattctcatgcctaagccacccaagtagctagaactacaagcgtgtgccaccatgccaagctaatttttgtatttttagtagagatggggtgtctccatattggataggctggtcttaaactcctggcctcaagtgatccacctgcctcagcctcctaaagtgctgggattacaggcgtgagccatcatgcctgacttgtttcaagacttattaaatttcctttttaaattctgcttgtcctagtggtcactcaggagcatgtcatttaatttccatgtatttgtgtagtttccaaagtttctcttgatgttgatttctagttttattctgctatggtttgagaagatacttgatatgattttgacttttaaaaatttgtcgagatatgttttgtggcctaacatgtggtctatcctggaaaatgttaatgtgctgatgaaatgagtgtgtattctgcagctgttggataaaatgtcctgtaaatgtctgttaggttcatttggtctaaagtgaagtttaaatccaatgtttctttgttgattttctgtctagatgatctgtctagtgctgagagtggggtgttaaagtctccaactgttattgtattggagtctatctctccctttagtctaataatatttgctttatgtatctgggtactgtggtattcggtgcatatatatttagaattatatcttcttgctgaattgatccctttatcattatataatgacattatttgtctcttttaacacttttagactcaaaatctgttttatctaagtatagctactcctggctctttcggtttccatttgcagggaatatgttttttgtactttcacttttagtccatatgtgtctacaggtgaagtaaatttcctgtaggcatcatgcagttggatcatttttttcatacactcagccaatctatttatctctctcatttttttttcaaaggtggggtcttgctatgttgcccaggctggacacaaactcctgggctccagtgatcctttcatcttagactcctgtatagctgtgactacaggcacatggctctatacattttaggtaggcaacttaatttaatcaatttaaactcaaggttattattaataggcaacaacttattttcgtcattttaaaatttgttaaaaaataatagaaattgtttctggttgttttgtatagtatcctttgttcctttctctcttactgcttatcattacagtttggttgttttctgtagtggtaacatttgagtactttctttttctcatttgtgtgtttgctctaccagtgagttttatacttttgtgtgttttcatgatgatatctaccatcctttcacttccagatgtaggaatcccataaggatttcttgtagggctggtctagtgatgataaatttcctcagtttttgcttatctgggaaagacgttttttctcctttgtttttcaaggatagctttcctgggtatagtatcctggctggcagttttattatctttcagcactgtgaacatattgtctgattctctcctggcctgtaaggcctgctgagaaatctgctggattcttttatatgtgacttgacacttttctcttgctgtttttagaattctctttgtctttgacttttgacagtttaactataatgtgccttggagaagatctttttgggttgaagctatttggaaatctttgagcttccggtatctggatgcttatatgtcttgcaagacttgagaaattttcaaccaaattttttttttttttaagacagagtcttgctctgttgcccaggctggagtgcagtggcacaatctcagctcactacaacctctgcctcccaggttcaagcgattctcttgcctcagcctcctgagtagctgggattacaggcacatgccaccatgcccagctaatttttgtatttttagtagagacagggtttcaccatgttgctcaggctggtctcgaactcctgaccttgtgatcctcccgcctcagcctcccaaagtgctgggattacaggcgtgagccactgcgcccagtcttttcaatgaaaattttattaagtatattttctatacctttgtccatctcttcttctggactacccaaaatttaaatatttggtctagactgcttgctctagtcaattgttgaagctgtaagttgtattattttattttattcattgaattattcaatttgaggatttatgtttggttcttttttatgatatctattttgttgttgttgaatttcgcattcagatcatgaattgcttctctgatttctttgcattgtgttctattgtgtttcactaggcttcttttatagcatacttttgaattcttttccaggcatttggtagatctctttttcattggagtctgttggagcctgttgctggagaattattgtgttcctttggaagtagaagtgtcatgtttccttgatttttcatgtttcttgttttttcatgtttcttttttttttcttttttttttttttttgatagagtctcactctgttggccaggctggagtacagtgatgcaatctcagctcacagcaaccctgcctctggggttcaagcaattctcctgcctcagcctcctgagtagctgggactacaggcatgcaccaccatgcctggctgatttttgtatttttagtagagacagagtttcaccatgttggccaggatggtctcgatctcctgacctcgcaatccacctgcctcggtctcccaaagtgctgggattacaggtgtgagccaccgtgcccagccgctgtgttcttatattgatatctacacatttggtacaacagttgcttcttctaatattgtggagtgactttcacagaaaaagactttttttctgtatatgtgtctatagtgttggttgggtagggcactttggctttgattctaagtggacccagaagtatagtctttatatgattttttttcagcaccagtggtggtggtggcaagtcaggtgtgccagtccttgggcccctggatggtgtataaggataccagtggtagtgggtgtaggcaggacaatctttgggtctccaggtgacttttgcgggtgccagcattggcagtagtgggctaggtgggtgagtgggtctcatggttgcatagcattgatgataacagtactggtggtgaacgaatccatgccctcccccctctgcagcacatgctggcaccagcattggtggcaacaggctgggtggacccatcttcaggcccccaaaaggtgtgtgcaagtgctggtggtagcaagtgggatgggtcaattcctcggcccctgatgtgtgtgggtgctggtggtagttggcaaggtgttcctatcctcaatatcccccgtggtgtaagcacatgctggtggcagcaggtaggcaggttgatcccccgggcccagacaatgttcatgggcaccagaaggctgggcagactcatcctccagccctggggatgtttgtgtgggtgctggtggcagcaggggggcagatcaatcccctgacctctggacaatgtgcatgggcactgatggctatgccaggcaaggggatcaaatggtatgcacaggcacagtctatggtgggtgaggtggatcgatccctaggctcctggagagtatgcttgggtaccagcagtggtggtagtgaatgggcagacctgtccctaggttcccttctggcatgcatgggtgccagcgatgggtggggtaagccaagcctgtcatcaggccccccaatagtttgcatgggtgccagaggccatgggcaaagtgggttcatccccaggctcagggactggtgggtagtgatggtgggcggagtgggtctgttctcaagttcctgaatgatggctggtgctggtgctggtgatgggaaaagtggatcatcctcagtcccctcatcttgatggtgcacacaagcagtagcagcagtgggtgggctgggtcagtcccttggccctcagatgatgtgcacagtcagtggcggttgtggtcagtgggtgagcctgtcttcaggacccccaatggtgtgcatgaacacagctgtgatgggtgttcaatctcccagcccctggatgacatgtggagatggtggtggcagtggtgggtagagtggtcttgtcctcacgccctgggaaggtgcccaggcaagccggtccccaggcctcctgaaggtgcatgcaggttgtattagtccattttcacactgctataaagaaatacccgaaattggccgggcgccgtgactcacgcctgtaatcccagtcctttgggaggccgaggcgggtggatcacgaggtcaggagatggagaccatcctggataacacggtgaaaccccgtctctactaaaaatacaaaaaattagctgggcttggtggcgggcgcctgtagtcccagctactcgggaggctgaggcaggagaatagcgtgaacctgggaggcggagcttgcagtgagcctagatcgcgccactgcactccagcctgggcgacagagtgagactctgtcttaaaaaaagaaaaagaaaaagaaaaaagaaaaaaaaataaagaaaaaaagaaatacccgagactgggcaatttacaaaagaaagaagtttaattaactcacagttctgcatggctggggaggcctcaggaaacttacagtcatggcggaaggcaaaggggaagcaaggacattttcacatggcgacaggagagagtgtgtgtgaagaaggaactatcaaacacttataaaaccatcagatctcatgagaatttactcactatcatgagaacaacatggaggaaaccgcccctgtaatccaatgacctcccaccaggtccctccccggacacgtggggattacaatttggattacaactggagatgagatttgggtggggacacagccaaaccatatcacaagtgcacagtgaccccgctgctggggggatggtgggggtgctgtcagtggcagtggtcccaggcgggcagctctgcggctctgggaaacatgggctttggctccctttgtcccaggggcagcctccctggtgtggtgcaccacccattcccaggttataggacatgtgtagactagattgctggggacccagtcaccctgcattgtgaggctgcagccttctgggtggacatggcggaatgtcagcaggactccatggatgtggagatgcaggggctgttgagccccagggcgggatggggtctggtcaggggtgggctctcaaaatggtgctgtgctgcagctgctcaggtctcagaggatgtgtaggacccatcataaaatccctctttggaacaatgcaggcggctctctatactagtctcaaagcccatgagggccaaggggctctctgtggctagggccacaggagtctgtggtgggaatgcagccttgcggggatctctcatttaccttttccctacgttgggcagtttctcttggatctgagctgatcctggctgggccggctgcttcacatcactctctttgcatgtttccgaagttccttgtcctttccctctgaattccagtgttctttctaagctgctctacttgacatgtgattattcatttgctgtttgagtcctttgtgaaggaagtgagtgctggatgcctctggtcaccatcttgagctgaagaatgtttcttaccattcacaattaaaaaaaaaataagacaatgatgaggtttgctgcatcaaatgactctttcaaaaacattcctctgtagcatatgatgctatttgataaccttttactcacagcagaactttcaaaattggagtcagttctttcaaaccctgccaatgctttatcaagtaagtttacggaatattctaagtcctttgttgtcattttaacaatattggcggcatcttcaccaagagcagattccatctcaagaaaccatctacaagatggtctttgctcatccataggaagcaactcctcgtcagttcaagttttatcatgaaatttaagcaactgagtcacatcttcggattccacttctaattctagttcttttgctatttccaccacatctgcagttccttcctccactgaagtcttgaactcctcaaagtcatccatgaaggtgggaatcaacttctttcaaactcctgtttatgttgatttttttatctcatcccatgaattacaagttcttaatggcatctagagtgttgactcattttcagaaggttttcaattgactttgcccagatccatcagaggaatcactatctacagcagctaaagcctcatgaaatacatttctcatataataagacttgaaagtcaaagttagtccttgatccatgagcatcagagtggatgttgtgtaagtacacatgaaaacaacagtcatctccttgtacatcctaatcagagctcttgagtgaccatgtgcactgtttgcgagcaataatattttgaagaaattttttttagagcagtaggtcacaaatgtgggcttaaaatattaaaatatttagtaaaccatgctgtaaacaaatgtgctgtcatttaagcttcattgttccattggtagagcacagggagagtagatttagcataattcttaagggccctaggatttttggaatggtaaatgagtgctgacttcaacttaaagtcatcatctgcattagctcctaacaatggagtcggcctgtcctttgaagctttaagtcagggattgacgtctcctctctagctaggaaagtcttagacggcatcttcttccagcagaaggctggtttatctacacggaaaatctgttgtttagagtagccaccttcatcaatgatcttagctagatcatctggataacctacttctgcttctccctcagcccttactgcttcattttgcacttttacgttatggagatggtttctttccttaaacctcatgaaccaacctctactagctttcagttcttctgcagcttcctcacctctctcagccttcgcagagttgaagagagttagggccctgctctggattaggctttagctaagggaatgttgtgactggtttgatcttctatccagaccactagaactttctccatatcagcaagaaggctgttttgctttatcattaatgtgttcactggaatagcacttgggatttccttcaagagcttttcctttgccagttgtaaagcttggctaactggtacaagaggcctagctttcaacatgtcttcttcattaagcttaatcatttctttttcttttttttctttttctttttttttcttttccttttttttttttttttttttgagacagagtctcactctgttgcccaggctggagtgcagtggtgcgatcttggctcactgcaacctccgcctcctgggttcaagtgattctcctgcctcagcctcccgagtactgggactataggcgcgtgccaccacacccggctaattttttgtacttttagtagagacggggtttcaccatgttagccaggatggtctcgatctcttgacctcatgatccacccgcctcggcctcccaaagtgctgggattacaggcgtgagccaccgcgcccggccaaacttaatcatttctaactttctatttaaagtgagagatgtgtgactctgcctttcagttgaacacttaaaggctattgtagggttattaattggcctaatttcaatattgtttgtctcagggaattgaggaggcccaaggagagggagagatgggggaacggccagttgatggagcagtcagaacacatatttttatcagttaaatttgctgtcttatatgggcactgtttgtggtgcccccaaacaattcgaatagtaacatgaaagatcactgagcacaggtcacctcagcgatataataataagaaagagtttgaaatattgtgagaattctgaaaatgtggcacagagactcaaagtgagcacatgccgctggaaaaacggtgctgatagacttgctcgatacacagttgccacagaccttcaatttaaaaaaaaaaatgcaatatctgaagtacaattgagtgaagataaataaaacaaggtatgctgctgacacggccctgccctcatggagcctgctgacatcaacaaaccacacgtcaacaaattcacagcacattgtggggtgcagggctgtggagtgaagccagcctgggcagggggcctgggaggtgagggaggatgctggggctgcccctgtaaatgaccccatgcttctacaccatagagagagcacgttgtgttacgtgactgataagtacatagaggagtgggaagagagcagggctggccctcacggctggccttgtgtcccactgaacagggacgatctcacaaacaccaactcagacaagagcatgcatgatggcaccagatcaagaccaaaataagaccactctgcctgcaattttgtctgctcagaccaaagcaagaagattgaaacaaaaaaatgatccctcatcgcctatcctggctgatgtcagtgatggctgcttttctgccaacagtggctttagcctcacacggttcttttagccttttaggtgagaattattaagatagccaagcacagaatcatccccttcttcctgacagcatcctggatcctcccctgaatcacccaactcaagcccagacattataagtccttttcgatattattgagacctcctcatggttacctgtggtttatggtttcatgaaacgagtaaaaaacctcaattttgtttggctataagtgtgctcctggtggtctttggctagagaatgttgacaatggaaaagtaataaaaattaaatgatttgagcagaaataatagtttagtttaatatcctctgtttttagaaacttgaggagagattctctccctctattctctacactggaggactttggtaagcaaaaggccttgatgaccataaggagaactttggaaatcaaagcttagttacggtttcagtggacaagaaagttttctcacctgaaaaatcaaattcccctgtgaattgttaggtcctctgatgcactacgcagaatttacttagtttggtgattagactggaagtggaatagaagtgtcaaggatactgtcttagtttgctggggctaccataacaagctaaccaacaaactaaccgactgagaggcttcaatgacagaaaagaaattttttgcagtcctggaggctggaagtccaagatcaaggtgttggcagggctggttccccacaaggcctctcttgagcttggcttgtagatgccttcttctccctgtgtcctcactcggtcgtccctctgtgcatctgtgtcctcatcttctctctataaggacaccagtcctaatggaccagggcctactttaatttacttgcctacttaaatagctcatctccaaatacagccacctttgaaggtaccgggggttagaccttcaacatatgagttttgggggtacacaactcagcacgtaacagcgattttccattatttatgagttaaagagaagaaatagaaatgaaaactgtcaagtaaaattagccagctggcccagttcagctcggcacccattctccccactgaaccatcacacggagctcagctgttggagtttttcatttccatttaacttcacacctggctctcagcagcaattaatgttctcagtaactaaaagtctcctctgatatcagtgatatgagaaaaatgctggctgaagcctttcaggcatcattcaggtgacatctgagtcatttcctcggacctctctcaatcaaacctcctaggtaattggatgaatcagatcaataagcggagcggatatttatttccacgtcagacttcctctccgctggccatcactcgggtgcgtgacgcatcccccgctggactaaatccagacccggaacatcgctccttggcagcccattcttctttgtgcagcagccttctaggtcaccaggatggtgatggacatttctgcaagaaaaatgatgcctggaagttaagcttcagcccatctgtggctgcccacaaggtcccctagaaaggcagcattttcaaggcctgtttttcaaagcatgttataaaaacctcggcctgtggaatagcactctcatcactaagaatgcagccctttccccacgtgctcacccctattttggggaggcatgcgcagagccatgtggtccaacctcacacaattgcttctcttgggcacctccacagtggcggtaccccagccgccgggggctgcccttgaaagggctcagtcacacacctcccaccttcccagatggtcaaggtcatttgaggggatgtcaaatacagtgaaaggaaccaacagtcctgccagacctgggttcccattgcaggcccatcaaggtcagctgcaggaccttggcaggcctctccaccttgggcagcctctgccatctgaaaaaggggtgttgctgcagctccatccctctttcctagagacactgggcatgtgctgcctgccttagtctgttggggctgctattacagaataccatagagtgggagcttaaacaacagacattcatttctcacagttttggaggctgcaaagtctaagatcaaggtttggtgtctggttttcagatggtggccttctttcttcctgtgtcctcacaaggcagagagagctctcttgtctcttcctgtttttataagggcactaatcccatcatgggggtcgcaccctcatgatctgctctacctccaatcacctcccaacagccccacctgcaaataccatctcactggggactagggcttgattgtatgaattttggaggatatatttagtccatggcactgcctccagaatgcacagagccctgggacaccttcataaatgttaataccatcatcattgtcccactaatagagaatatgccaaggccacctaggttgtttgctcactgccacacagggcgacagggacatgggccttccggccctcacgggtgaagacaggcttgtggactgtggtggttgtgtctgctgggctggctgggtcctcattgcccccacagtcccctgggggtacccttgtcaagtcagttccctgaggtccacactccctgctaccccacagggccgagtgcttgcaggctgcctcaatagatgttggtagaaagattataaaattgcctcctgtgagtctgaagcaaaaatgaggactctaaaacccaagctcatcctcctgcaactggatgagtccttatctctgggttggatgaaacacgtgcccacaagacagccatcaccctatctgcaataaatcagtagcggcattatcgtagcgactctgctgtgaaactggaaaggagcatgcattaggagaaggctaaccctgcaagacaccctcattaacaaaattgtcagagcacagaatagcagaagacagccttttttttggtgatgtgccggcagaactgtgcattcgtgttcaggatgtagaagctgtgcagggagagaggcaacattttgaaggtgtgagctattttgtgctaatcgtcttctaattatttttctttgtctgatttaatacatcttcactgcgaccagctgtatgagtgcacttgggctactgtaacaaaataccacagactgggggagcttaaataacagagacttacttttccaggtttatttatttatttatttatttttgagactgagtcttgctccgttgcccaggctggaggacaattgtgccatctcacctcactgcaacttccacctcccgggttcaagcgattctcctgcctcagcctcccaagtagctgggattacaggcgctcaccaccacaccaggccaatttttctatttttagtagagacagagtttcaccatgttggccaggctggtctcgaactcctgacctcaagggaccactcgcctcagcctcccaaagtgctgggattacaggcgtgagccactgtgcccggtcttcagatttattttctcaagatcaacatgtcagcaggagtggcttccctaagccctctcttcttggcttgtagatgtttgtcttttccttgcgtcttcacatggtcctttctccgtgtgcatgtgtgtctgatgtcactctgtgtgaccaaatctccttttcttataaggacaccaagcctgttggatgagggaccaactgattgaccccatttttatcttaatgatgtccttaaaggccctctctccaaatacagtcacattctgaaatactggggcttaggactttgacatataaattaggggccaacacaattcggtgcatgacaccaggcaatatctaactgtgttaagttcttcatattttggggatctccctttttttgcaaccggaatcaataatgtgttttaaacttgcttaatttgggccatgtgtggtggctcacacctgtaatctcagcactctgggaggccgaggcgggcggatcacctgaggtcaggagttcaagaccatcctgaccaaaatggtgaatccccacctctactaaaaatacaaacattagctgggcgtggtgatgcatgcctgtaatcccagctacttgggaggctgaggcaagagaatcgctagaacccaggaggcggaggttgcagtgagccaaggcgccactgttctccagcctgggcaacaagagcaaaactctgtctcaaaaaacaaagacaaaaacaaaaaaacttacgtaatttgatcatcagtaatagagccctttccaggcccggtaccatggtcagccctggggatgaaatgatggtggggttcaatggggtgacatgtcacagccctagtgtggcaccagcactggcatcacacactgcccctgaacttctatcctgggtggaggaggcaggcaagcatgcagcttagaaagcgccttccctcctttaggctcccagggagggaggagggggaaagctgagtggagcccttggctgcgtcttggagatgaggttgagttctgtatgactcaagagcaccatgagcagaggagaaagtgcagggcctaggatgggtgtgggtggcgctgaggacatgactctgaagctggcatgaaattagattatgagagggctggagccttgcacagagggggcctggacttcctcctgtgggccttgccccatgggaacccagctttctgagtgctgtttcatagctctccacgctcacgctcacttgacaccccctctactgtcgctggtgtccctgctgagaaactgtctggtgaggctgaatggaagctcttcccagcccaccagacgtttctccctgcctactttcagctgcgaggaggcccagcctccagatgggcgagccaggtcatcttagacaactggggccacacgagcgaccccgggccacagcaacccccaactgctcacccacaggcaaggggcccagagcgtgggcatggtcagcgtggtcgaccatgacggttcctccaaccctggcccagagccctttccacggtgcctgtggctcttcatggaggggcggagcttctctccccacctgtcatgggctaacacttgtcccctgcacattcatccgttgagatcctaccttagaatggaattgtattagtttgtttatttgtttatttgagatggggtctcactctgtcacctaggctgagtgcagtggcacaatcttggctcatggcagccctgacctcctgggctcaaatgatcctcccacctcagcctcccgagtagctgggaccacaggtgtgtgccaccaagcctggctaatttttaaaattgtatttgtagagatggggtctccctgtgttgctcgggctggtctggaactcctggcctcaagtgatcttctcacctcagcctcccaaagttctgggattacagaaccaccatgctcagcctgtatttggagatagggtctgtaagaggtaattaaggtaaacatgaggtcattagggtgggccctaatccaatatgattggtgtccttatgagaagaggcaattaggacacagacacacagagggaccgctgtgggaggacacagggggaagatggtatcggacagacagacacacagagggaccgctgtgggaggacacagggggaagatggtatcggacagacagacacacagagggaccgctgtgggaggacacagggggaagatggtatcggacagacagacacacagagggaccgctgtgggaggacacagggggaagatggtatcggacagacagacacacagagggaccgctgtgggaggacacagggggaagatggtatcggacagacagacacacagagggaccgctgtgggaggacacatggggaagacggtatcggggccaagaggaaactcctccttcaccctctgattgttcacagaaaatcaactgacaaaaggtaggttagtaggagaagaagcacacggatttattaatatgcatagaggcagagcacagagtgattgcccacagtgcagggggtactgatacttacctacccctcttcttaggggaaaggagacgggaaggtgcgaatgattttagggggacagtacatgatttttaggagaattcaatgggcgtgaagaacatacaatggtctgggacaaagtctgttgggcacgcagagcagagaatggtttgtgaccaaagtctcttcaagcatgctgacagacgtcagtccttcttcctgggatctgagttcagttaaagaaaactcaaagaagggaccagaggccactgttgtcttctttggtgggtgcagacatgaggcagacaaaggaacctcagaggacaacttcctgtcatgctttgggagggacagaggattgagagacaggagggagagggggaaggtcggagaggcctggaggctgcttctttagtccggcaggacaaagcgccatgttgtggagtatccgttcctgagcccccatgatgaccatctgccagccagggagagatgcctcaagagacacgcctcaggagacatcagccctgccgacaccttgatctgggacttccagcctccagagctgtgagaactaactttacattgttggagctgtctgtggtactttgtgatggcagcctacacaaacacacacaccagcccttgaatccaggctggcctggggcctcgctgtgacctggagacggcggtggaagtgcctcgagacacgctgacgcttccactcttgccctcctgctgccctgagatgccttgtgaattctcccgggcagacccccccgggggatgaggccacgtggagagggaggccccgctgtcagccagcaccagcctccagatggccgggccaggtcatcttagacaactggggccacatgagtgaccctgggccacagcaaccccaactgctcacccacagatataatcatgaaccaattaaacggttgttgtcttaagccaatatattttggtggggatggggggttcttacacagccatggataactagacgttaaatttgggctggaaactaaataaaataaataaaaatcagataaaactaaatacagagcccatgcaccaggctaaaaggatttcccaaaattcattcattcagtaaatgccatttgggtgcccaccaaggccaggcgctgttctaggcacttgggatacatcagtgagcaaaacagacagagctctctgctttcatagtaaccccgatacacatagtaaaaagtaaaacgtggtaagtgagatgggagaacattctaaacagggtaagaggaaatacaggggtaaaagacggcaggctgcaattttaaataacggctgtcggccaggcgtggtggctcacgcctgtaatcccagcactttgggaggccaaggcaggcagatcacctgaggtcgggagttcgagaccagcctgaccaacatggagaaaccctgtctctactaaaaatacaaaattagccaggcgtggtggtgcatgcctgtaatcccagctactcgggaggctgagacaggagaatcacttgaacccgggaggcggaggttgcagtgagccaagattgcgccattggactccagcctgggcaacaagagcaaaacttcgtctcaaatacaatacaatacaatacaatacaatacaatacaatacaatacaatacaatacaatacaatacaatacaacacaatacaatacacaacacaataaataacggccgtcagggtaggccttattggaaacgttatcgcctacttatttgaggagagactaaaaggaggtgaacgtggtagctacatagctattggagggagagcattccaagcagagggaacagccagtgcaaaggtcccgctgtagtttggaaactgaaaattgatcctcagtgttggaggtgggctctaataggaggtgtttgggtcacgggggtggaccccgatgaatagatgaatgccctccctggggtgcggggcattcagtgaattcttgctctgttagttcctgagagaactggttgttaagagagcctggccctcctgtctctctcttgcttcctgtcctgccatgtggtctctgcaaacaccagctcccccttgccttctgccatgagtgccctcaccagacgcagatgccagcgccatgcttcttgtacaagctgcagaactgtgagccaaataagactcttttcttaacattaaggttggtgcaaaattaattgcagattttgccgttgaaagtaatggcaaaaaccgcaattaattttgcaccaacctaataattgacccagcctcaggtattcgcaggtatcctcaggtattctcttacagcaacagtaaatggacctagacaggcccagaggtaggagcatgcaggggacatagcgggggaactgcaggagaagaggcctggcccagcaggcccactgtgagggctttgcttttctcagaaggaagaggtcttttaggcagggcgcggtggctcacaccggtaatcccagcactttgggaggccgaagttgcgggggcggggggggaatcacctgaggtcaggagttcgagaccagcctggccaacatggtgcaatcccatctctactaaaaatacaagaattagccgggcgtggtgggcagcgcctgtaatcccagctacttaggagactgaggcaggagaatcgcttgaaccaggggcacggaggttgcagtgagccgagattgtgccactgcactccagcctggtaacagagtgagactccatctcagaaaaaaaaaaaaaagaggtgttttgttagaaaccagtattctggccattggcacctgggggaatcctgaagtccaaaacctacttgtcaccaaagtagaaatatgaacagagtttgccctcacatgttcttcacgctccacaccacctgccagacgctgtacctaaccaccactggggacctgctcgtttccgccttttgtcctggggaaagggggctgtttcctgagggacggggcagtggtgggcaccaagcctggctacctggggccaggctcggctctgccactcactagcgttgacctggggcctgctgcggaggctgctgtgaggacaccgcgtgcaaaaggcaaatcgggtcaagcccactgcaagaaaacccagttacgtgatcgcccttcttgaaccatctctctcctgacgccagagcgtcttccagctgctggccctcttctctgccccctttctagcaagactctgcaaaagacttggtgcttatggtttccacctttttcccccttttgtttcttgaacccaccccaaccagacttccaaccccccaggccaccaaaacggctcttgtcaaagttgccagcattcagctgccttcttgacctctctcccaggggtttaacaggcaccccaaaccaacacttccaaaccaaatcactgacgatcccctccaacctattccaaactcgttgcacagtttggttacaggtaacgtcaccttgccaggttctcaggcccaaaactctgggatcatccttggtgttcctctttcatatccagcactcctgcaggtactgctggctcttccttcaaaacagatgcagggatctgacctcttcacagaggctggagtgagccttttttttttttttttttttgagataaggccttgctctgtcacccaggctagagtgcagtagtgtgatctcggctcagtgcaacttctgcctcacaggttcaagcaattctcatacctcagcctcccgagtagctggaattccaggtgtccaccaccatgcccagctagtttttgtatttttagtcagacagggtttcaccatgttggccaggctggtctcgaactcctgatctcaagtgatcctcctgccttggcctcccaaagttctgggattacaggtgtaagccaccaggcccagcccggactgagccttttaaacataatttagtccgaccatggtggctcacgcctgtaatcccagcaccttgggaggccgaggcaggaggatggcttgagcccaggcatttgaggctgcagtgattagtgattgcaccactgtgctccagcctgggcaacagagtgaggccctgtctcgaaaaataataataatagaaataaaacacagtttagattgtgccatactgttcttcaaaatggacctcctatctcattttaaaacagaaagtccttacggtggcttccggagcctgtgtgacctgcccttctgcatctttctggcctcaactcccacacttctcccctttgatcacactgaaccacacgggcctcctggctgttcctcaaacaggcctaatacagtcccaccccagggccttggcactcgctgttccatctgcctggaggctctttctctcagctagctgtgaggctctctccacgtttcctgcaagcctacgctgaccctctccaggaaaagagcccgtccatcccatcgcccacctgaacctacttagttatctgtggcattgatcagcacctgacactgaacataaactcggtgaggcttggtctgttttggtcattgctacatccctagtaccctacacagtccctggcacatgctcaatgttcgttgaatgagtgagagaataacattactcactgttcaacaaacacccttgtcgtctcctcattgctatatatatatgtatgcatttttttttagacaggatctcgctctgtcgcctaagctggagtgcagtggtgcaatcttggctcactgcagcctccgcctcctgggatcaggccatcctctctcctcagcctcctaagtagctgggactacaggtgcatgcaaccatgcctggctaatttttcatattttttgtagagacagggttttaccatgttgccaagactggtactgaactcctgggctcaagtgatctgcctgccgtggcctctcaaagtgctgagatgacaggcatgagccatgcccaggctcctcattgctggtaaatgacaaaaccccgaattcctcgatatggtcacgtgacatagccccactgatctctggttttatctggctgtgtccagcccttggcaaacatgctgggcgcatggctcaggctgatccctcatctgaccccagggcctttgcactcactgttccgtctgcctggaggctcttcctctcagatagcttcgaggccctctccacatttcctgcaagcctatgctgaccctctgcaggaaaagagcctctcctgtgaagtccccaccattctccccactatctcttgaggggaccagcacggggcctgtgaccccctcaggggttattgctgcagctgacagacgaggcattcagtagtcacttaagccaaatggttatctgaaatataggtgactagaaacgaaatctagaattcatgtagattagattaaattaaaattttaattaattttaattaatataaattaaaagtctatctgagagcctctaacctatgttttacatgaacacaagtaagaatggaccccgatgatgtctgcaggaagttcagaagttcaatgtcagttgaatatgagctgccctggtttcaggtatcctcaacttctctggacccaagtctgcgcataaaaatggtacaaacattgcagtattcaaagcacacacaaacatattcctcacagatcaccccaaattatgatatttatttggcaatcagtgaataggctttaaatatttggcaaagtcaattcctatcaatttctcttcatggaatccccacaaccgaggagaatcaatgtaacctcatattcagaagttatgaccagctgggcgtggtggctcacactgtaatcccatcactataggaggctgaggcaagtggatcacttgaggctaggagtttgagaccagcctggtgaacatggtgaaacaccatctctactgaagatacaaaaattagctgagtgtggtggtgcatgcctgtaatcccagctacttgggaggctgaagcgtgagaatagggacttgcttgaaccctggaggtggtggttgcagtaagctgagatcgcaccactgcactccagcctgggcgacagagtgagactctgtgtcaaaaaaaaaataattaatagaagttatgagcatattatacaacgacaaacgtgtcatcagggagagggagtttagattaatttcaaaactaaaactgaaaagaggtttgtaatttttatgatatgcttatccagtggatgggagtgctccatagacaaagccatcccaaatattaatggtttacttctttatgacacgcagacaatgcccctctcttttcagaagttactttgtttgcagctaattagaggaatcccacttctcagggtggtctttgttcatgtatgtcctggcacagatgtgaagccatgctgcttaatgcaagggccattagcgtggaatgacgtgctcagtacatttctgggacaaggtgacactgtcattgatggtctgttgaaggaaagaagctaattttcttttaagcgtaagcctttagtagtaatttaattaggccatgctgtaaaaccatcactaataactgtcagaagtaccccctgagtcaccagggaatgacaaagcttggcaaacagcctcttccttggagccccggagttcatctcccacctcattttgaaatggtcctcacgggtcttcaaagacccctgtctcttggcctgagtccgtccttcctctttgtgagacttcatgagtgctttacatatatataaacatgcatgagcataaacatgcacatgtaatacacagacagacaatgtaaaacagctttttttttttttttttctggagactgggtctcactctgttgcccaggctggagtgcaatggcatgatcacggctcactgcaacctcaacctcccaggctcaggcgatcctcccacctcagcctcccaagtggcccagaccacaggtgcacaactactcctggctaagttttgtattttttgtagagacagggtctcactaggttgcctaggcttgtctcaaactcctgggtttggcaatcttcctgcctcaacctcccaaagtgctaggattacaggtgggagccaccatgctgcatcaaaacattttaagaaaagaaaaaaatccctttattttcaattctgtaaaatgacaccaccagtgcttgcccacaagctcatctttttttttttttaacatagtagtaactacctgatattctagttcttttattatattttccaagtttttataatcttttggttactattttaatggttaccaaaattacattttgatacttaatgcacttatttagggcattgaggccaaaaggttgaattacaggagagatggaggattgtggggagagcaagggtgagtagggagaggaaggagggaagagggaggagtcaagtcactgagggcagagggcagaggtcagaaggccagtgggatcctggtccctgctcctccacttttcctgggattctggaagctatccagtgtctttccaacatgcttcaccttccttccttccttccttccttccttccttccttcattccttttcttccttccttccttccctctctctctctctttcttttcctacagagtcttcctttgtggcccaggctggagtgcaatggcacgatctcggctcactgcaacccccacctcctgggttcaagcaattctcctgccttagcctcccaagtagctgggatcataggcgcccaccactactcccggctaatttttgtatttttagtagagatggggtttcaccatattggccaggctggtctcaaacgcctggcctcaggtgatgcacctgcctcggccccccaaagtgctgggcttacaagtctgagccaccgtgcccggctgttttcttaaattggatggaagtggtttctcttggacgttaggttccgtcctctgtccgaccctgctggcacatgggggtgctgagaaatatctgtcgaaagagttaacaagtcttaagtgattcgagcactttccatcttagaggacagtgtgcgagcactcgccctgggctctcctgccagcaggggtcccccagggactctcttcactttatttgccctcgcaggaatcttctttcagttcctcctcctcggaggccacgcttccccgacttctctcgctggaggctccacactccactcaccactgaacggatggctgccctgttcctttcggctcctgctcagatgccccttttccagggcatcccgagggccctgtctgaaatcacacttgccctgactacctgcccctgtactgtctccttgttattgttcttcatagcaataaacaattcctacagcgtatgttaatgttgttgtctatcgcctccagtcagaaagttcatgagagtagaaactttttattttgttcaccgttctttcccctaaacagagactcccatagggctggtgccccactcactgattcaacaaatatttatcgagtctgcctactataaaggataaatacataaaatagtgcgatagccaggtgtggaggctcacacctggaatcccagcacttccgggggccgaggcaggagaatctctggagcccaggagtttgaggccagcctgggcaacatagcaagaccctgtctgtacaaaaaataaaaaagccatgcatggtggtttgcgcctgtaatcccagagggttggaaggctgaggctgaggcaggaggattgcttgaggttaagattttgagaccagcctgggcaacacattgagaccccatctgaaaaaaaaaaaactagctgagcgtggtggcatgtgcctgtggttccagctatttggaaggccaaggtagaattgcttgagcctgggaggtcaaggctacagtgagtcatgatcacgccactgaactccagcctgggtgacagagtgagatcctgtctcaaaataataaaataataataataataataataataatggccagatgtggtggctcacacctgtaatcccagcactttgggaggctgaggcaggtggatcacttaaggccaggaggtcaagaccagcctgaagtccttttcaaaccttttgtcatattgcccaggctggaatacagcagcatgatctcagctcactgcaacctccgactcccaggttgaagctatcctcctgcctcagcctccggagtagctgtgactacaggggcccgccaccacgcctggctaattcttttatcttctgtagagacagggtttcaccatgttggccaggcttgtctcaaactcttgacctcaggtgatctgcccgcctcagcctcccaaaatgctgggattataggcgtgagccaccgcgccttgctcggctttttcattttcttaccagtatcttgagcaaatgtttctaattttgataaagtccaatttatcagttttgttcatctattgattaatttacaaaaatggtatctatggtatacatcatgacttgtttgtttgttttgagaaggagttttgctcttgccacccaggctggagtgcagtggtgtgattttggctcactgcaacctctgcctcccaggttcaagcaattctcctgcctcagcctcccaagtagctgggactacaggcacctgccaccacgcccagctaatttttgtatttttagtggagacggggtttcaccacattggccaggctggtcttgagctcctgacctcaggtgatccacctgcctcggcctcccaaagtgctgggattacaggtgtgagccactgtgcctggccatgattattattattattattattgttattagtttgatgttttgatatatgcatacattgtggaatggctgaatcaagctaattcgcatgtgtattacttcacgtttttagcatttttttgtgatgagaacacaaaatcgatttttagaaatcttcaactatacattgttattaatcagagtcaccctgaggtacatagatctcttgaacttattcctcctgtctcaatttttttcctgtgtgatttgtgtcttgtctaagaaatatttgcctaacctgaggttgtgaaggtgttcatgttttttcccctagtagttctatcattacgttgtaaccacttttttttcttctttttttttttttttttgagacatggtctcgctctgtcacccaggctggagtgcagtgggacgatcttggctcactgcagcctcaacttcccaggctcaagtgatacaggcatgcaccaccacacctggttaattgttgtatttttggtagagacagtgtttctccttctctttttttttttttttagacagagtctcgctctgtcacccaggctggactgctgtggcgcaatcttggctcactgcaccctccgcctcctggattcaagcaattctcctgcctcagcctcctgagtagctgggattacaggcacgtgccaccatgcctggctaatttttgtatttttagtagagacggggtttcaccatgttggtcaggctggtctcaaactcctgacctcgtgatccatccgcctcagcctcccaaagtgctgggattacaggcgtgagccactgcacccggccgagacagtgtttctctatgttgcccaggctggtcttgaaatcctaaactcaagtgatcctcctgcctcggcctctcaaagtgctgaaattacaggcatgagccaccgtgcctggcctatctttgtaacttttgtgtttaggtccacagaaagttttgagcaaagaactaccatgatctgacttatgcagatgcttctggcatcactctgctgtgctgagcctgtggcaggcccgaaggcagacttcaggacgcctgtcggggacctttccacccatccgggcttggaccagcttgggcagagtacagttgggagtagaggccacattctggaaatgtttatcagcgagttttctggtgttaagtccttcctccctccttgctgaataataatcaactttatgaagttatttcctttctctgaagattgaagtgcttgcggcttcacatgaggccacgtgtatgtacagaattgtcttgagcctggagcaatgtttgctatgtattttaacttttcactgttttaaaggaaatagctggttttacgttttaatccacagattgtcattcttcagggatggcagccctaaacacagcatggcaactcatctactcactcatgaaagattaaaaaatggaaaccaacgtatttcatcttatgctctgcgtcacttctgctcggactcataaatccacgtctctttgctttggccacttcaactcatatccaagccttcctttaattcatgatttattgctgtaagttgcctcttttgccagatttataaactcactgttctttatataatacctactttgtacactaggcaacaagacagttaatttattgtctatgacttgttaccttgaaaaattacatcaatgcaaagtgattgccttttagcctccatagccaataaattcattttttttttttttttggagaggatgatgtcaggtcataggatgatatatataatcagtgagcaggcagaatgaggagacagttgaaagttctctacaacagaagccaagaaggaagccgtctatcttgtggcgatcatgtataagctggcctcctgctgtttgcttttcataggattcttaaatcctctcttatctcttcctctccttgactccagggaaatatcctttcaactctcaggtaagattttttttttccccttatgttagtcttgaaagagcctttactagtcttaaattcaatgttagagataagaatgggattcctgctcgaaggagtctggagtcttgttctctcaatagtcccagctttgaaaagaatattaaaggatccttactgcacattttagatgtagtaatggatacagttttttttctgtctctacaatgtaaaaggagaagaggataattgcttgtttcatgttacctctgtactcttgttttgggtaatatatacatttttccaattttaaaaattgcatgaaatttaaaacatcattacttttagtttttactttaaatgaactggttgaatgtagcactggttgttctaattatagattattaatggatttatttgtttcaccttttgtttaaaaaaatcatctgatatgtgttctacgaaacaaaaatgtttactaaaaattttttagtaaatgacaaactagggaactagggagttcatagacttccaagtatattgatcgtttccttttgatttatgttaattcagtttaagtctaagttgagttaaagaaatacacatcagtcaagtagtttctcattttgccattatctttccatttagttagagaaatgagaaagctaatgcttggggattaggttccatcaaaaacttaactagatttaatcttatctttaatcttgagtactttttaaataggctttttttaaataaagaaaaaaaacaaacaaaccctcttttaagccaaggattttatagtttctcgtctctaaaagttcatcccaagcagctttctgatgatcgtcaagcactgtcatcaggcactgccaaccaacttcccgagtcaccgagatgatcattggctgtcctactaatagttaaacactggcattaactttactgaatctctgctatttacaaagaaacagcacacatctcaagatgaaataagtgaaaatactcagctactactgtcatcttaaaaaattttacaagtaatttaagaaacatagatgaaatgagtgtagcatctcacacaaattcgaaacaagtggcagcttatcgcagaatttgttctcatttatttctccagaaatgtgctttcctatcagcatttacagatgatgaaattttatagattttcattaacagtctttagaagtgctgtgaatgtgctctgatgcctttatgatgatctgctcactgtcctccaatcaaggttgcagctatttgtaagcctgtggcacgctggtcccacacatggcctcccaccctgactcccacagcctcgaatcgcaacacagcagcaggtctgcacttaccacgcctcacactccggtgtgccctttccacacaccttaagcgcacttaccatgcattctatatgccatctggtcgaccacatttcacataggaaatgccacaatcaagttccttacagatgattttgaagccaattctaagtataataattgtattgaaatcttgaagttcagtaaaagaagaggtgataccatcctactggctttataggaagattgtaaacgatctttctttttcctctccaatgtcaccacccaaatatctaaaagcaaaaaggcagtaggcagcagtagataagcagaaatgagggagagtcagactttttgaaccaaaatggttttgagaaaggctgtggcttatccctcagctctcgttcgaggcagccgaggggcttggctcatcacgcgggtgtcagatccacgtctcccggcttcccattctgctggctggcacacgggctggtagcatttccacctcttctagaataccactgatgacacgtcatgaactcagcgttggaagtttttctagtgttcatctccctatctctggtgctcgccaaagacacaaggaacagaaataactaactgaaggatgaacccaattctaagtatctgtttttactctgtagcacctcatgaagacgcgcgcttaactccggaggagctagaaagagcttcccttctacagatactgccagagatgctgggtgcagaaagaggggatattctcaggaaagcaggtaaaatgcttctcatgtttatagcgtgtctgatttaattgctactgaacttaccgtctgtcctcatctagaagaggtaaagctctattttggaatataaagatgagctatataaaataagtaattaccaacactctcccctcccggcctgtgcaaccttcttttccccagcagctccttgctcgcactgtgctctttggtacctcagcattttgtctttctgtgtggacttttatttttgcggggtagagcttggtggtaattattccagtttccagtgagtgcaatttaaaatcctagtttcccgtttactgaaaacttaaagtaatctttctgtactccagtttcttaatctgtaatcaggaatgattaagtttccacctcagaaggtaacttgtgaagagtcaatgagtcaaggcaagtaaaatgctcgagtcacacagaaagtcattaataaaatgtcagcttattcccccgtggccacattcccccaagcattgacacatatgctcaggaagttctggaaacaaaattgagccttttgctgggtgcggtggctcacacctgtaatcccagcactttgggaggctgaggtgggcggatcacttgaagtcaggagtttaggaccagcctggccaacatggtgaaaacccatctcgactaaaaatacaaatatcagccgggcatggtggcgggcacctgtaatcccagctactagggaggctgaggcaggagaattgcttgaacccaggaggcagaggttgtggtgagccaagatctcaccactgcactccagcctgggcaacagagcaagactctgtctcaaaaaaaaaaaaaaaaaatttgagccttttaagataggtattgtttaatagacaggagttcatttgttataaaatatctttgacgagctactggactgcgaagttactgaggacaatgcagtgacttctgtgaattcgagataagaacaggagtgcctgtctgtctgcattcaagaaaagcttgctgcagtgtggaaaaagaccagaaactagacataatttagtaatattattttgtatattttaaaacaagcatacaagagaaacaacagatctgatgaactggcttcaaaactgtttttcagactcaagtaccaacatttttaacccaagaggaaatttgagaaaggtaagtgactctatttatgagttaggtttaaaaaggtgaacattctgtactggttttacaggactctgaattcatgaactagaggagtgttcttggtggaaaccacaccttaaaataattggccagcatgaccaggcgcggtagctcatgcctgtgatcccagcactttgggaggccgaggcgggcggaccacctgaggtcagaagttcgagaccagcctggccaacatggtgaaaccctgtctctactaaaaatacaaaaattagctgggcgtggtggcacctgtaatcccagctactcgggagactgaggcaggagaatcgcttgaacccgggaggcagaggttgcagtgagctgagatcgcgccactgcactccagcctgggggacaagaatgagacttcatctcaaaataataataataataattggccagcattatttcaaagcattaatttttccaaattttgattgatataagatctgaatgcaacaggaacctacccagtgcctgttttgggtaaatcaaataagttgtgaaagaatgaaaaaaatgggtgaggtccctgctctccagtctggcatccacttgtgctctcattcaccatctaacatgcggcccaccgccagcagcaccgggagcacctggaagccagtgagggatgcaggatcttaggcccacctaggacctgcggaagcaaaatctgcatcttaacaagatccccaggtgattcacatgcatgggaaagtgtgaagggcactgcaagacaacatctaatggaggaaggccatgctccagacattgacctgaacgatgtacagaaggccgggtgcggtggctcacacttgtcatcccagcacgggaggccgaggtaggcggattgcttgaggccaggagttcaagaccagcctgggcaacacagcgaaaccccgtctctacaaaaaatacaaaacttagccaggcgtggtggcatgcacctgtaatcccagctattcgggaggctggtgcaggaggatcacttgaacctggaggcgggggttgcagtgagaggagatcgcactacttcactccagcccggggaacagagcaaaactccatctcaaaagaatacaatacaatacaatacagtatacacaatacatacaatacacagaagacaatacatgcacagaacatgttactatttatttatttatttattgagacagggtcttgctctgttacccaggctggagtgcagtggtgtgatcttggctcactgcaacatccacctcccaggttcaagcaattctaatgcctcagcctcccgagtagctgggactacaggagcccgccaccacacccagctaatttttgtagagacgaggtttcatcatgttgcccaggctggtctcaaactcttaggctcaagtgatctgcccacctcagcctcctaaagtgctaggattataggcatgagccacctgcccagccgctgaaatgatttaaatagaaatcggtcaatgagggtttaggaaaattcaggacaatcgctgggctgaacagactggaaggacactcattagaggtagggaggtgggcacaggagccccacgggcccgggacactcttgttacaattatagtccagggaaaaatgcaaatacttttaagaagtccagtgtcttgactcaagattcctttttcttataggaatcgtcactcgttggtaacttatctgtttttttttgttgttgttgttcgtttggattgttttagtttcaggatttctctggacaagatcctaacattttactgagtcatcttttggccagaatctggaaaccatacaagaaacgtgagactcctgattgcttctggaaatactgtgtctgaagtgaaataagcatctgttagtcagctcagaaacacccatcttagaatatgaaaaataacacaatgcttgatttgaaaacagtgtggagaaaaactaggcaaactacaccctgttcattgttacctggaaaataaatcctctatgttttgcacatatcatgagtggttattttccctataaacatgtcctgaaaatttataattattcttttcttccatttatccttagaaaattctttgacatttcagaagcaaagctaatgaatgaacagaagcaaacactaagaaaaagtcacaaaagttaaacttttgttaaatggcaaatcatttaaataaactacattatcttagctatgatgtcctctcaaccttttaaaaagacaacatattacttttaaaaaataaatcacagccaggcacagtagctcacgcctgtaatcctagccctttgggaagctgaaatgggtggatcacttgagaccaggagtttgagatcatcctggggacatgacaaaaccctgtctctaccaaaaatacaaaaattagcagggcatggtggcaggtgcctgtagtcccaactgctcaggaggctgaggcacgagaatcgctcagacctttggggtggagcttgcagtgagccgagatcggaccactacactccagcctgggcaacagaggaagagtgtcttgaaaataaacaataaaataaataaaataaaaaataaaataaaacaaaataaaaagaaaacagtatcttggcttggaaaaaatctctagttacgggtgtctgagatgaagggcgggagtgtctgatgctccttggtttctgaagttcgtgggggaagttcatgtgctgagattctttctcttggctgaccaaagtcctgaacacttgacaattttaatcttttaacattgaaacttgtatgatctcagcgtctgtgagctcaaggatcacagtttcttacaccgggaaaaacaccttgatgtctcttgcagagagaagaaagctgaggcaagatttaagattgtggaagaaagagcctggcttacgaatttttaaaaactatgtgtgtaagtactgacttctattccgtgaatacatctgtataaatgtggtttatgtatgtatagaatatacagtgtgaactcctgagagttctgtgtggttctacacagaaccatgtataggggaggcctggatgtttatgagaaacttgtttctctcattgagctctgacatcccaccacattccagaggggtctgcaacaaccaaagagcaacacacgacttgtgtcaatcttgtcactgaccatcacaagtttcctagagagtacaggtctcagagagtttaccctaaagacatcaagaacttggccgggtggggtggctcaagcctgcaatcccagcactttgggaggctgaggcgggtggatcacgaggtcaggagatcgagaccatcctggctaacatggtgaaacctcgtctctactaaaaatacaaaaaaattagccgggcatggtggcgggcttgtagtcccagctactcgggaggctgaggcaggagaatagcgtgaacccaggaggtggagcttgcagtgagcggagattgcaccactgccctccagcctggcaacagagcgaggctccgtctcaaaaaaaaaaaaaaaaaaaaaagacatcaagaacaaatctaagggagagatgttttaaactggaatgaatgtgcaagctcagaaacatgctaacattgaggacagctatgataacactgtggtgtgtctctcagtgttgaaattaaaccagttctctggaacacaatgttggcaccataaaactattcctgtatcagagataacttaaaagtggaattccactgcagaattctgaagtccctactcattttagtgtatcaggtgatgattcatacagattggggctttgcatcaggtttctagggtcagattcctactcccagtgcacaccagctgtgagtctctgatccagttacttgactccccctgcctcagtttacttctctgtaaaatgacaataacacaatgcttatttcacagggcagttgtgaggattaaataattcacatcaagcacttagaccagcacctgtcagagtagtatacacgcaaagtatacttagctatttttcttcctgctcttattatggtttgttatagaaaagaaaggtgcaaatggtctgaaaggtgtaaactttaaaaagctctgttggcttcaggatcttgttccctattttaatttctagattttgttgccaccagttacacagtcagatcttgtacacaggttcaccctagctcccacaagcttagcgttccaataatggaacactaggtgtaaaagggctaaataagccaatacatttcaaagtgcctgcatcttcatcctccacatagtaggtgctcagacacattggccaaggcaaacacagaatgtgcctgagaaacacaaggttaactaatatgagggcccctcaatagatcataagaagcacttctaaatgatacagaatacacattcaaagatttgttgacacagggcaggacaatttctcacgttttacatgtacagagtttatttgttgtttttacttaaaaagatacccaactgaaatattactaatgattaaaaacaaattcagagttaattacaaattcagttgaaacaaaatttcagtttggattaaatttacactgtgaattacaatgaagtgtcactcaattgcaaaatgatttccattcatacagcattttgtttttcataaattttgacctctgaccaaagaaaacacagctttttgggtaacattcatgaaaacattgaagcctataatataaatttttattaccactttcaatagtcattaatataaaaagttaacaaatttaaacaacaaagtttaagctggggagagccccctcggggggcatcggtcaagctgctgaaccccctgctcaccgccagcagcaggtgcaacctgggagtgcgtgaatgcgtccacccacaggaggagcgctcctcatgctctgacagttctgcgacaagcaccagtttcaaatcaaacctagtataacaagtactccataaaacgtgtgctaaggcaaagaaataagcacatttggataatacaaatatccagaaacaatggaaaagaaaggcttctattagagaacagaaggcttagcatatatgagtgcgcaatgatcctgatagctacggatactgtttttatttacagtggcaaaaactttattactacagaaggtcactgacagacaatctactggctggttaattgtttcaaatttgattctttatcaagcaaaaatatcacacaacctgatcaacacacacacaaacgcttcagaaatcacttaactatcaagatggagcagactatgagagctatttataaaacacgaatatttgcatggaactgcttaatatcagaaaattccaagaactgtcaaaggcagcatttgaaaatagttctgacaccttaagatggaattaccatccagaaagccactactttgaaaggaaatctgagctatgaggatggtcatcatggatgaaaaggtcgattttcctaatcattatcaggacgcatttacaaaaagctgtaaaacttcaaaggagaaaagtattttccttaaaaaaccataaaaaaccaaaaacaaaaaaaggaaaaaaaaataaattagtttgttgcaagttatataaagacaacaggttactgtaaccctcattttcttctatttgttttttctgatctgcaggggtgtgaatttcatctatcattccaagtttaagaaggaatcagggacttctctaaaaagcaccagagagtgagctgatttatcaagtaaacaatcacactcacttcttaaaagacacaactacaaacgccatagaaagcggtgactgatggagcctgcaggaccctgtgggcgaggacaactgggctcgcctggacgttttctcttttgcagtccccacaacactgccctgttcaagggcaaacaaaaggcagtgccagtcagacctgtggtagggctggagcgacctcttttgtataaattgattggaaagaaagagttaactgttttggtaagaatgaaaatttaaacacagaagtatgtaagaatgatactagcttttacattacttgtaaaacattttacaatcattattttaaaaacaaaaatactcaaaagggcaacagcactgggtaagaagctctttcattttaatattacacatgcaaatgctaactgaaacttacaagaataggcccatggtaagcggatcgatttttaagataagactttcagaatttcactggaaggtgggaaatcaataggaaagggatctacaaggatgaaggccaaaactcaacccccaaaacctggttatcccagatatgctaatggacagtatgtgctaatgtgttgtgagaaaaccggaatgtttcatcttaattatggaggggaacgccaggttgaatgaagcctgtatgaacgtactacattcatggaaaccattatgaaaagtacacaacctgtaggtggcatttcttcaagcactctaaggggaaaatgacttatgtaacagaacaaaataaatgaggctaaggtttggggctcattctagctatacttctaattataatttactctgggtgacatctgaaataaagatacacatacctctttagaggccatccaatctctttagaagacaattcaactacaaaaagagcctaactggccattttaatatatcaggaacaaagagaagtaagattctgtatacaatgtctgcttcaaaaagattacgtgtattaaaaaatcaagaagaaaaaatcttaacattcaatgataacttcatggtcatttaaaagtccaggacttaaaaaggtctgtctgtgtaacacgtcttggaaagggtatgaaggttcatcctcacagtcactcaacagctgtcttctaccagaacctgaccacaggatgtggccgcaccatcagctgaatcttcattttcacaagtgacacaggcctccaaaaaagaacaaagcaggcgagttacttgatgtcaatgtcacctaaagagttttaaaacagtaaaaggctggtcacatgtttctaaatccccaacttattcatgtctgaaaatatttcattatagttcattctttattattattataactatttttatttttttttttgagacagagtcttgcggtgtcacccaggctggaatgcagtggtgcgatctcagctcactgcaacctccgcctcccaggttcaagcgattctcttgcctcagcctcccaagtagctgggaccacaggtgcccaccaccgcgcccagctaatttttgttttttagtagagatagggtttcattatgttggccaggctggtcttgaacccctgacctcgtgatccgcccaccttggcctcccaaactgctgagattacaggtagtagacaccgcgcccagcctcattctttattattaaaaggcaaatgacaaattgtttaaatacagtcatgtgccacatgacgtttcggtcaaaaacagactgcatatataatggtggtcttgtaagattatcctaccacatttttatggtaccttttctatgtttagatacacaagtaacactgtgttacaacggcctacagtattcaggacagtaacagctgtacaggtttgtagcctaggatcaaaaggctgtcccatagggcctaggagtgattgtagcaagctactccactgaggtttgtgtgagtacactctaggacgcttgcacaaaacatccccattactaagtggtgaaaggactgtgcttttgtttaaattgctgtggggctcatttttcatatacctgtctatttacaaccagaacaacactgaaaaaaacaaagacacttacaataaccagcccagctcctgctttttggtgagaccctacccagccattcttacatgacagacactcattcttttctttgaaaatggagatggggagattattctgggaagatggcagagtaggaagactaggactctgtctcctcacctagacaacaactggactgacaaaatgagtccgaggtaactatttggaactcgagtctatctgaacgcctgcaactttctaggaaatgcttagacggtaagctgtggttgcctgtggtcaatttcagcttgaagcacagcagcaactacccatccctgaccttggacaaggcacgtattcctggagcagcctgcacacagcttgtgggagtcagagtgggcaataaggaccccgtcttccaacaatcataaaacaagaatcaataagccctgggaaaggggagaatctggtttccagaattactatgttattagattcaaatgtctagttttcaaccaaaaaaaaaaaaaatcattaaggcatacaaagaaacgccaaagtacagccccagcttgtgcgacccccttcctgcccatgggccacatgcggcccaggatggctttgaatgtggcccaacacaaattcataaactttcttaaaacattttgagttttttttagtgatttattattttttagctcattaactattgttagtgttagtatactttatgtgtggcccaagacaattcttcttcttacaatgtggcccagggaagccaaaagattggacacccttggtataggccattcaaagggaaaaataaaccaatagcaaaagtctctgagaaagaccagatgaaagaattgcgagacaaagattttaaaacaactgaaagatgatcaaagaactggtagggcacagtggctcacgcctgtaatcccagcactttggaaggctgaggcaggtggatggcttgagcccaggagttcaagaccagactgggcaacagagtgaggctccatctctgggaaaaaaaaaaaaattagccaggcatggtggtacacacttgcagtcccagctacttgagaggatcacttgggaccaggaggtagaggctgcagtgaactgtgatcataccactgcactccagcctggatgacaaagtgagactgtcttaaaaaaaagaaagaaaaagaaaaagctgggtgcggtggctcatacctataatcctagcactttgggtggctgaggcaggtggactgcttgagctcaagagttcaagaccagcctgggcaaagtggcaaaactccatctctacgaaaattaaaaaattagctgggcatggtggtgtgtgctagctactcgggaggctgaggtgggaggattgcttgagcccaggagactgaggctgcagtgagccatgatcatgccactgcactccagcctgggtgacagagtgagaccttgtctaaaaaaaaaaatagaaaaaagaaaaagatgatgaaagaattaaagaaagacatggagcaaaatcaagaaaacaatgtacaaacaatgtaaatatcaataaagagatagtaaacctaaaaagaagccagaaagaaattccataaataaaaagtacaaaactgaaatgaaaaattcactagagggattcaaaagccgatctaagcaggcagaagaaagaatacacgtatgaagaccggacaattgaaactgtcaagtccgacgaacagaaagaaaaaagactgaagaaaagtcaacagggcctggaggacatgtgggaaaccatcgagtggaccaacataagcactacaggggccccagaggaagaaaaagagaaagaggcagaaagattattcgaaaaaataatggctgaaaactccccaagtttgatgaaaaacatgaatgtaaaagtccaagaggctaaatgaactccaactaggatgtactcagaactcggagatccacactataattaaataccgtgcagtcaaagacaaagataatcttaaaagcagcaagggagaagcaactcacacatgcaggagattctcgataagattatcagcagatatctcatcagaaactgtggaggccagagggcagtgtcccagtgtattcaaagtgcttaaagaaaaaaaactgtcaactaagaaatcctttggccaaaagtaagggagaagtgaagacattcccagacaaacaaaagccagggagtttgataccactagacctaccatccaagaaatgctaacaggagtcctgcagggttgaaatgaaaggacactgacagtaacctgaagctgtgtgaagaaatagagatctcagcgaaggtaaatattatgattgcaacgacaatgtgcaattccactttttgttttctacatgatttaagaaactaatacattcaaagaaaactagtagtctataaaatccagtattattttaactttgatttgtaatctcatattttgctttctatattatttaatagattaatgcataaaaataattatgtttttggaaacacaacgtataaaaacctaatttcataacttcagtaactgaaagaagatggagatggagctctacagaagcgagtttttgtaggttatcaaagttaagctggtataaattacacactggagtgatatgttagaatgctaaacgtaatccccatggttatcgcaatgaaaatagctacacaatatacacaacaggaaatgagcagggcattacatttcacttcaaaaaaccaactaaacacaaaagatgacagtaatgcagcaaatgagggaaaaaaaaatctttatggcacatagaaaacaaatagcaaaatgccacaagtaagtccttctttaccagtaattactttaaatgtaaatgggctaaattctccaatcaaaagacagagattgactgaaccgattttgaaaggcactattcagatatatgctgcctactcactttagatctagatacagataggttgaaagtgaaaggatgtaaaaagttactacatgcagatagtaaccaagagagtaggtacgtctgtaagtcagtcacaccaagacaaataatgtatgattccactcatatgaggtgtgcagagtagtcaaattcatatggctcttgcctgtaatcccagcactttgagaggctgaggcgggcagattacttgaggtcaggagtttgagaccagcctggccaacatggggaaaccccatttctacaaaaattagctgggcatggtggtgtgcgcctgcaatcccacctactctggaggctgaggcaggagaatcacttgaacctgggaggcagaggttgcagtgagccaagatcacaccactgcactccagcgtgggcaagagagcaaaactttgtctcaaaaaaaaagaaaaaagagaaagtagaccagtggttgcaaagggttgggagaaggaggaatggggaagttattgttaaatgggtacagagtttcagttttgcaaaatgaagagagttctggagatggatggtggtgatggttgcataatgtgaaaatatttaatattcttgaattatatacttaaaaatagttcagaaggtaaattccatgttatgtgtattataccacaataaaaatgttagtttttaaaaagagggggtagtaggatttcattgtcttgcttacttcataagccttaatatcatactttaacacctaactttactctcttttttaaaaatatttttacacacacacacacacgaattatttgtcttttttgagactggctggaatgcactggcgagatcatagctcactgtagcctcaatttcccaggctcaagcaatcctcctgcctcaacctcctgagtagttgggactataggtgcacgccaccacacctggctaattgttttgatttttattagagatgaggtttggctatgctgcccagcgtggtctccaactcctgatcctctcaccttggcctcccaaagtgctgggattacagacgtgagccactggactaggcctacttgttattaacttgactcttcaacctcccatatcttgatacttgcgggaataaagatctcactactagtacaaccatcactaccattaccacagctgccaccaacactggttgggaccattggtaaatcaaagctttactgttcaggctattcacaaataatctcattgagaagaactcataacagcaaaaagacacttaagtcccattaaagtttctgcttagtatgaatactacctctggtgtgaatcttacatctttttttaactcttttcaaacaatgcagacatatttgaaatacataacaaatgacctatcaaatgcagtcaatcacacatcaaagcaggtgtttttactctttatcgtaccctaacattccaactggtagaagaaaaaaccacctggaggcaaaaagacctgtattcaaaacccaatgaactgcatggccttgtattaattatttcacatgtgtataacctgcttgttgcttattggtaaagagggaataataacacctaccatagaggtaaactgtgaggattaaagtttttagtgggatcatgcaagaacacgacctatattaaaagcactacctggccaaaatacatgagtatatgacagccattattactgtgcttacttgaatgtcgatttcttgagtgacagtctggctttgaatccaattatacaccttagccagctcctccttttgcccatgagaaaactggggctgctgctgcctcatactttctagcttttccaggtcttcttttagtacaacttctttaaccctgaaaacaaacaaacagaatcttaatagtcctgaataagacacagggttcttttcccgtcatctaggaatagcacttcttcttggttggtaatacaccttacattttctaacacatgaggcatacattaaaaaaataactagatcatttccttttcaagttggtaaaggcttttttcttggtggaaaatatctatatgatgttttaatgaggtgtatggaagaaagagatttcccttagctctttttagaaggggcaaaaaaatcaagagtctaaaacaaaaagttcttgtacttgtgtgccatcttg

SEQ ID NO: 939 - DNA, 642 bp, Homo sapiens
gatgatgtcaggtcataggatgatatatataatcagtgagcaggcagaatgaggagacagttgaaagttctctacaacagaagccaagaaggaagccgtctatcttgtggcgatcatgtataagctggcctcctgctgtttgcttttcataggattcttaaatcctctcttatctcttcctctccttgactccagggaaatatcctttcaactctcagcacctcatgaagacgcgcgcttaactccggaggagctagaaagagcttcccttctacagatactgccagagatgctgggtgcagaaagaggggatattctcaggaaagcagactcaagtaccaacatttttaacccaagaggaaatttgagaaagtttcaggatttctctggacaagatcctaacattttactgagtcatcttttggccagaatctggaaaccatacaagaaacgtgagactcctgattgcttctggaaatactgtgtctgaagtgaaataagcatctgttagtcagctcagaaacacccatcttagaatatgaaaaataacacaatgcttgatttgaaaacagtgtggagaaaaactaggcaaactacaccctgttcattgttacctggaaaataaatcctctatgttttgca

SEQ ID NO: 940 - protein, 122 aa, Homo sapiens
MYKLASCCLLFIGFLNPLLSLPLLDSREISFQLSAFDARLTPEELERASLLQILPEMLGAERGDILRKADSSTNIFNPRGNLRKFQDFSGQDPNILLSHLLARIWKPYKKRETPDCFWKYCV

SEQ ID NO: 941 - DNA, 781 bp, Homo sapiens
gagctagagactgccggtgccttcatgggcaggactaggccgaaaactccccagattgtcattcttcagggatggcagccctaaacacagcatggcaactcatctactcactcatgaaagattaaaaaatggaaaccaacgtatttcatcttatgctctgcgtcacttctgctcggactcataaatccacgtctctttgctttggccacttcaactcatatccaagccttcctttaattcatgatttattgctgatgatgtcaggtcataggatgatatatataatcagtgagcaggcagaatgaggagacagttgaaagttctctacaacagaagccaagaaggaagccgtctatcttgtggcgatcatgtataagctggcctcctgctgtttgcttttcataggattcttaaatcctctcttatctcttcctctccttgactccagggaaatatcctttcaactctcagcacctcatgaagacgcgcgcttaactccggaggagctagaaagagcttcccttctacagatactgccagagatgctgggtgcagaaagaggggatattctcaggaaagcagactcaagtaccaacatttttaacccaagaggaaatttgagaaagtttcaggatttctctggacaagatcctaacattttactgagtcatcttttggccagaatctggaaaccatacaagaaacagagaagaaagctgaggcaagatttaagattgtggaagaaagagcctggcttacgaatttttaaaaactatgtgtg

SEQ ID NO: 942 - protein, 136 aa, Homo sapiens
  VARIANT (1)...(136): Xaa = Any Amino Acid
MYKLASCCLLFIGFLNPLLSLPLLDSREISFQLSAFDARLTPEELERASLLQILPEMLGAERGDILRKADSSTNIFNPRGNLRKFQDFSGQDPNILLSHLLARIWKPYKKQRRKLRQDLRLWKKEPGLRIFKNYVX

SEQ ID NO: 943 - DNA, 895 bp, Homo sapiens
gagctagagactgccggtgccttcatgggcaggactaggccgaaaactccccagattgtcattcttcagggatggcagccctaaacacagcatggcaactcatctactcactcatgaaagattaaaaaatggaaaccaacgtatttcatcttatgctctgcgtcacttctgctcggactcataaatccacgtctctttgctttggccacttcaactcatatccaagccttcctttaattcatgatttattgctgatgatgtcaggtcataggatgatatatataatcagtgagcaggcagaatgaggagacagttgaaagttctctacaacagaagccaagaaggaagccgtctatcttgtggcgatcatgtataagctggcctcctgctgtttgcttttcataggattcttaaatcctctcttatctcttcctctccttgactccagggaaatatcctttcaactctcagcacctcatgaagacgcgcgcttaactccggaggagctagaaagagcttcccttctacagatactgccagagatgctgggtgcagaaagaggggatattctcaggaaagcagactcaagtaccaacatttttaacccaagaggaaatttgagaaagtttcaggatttctctggacaagatcctaacattttactgagtcatcttttggccagaatctggaaaccatacaagaaacgtgagactcctgattgcttctggaaatactgtgtctgaagtgaaataagcatctgttagtcagctcagaaacacccatcttagaatatgaaaaataacacaatgcttgatttgaaaacagtgtggagaaaaactaggcaaactacaccctgttcattgttacctggaaaataaatcctctatgttttgca

SEQ ID NO: 944 - protein, 122 aa, Homo sapiens; identical to SEQ ID NO: 940

SEQ ID NO: 945 - DNA, 653 bp, Homo sapiens
tccacagattgtcattcttcagggatggcagccctaaacacagcatggcaactcatctactcactcatgaaagattaaaaaatggaaaccaacgtatttcatcttatgctctgcgtcacttctgctcggactcataaatccacgtctctttgctttggccacttcaactcatatccaagccttcctttaattcatgatttattgctggaaatatcctttcaactctcagcacctcatgaagacgcgcgcttaactccggaggagctagaaagagcttcccttctacagatactgccagagatgctgggtgcagaaagaggggatattctcaggaaagcagactcaagtaccaacatttttaacccaagaggaaatttgagaaagtttcaggatttctctggacaagatcctaacattttactgagtcatcttttggccagaatctggaaaccatacaagaaacgtgagactcctgattgcttctggaaatactgtgtctgaagtgaaataagcatctgttagtcagctcagaaacacccatcttagaatatgaaaaataacacaatgcttgatttgaaaacagtgtggagaaaaactaggcaaactacaccctgttcattgttacctggaaaataaatcctctatgttttgca

SEQ ID NO: 946 - protein, 135 aa, Homo sapiens
MNVFHLMLCVTSARTHKSTSLCFGHFNSYPSLPLIHDLLLEISFQLSAFDARLTPEELERASLLQILPEMLGAERGDILRKADSSTNIFNPRGNLRKFQDFSGQDPNILLSHLLARIWKPYKKRETPDCFWKYCV

SEQ ID NO: 947 - DNA, 26933 bp, Mus musculus
cttgagtgcagactgcagacatcctctgtcttcacaagcacggcttctcttgttttcttccctgcttctgtggtttctacccactcaaagactgttacctgctcaaggtcacaaacatgttttcctgtgtttcctctggcttttgtaggttggggcatttacagttatagctatgcttcatccgcctactggatttcactgcagtagctacagatgtcagaacacgctgttgatgtctatgcttttaatgctattttgttgctattgtttttcatatgaagtcccactgtggagctcaggctggcctaaaaccttcttttataagctcctccccaaagtggtgagattataaacccagtttgctattttttaagagatttattttatcatttgtgtgtgtgtgtgtgtgtgtgtgtgtgtgtgtgtgaacctgagtgcaagtgcccatggaagccagaagtgagcatcagatcccctggagttggagttacaggtggttcgagccgtccagtgtgggtgctgagactgagctctggtctgctgcaagaccagcaagtaagtgctcttaaatgctgagccatctttccagtcttagaagcccaccttctcagacagccagctctctggataaagcgtaacttcctgtctctgtacatgggcctttatggtgacaggctgtgtgaggtgtaatattccggatctagtcacacttttctgctctggaggtgactggtagtttccagccaaatgctagacaccactttggctacttgatgagccgcattctgtggggtaggcgatgcatcctctgagggaggctatgccttgtgctagagcacagccagcagcttgatgctcacattgctctccctacagcgccctctgtggtaaagctgcactctgactttctactgagcccagccttcccagggctcgccggcttccaaagttactcctaaagtagtcctacactggttcttggaagctctgtgagtacctacatcccacagttatacagtggcttgctgtccaggcttcgggaatacactcagcacacacagttgaccacctgtgtgttcttgctacctcctttctgagcattgtttaagtatcactgagccctgccttgtcaacccagcaaggcctcatgacctgttaagctcttcccagctcccagcctctgtgtagacaccatgagcccccactaacactaaccctgactcttaactctgtgcagaggccatgagcccccactaacactaaccctgactcttaactctgtgcagaggccatgagcccccactaacactaaccctgactcttaactctgtgcagaggccatgagcccccactaacactaaccctgactcttaactctgtgcagaggccatgagcccccactaacactaaccctgactcttaactctgtgcagaggccatgagccccgctgacactaacccatgactcttgacttgagactcttctcttaaagttcatggtttttcatattgctcaatttttaaaaacagttgattcatgcattttcagttttaaagaaacaaccacttacactccccgcccttccttcctttttttttttttggagacaggatgcctttgtgttgggattggggacttctctatgtagtccagcctggccctgaactcaaaatcctcctgtctgcacccagagtactgggatgggtatgtgccaacatgctagactctaccagttctcttttgatgggtttgtgcactgtttctagcatgcccaccggtctcagggcagacatgttgtttctagcatgcccaccactctcagggcagccacatgcatcactgcactggcactcctcatgctaggagctgatttaaacatatagcttacctacttataaacaattttccagacaggtttccttgcagggcagttctaacgggatagggctgtccatggagctgtaatgcactgtcctcttagccttcatggggtggccagtgttgaccactggatgctctttccagggactgctctgcctctccttcccaagatgaccacccttgccttcctcctccccaccttcccagatacctttgcctctctgcagaaggcagatgctgcccacacctgcctaatttggaccccagggtcttttgcagttcccagaaacttccatgtatcaacgacacatggctcttttctaggtccaatttccaccagaatgtcaggggtccatggcaagaggaccctcttgactggtccctcttctagggcttctccttgagctgtcctaggagtaagatctggcagaggctcagctctgccaacatgtcttggtttagggtgcctctgtgtgaggtgggggactggaggaacccagggatattgtgaaggctggagaatgtagacaggttggttttgctactacagggccagggaagctctaaggaggaaggcacagagatgctagagaggcaagtaaagtctctgggatagcaataagacaagataaacaggaacagcagggggatatgagggtggaactgaacccaaagaggcactggaggagtagtcacagactgtggctgggcaagcagcaggggtgggtgagaagcatccaaggatgaaggagaggggaggctgtggtgttctcatagcttgtaatgtacccctaagcactgcctggacaccggtgtggatggagggtgtatttatgggcccaggacaagacagcatggcaggagagagtggattcaaagacttctaccgaggtgggttccgggaacccagagcccataggaagtagccagaaaggtcaggtgtggacagttggcttctgccctggtccctgactctaggtagtcccagaggaacgtagccaaaaataagcaggggctaggtagagaagagggctactgtgaacaccagactgagatgtgtcaaggtgtctgtccgaggcagcagcccagagcttggagcgggagtctgatccagagatcaagggcggctgtcacgctctcgctcctgctgtttcagcctctgaatcctggaaagccccaggctgctgatctctgtcacagcttcctgacgatcgattggcagacgccagatctttgtcttctttgtaggtcctggcctccttttccagtccacctccatcaggacagctggagcagaagccccctcccgggtctcatccttcccagcactgctccatctctggtggttgacttcctccattcttacctctcaacggttccctcctgcatgaccttagagtacagagtgtctgtgttcatggctggcactaatggctcccggcatgcatgactaacactgagcccgatgattcaacttgtgccattaacagagaatgctcttccctcctcttcctcatccttcagaagcccatttgccatgtacagcccataacccaaccatggcaatctggctcttaggatgggtcctagggacgcccgaggtgaggagaacactaggaccttcttctaggatggaggttaaatctgtttcttccaagttactactcatgctcactacaaaagaaagaagaaataccatgggggaaattccagatgctggaggccgtcctgatgagggtcagcacaccagggtgacatcacactacagagatcagggtgggactaggggaagtcctccagaggatggctgggtgacagggataggatttggggaaacgctctgttttggatcttctgcccctatgggggtcagaggctttgcatgggcaattgtgtctgtgatcagatctcctctgccttagcttcccatctgcagcatggagaagcgttgcacccagggtaccctccacaacccctggatcaggtgggcacctggcaggagattggcctcggggcctctgggctcagggtctgggtacagccaaagggatcagggtggttgtaaatggagacagaaggcaaaagcccaggcatgttggcatccctctatctgtcaggtggcagaaataagagggtgaagccagcaggtgatagccagtagagaatgctttggtggtgggtaagacccagagccagtctctgctgtctggttttgtcactgggggcctgaacagagccatctggtgataggcatgggacagcctgggttgaaccagtcaccccagtttttattcaagaggctatgaggtagtcctacacagtaatctttcagaggttgaagagttataaggagtagaaatgggcctcagagaacatctcaatgaagacactctgtttaggtccatattcaccatggataacatctaggggacacagacccaaggcttatatgcttgtgtcccggtggtggagggatggtgtcttagtcagggtttctattcctgcacaaacatcatgaccaagaagcaagttggggtggaaagggtttattcggcttacacttccatgctgctgttcatcaccaaaggaagtcaagactggaactcaagcaggtcagggagcaggagctgatgcagaggtcatggagggatgttctttactggcttgctcagcctgctctcttatagatcccaagactaccagcccagagatggcaccacccacaaggggcctttcccccttgatcactaattgagaagatgccttacagctggatctcatggaggcatttcctcaactgaagctcctttctctgtggtaactccagctgtgtcaagttgacacaaaactagccagtacaattgaccccttgtcaacttgacacacaaacacatcactagtaagcctcaacccttacattcttattcatccccaaggtctaaacaactttaaacatcccacagtctttacatattcttaaaatttcaatctctttaaaatatccatctcttttaaaatccaaagtctttttacaattaaaagtctcttaactgtgggctctactaaaatagtttctaccttcaagagggaaaatatcagggcacagacacaatcaaaagcaaaaatcaatctccaaccgtccaatgtctgggatccaactcacaatcttctggactcctccaagggcttgggtcacttctccagccatgccctttttagcacacgtgtcgtcctctaggctccagatgcctgtactccactgctgctgctgctcttggtggtcatctcatggtactggcatctccaaaacactgcatgaccccttcagtcctgggccttcaattgcaactgcggctgcaccttcaccaatggccttccatggcctctcacagtgtcgagcctcagctgctctttgtgaccccttcatgccttcaaaaccagtaccacctgggtgacccttacatattaccaagtcctgctgcagcaggagtacaaccttggccatctctggaacacagcctctttgtgctttcagaaaacacttcccagaagacgtcacctcaacgatgctggtctcttcttaatcaccgctaatttcttagctccagctaaccagcctcaattgttccagtaatgcaaagtttttgctttagtagttctggtatcttgttaatcacagctgattcttcagctccagctaaccagaaccacagaatcttcataatcaaaacagaaatggccctgaaaagagtctttaattttccctctgaaatttcacaaaccagacctccatcttctacactgttctcaacattatcttccgagctcctatacaacatctgacagagctcttaacagcgaatggatcttcaagcccaaagttccaaagtccttccacagtcctccccaaaacatggtcaggttgtcacaggaataccccattctgctggtaccaatttgtcttagtcagggtctctattcctgcacaaacatcatgaccaagaagcaagttggagaggaaagggtttattcggcttacacttccatgctgctgttcatcaccaaaggaagtcaaaactggaactcaagcaggtcagggagcaggagctgatgcagaggtcatggagggatgttctttactggcttgctcagcctgctctcttatagatcccaagactaccaacccagagatggcaccacccacaaggggcctttcccccttgatcactaattgagaagatgccttacagctggatctcatggaggcatttcctcaactgaagctcctttctctgtggtaactccagctgtgtcaagttgacacaaaactagccagtacagatggacaactgggtatttcccactcagccatgcactacatgatgtctgtaagtcctgtatcttgctcctgatttcccaagaggatgatgatcttggattgtgcatcactgggaatggtggcttgggagcctagtggaggtcttgtggggctgtaccaggctcagggatctcacctacctcatcagaatcctctggcttcccaccctggggcatgtctctgagagcccacagatatggaaacatgcttgcagtccagagccttctgtgtgttctgaggtacctatgagctgtggggctttggccatttcccagtattcatctgtgggatggggtaaaatatctgcctcctcactagatacccccacatcactgtgttggactgtcagaggctgtccactctgcattgtctactacagaggcacacagatggctgtgtggaacagcctctgtaacatacggcatactcttctgtgtccctttggggtgggattctggaggactgtggactagaacattggctagtttcatgtcaacttgacacaagctagactcatctgaaaggagggacttacagcccgtaagatcaggctgtaaggcattttctaattagtgactgatggggagggttcagctcattgtgagtggtgccatccctgggcttgtggtcctgaattttataagaaagcaggctgaataagtcatggataacaagccagtaaggagcatccctccatagcctctgcatcagtttctgtctctaggcatcagccctttttgagttcctttcctgacttcctctggtaacggacttacaatgtggaagtgtaacccaaccaaccctcgcttcctcatgttgcttttggttatggtgtttcatcactacaatagtaaccaaaactcagagtcaaaacccagagagagctgtcgttgggtcagggccaggtgtcctctagcctggctcacagggttcattggaacagggtgtgttgttctgggtgtgggcaggtcccagctatgagggaaatcagtccagggccagccaaacctatgagggtggtgaccgattcagctggagcaataatttgtggttagttttaacggtcagtcgaggggttgagagacgcacagtagccctggtcaaagaatcttggaggagcttcatgttctgtgcgcctttggggttccttatttctctttggagcctcgtgaccaagccagctcagccagtcaacagggtctcaagggagggagtgagtattgaaaaagaaaacagacaacactataacctgactccagcccgtaccgcggctgaagcagctgtttctctcccgcctgcttttatatcattctaggtttatgcaacaaaacaaaacaaaaacaaacaaacaaaacccatggtcagttcttagatcaaagacaaagcaaccaagtaaacaagtagtaaacaaggagaccacacaagagagtgaccaaggatgtgacaagtagtaagcgcaaggatgacacaaggctaacgttaagtggtcagcaaagcagtaaacaaagccccgtggtcattgtttctgacatgccgacttctttgtctgagcccagtgacagatgccagattcctagaagcaccaaaagctctcaacagcctaggtctgtagtaggcccccaccccatgacctcagccagtctgtgggctgaggaagcccagcatactaccctgtagtcctactcaaagcccccatcctcatctgcaaaaggaaaattagtctgctccgcctagtccctctcaggggccagttagagaagcccatagcctgctcaaagatgataagaaaccctgcttcacccttagaagataaagaaggctggctcctgttcctagcgccgaatgtgctcagaagcgtataggctgaagaagcgggcagtgataaattggtaatggggataaccctgacgtggtgtctgggaagtgactggaagcttaaagggggagggtccggtgagaggggtgagttgggaggtgggtcaaaagatcaagttcccagttccctgaggctgagaggttcctatttcagtttgtctgtcagaaaattcaaggtaagcaccgaggtgtttgtagtgacctgggagacagacatacttccagagagtatatatacaggctgggaaaacttgctagtgtccctgtatggagtctgaagctgaggctctgtttggactttagggccctcccagcaccacgccccgtgtgtacttaatgtgctccatctgcctctaacagacttcagtcagagagactattttttctttcattttcacttttccttgccaaggctcatgagagtgtgtgaggaggttcagagcccatggggctcttggcctgaagtttcttgatcaagaaaatggaacctctcccaggatgggggtcggcaccctggagccaggcccctacagacaacaccttcaggctggtgagttcccgagccctttacagcctccaagctccttccggcccaactccagccacagcccaccccagacatttcctgtcccttagctctgtctgggcagctagctcacggggctttatgctgcttggatctgcaaatctctggagataattgataacaacctcaggttgggaggctacaggaaggcaggcctctgcccctccactcccgggcctccactcacagacacctactatggctctctttaaagggcaggaggtggtgctatgagcatagtagcccttggcagaaccctggctgtctctggacaggccctgtagcaagaggccaaccataggtatctctgtccctgaggataagcaccctcacagagtggagacagagatcagggcaggctagcaggagccagacagagtgtctatcctgtttgctcaagtaggatatactaaccatcagtcagctgtccctaggattctgaagagcctgttcccagccccagctgaccctgctgcctctcaggtcttacactgtcaggcaatgaaggcagaaggtaggttaagcaggcctgggcccgagcccctcctacagagacactgaagttgtgctgtttcctcgcttcaagaagcagagcatgcactgagggcctggaccagcctggtgggggggttggggagggagagccatagcgatggaggtagtcctctcctccagcactcatctcctctcccaggtgccttgtgtcttccttttgaacttgctgcagcgcatctctgcccagccctcatgcagacaggaggagttccttgtgggagacgagtgctgccccatgtgcaacccaggtgggagttcccaggaggcagtgctgtgccagggaggaactcctgtcctgagcctctgggcctctgggtcctcagtccaacggctgtacagtgttcagttcagggatagtcctcggtgtctggaacctttgaagttcactgcctggggtgggcccggggggtagggcaggctttataaccagagactgagactgaaagtgggctggggtcagagccagttctaagggatttaggaagccccatctctgtgtttctgaattgttcatagagggcagacagaaggccaacaagtcctgtggggctttagttgtggttggtgccatacttgctagacccatgtgagggtacagggaagggaaggtttctgtggattaacccccaaccctgctgaggaactgtgggtcctggctgcaggttaccatgtgaagcaggtctgcagtgagcatacaggcacagtgtgtgccccctgtcccccacagacatataccgcccatgcaaatggcctgagcaagtgtctgccctgcggagtctgtgatccaggtaggagcacctgaggaggtggaggtggggtctgctggagcacttaggctcaggcattggttctagaagagggcaactcatggagggaaccgcagcctgaccttcctgctattgtgggcaggttctcagggtgtgtctcccctccccccccccatccccatcactgagattctattgcctgcttctttttctccctgtctatctggttcatgtgggtaatgagaggttctttcctgcttcagtttccctgcccgtgaaggaactcttacatgcgttgggacatcactggggatcaatgtggccattatatatatatatttttcccttcatatgaaggaacccaggaaaagctcactcgtagactgatggctgcctgggcctgggcagatttggatggggacacaggtcctggaatattcgaagctgtaaggtagccagcgcttctgttcccaccatagccccacgctctccatacactagccttgggtgactctggatttattacagtgcccgcaataaatcgggcggcctcacactccccacaaggataaccccgtacttactcatagtgtgtgaggagggttgtcctcaccccttactgagggtgaccccgtgtctatcacagtgtgcaaatggagatgacctcacccttatagaaggggaacctctatactcacacagagtgccctcatggggtcagagtgactctgtacctattcgcacaattcccatacacagtcggctcagacctggaggccgaagactgctgattcccatggacgggatactgagatcccaagagtcaccagggcactctgctggatggcagagcctaccaactccacacttccagggctatgggcacatagattggaagtcctgcttcctggagtgggagaaaacagaggcaaggacaattcagacttggtcaaaacccaggtcctgggcatcaaaccactctgtgaccctatcagccctcaaccaagccccctgctcagagccattgtgctatgcctggctccccctataggacaaacctggtaccacatgtgcaggtggtaggtagcctctggcaagtgaagctgtgcagaatcggacccgggtacactgggacgactggaggaagggtgctcccccaaatcccgtgctggtgctcccatggccttgtctctggtggcagacatgggcctgctgacctggcaggagtgctccagctggaaggacactgtgtgcagatgcatcccaggctacttctgtgagaaccaggatgggagccactgttccacatgcttgcagcacaccacctgccctccagggcagagggtagagaagagaggtgagctgtctaactgaaggttcttttcggaggccacccttgttccagtaagcccgctgcctagggtctagaaaacctccagcttcaggatttcagaaaggagcagaggagaaatcttggccaaccctagggcacccaccccagaccagtcctggcagcaagagaggaaagagtgctataggttggcatgacaggaggggagaggggagcacaggggggcagggaaaagctgaactcaaagaatctggaagatccagaaaggttttctggtaagagtcaggaagaggacagagggcggagaaaacaaaggggagctggaacctctccgttggctcccacttctggtctaacctcagctatccaacatcgggtctaacctcagctattccacctcagctccaatgcttcacgggagccagacttgtaaactctgcccaaccccactattcacctaaatgtgagggctgcctttgccttctgcctggcatctggccaggctacccaaagggtgtgtgggttgaagacccctgggttattacatcaggccctttccatgtccaggatgccctaaaactacccagccccttctcacacagtctcacagtgccatctaccaccacagctccctctaccagctacagagtattatgggttgtgaggctccagaacagacagctcccaggccccactccagggaagcccagattcctgcaagcctgaacccagtactcctctgtttgcccctcttcacttcccagggactcacgaccaggacactgtatgtgctgactgcctaacagggaccttctcacttggagggactcaggaggaatgcctgccctggaccaagtaggtgactagcatgctggggaaaggactactctccctctggaagatgagtagccaaacccagctgagctgcatcctgggtaggcagagcaatatggagccttagctaggattccacaggctgtagccagttcccactctatgactgcaggaccaagaagtcaagggtatgggacttccctacatttctgtagttggggctggggtgctgattgtaagggctgtcttagtcagggtttctatggctgtgaagagacaccatgaccacagcaactctttacagaggaaaacatttaattgggactggcttaaagttcagagggttagcccattgtcatcagggagggaagcatggtgacacacaggaagacatggtgctagagatgcagttgggagttctacatctggatcggcaggcagcaagaagagagagtgacactggggctggcttgagcatctgaaaccccaaagtcccatgacacatttcctccaaaagtccacatctaccccaacaaggaggtgttcctaatagtgccactccctatgagcctgtggggggggcattttcattcaaaccaccatcatgatgttctctggtgaggccccttctccacctgagccaggatcccttcagtatggatctcagaccttagagctaacctgagagcttgggatctctgaagatagctaggtttccttgggtgatgcccagagaaggacatcagctcatcttctctatcccatctctcttcactgaggtcagtcagtccccagctttgacaccagcacccctccctttctcactccctccttccctcctcctcttctttttggcttccatttctaccctgctccttcagcccccctcctttctccatttccccataaaggctttgaaatctgtaacagacctgagtcctatctcagagctgttgtaccagccgataggctctgagttgcatggaccctgcctcgctccccgacattgcccagtctgctgacctgtctccacctgtttcccaccatgtcccatggctgctctctcctagctgcagtgcatttcaacaggaagtaagacgtgggaccaacagcacagacaccacctgctcctcccaggtcgtctactacgttgtgtccatccttttgccacttgtgatagtgggagttgggatagctggattcctcatctgcacgcgaagacacctgcacaccagtgagcaacaacccatcttctggggctcaggactccaggaggggtcccagggtctttgtagagtctggatctacagtggctagtggtagagcccttcctcagagcccagctctcaggtggcctcccgaggaccctccattcttccctctcccctccctctctcccttctttccttcctttcattgtccagtctcatctgtgtcctgctgagctgagctctagagaccagcttgtagaccaaatcagacctgggaagctctggtctatgctttagggagtcaaaaaacaatggccaggcaggctactctctgccagtgaggaagcatacctctgtgtgctcaaccctgggtgctcctagcgcaggaggcctctttcctaggctctgcaggtgggccaggtagcctatgcccctttctgcccaagttaagcccccgctcatggtagtgagcaggttccccaactctttggcctccaggaatgtgggcagggatctgttcttttacctggtgggcctcctgtgggttttgacacatgtccaaagctcacttcttctgttagagagggtcagacttgggaggtagatcacacagctggaatcccagaatgtgggtttttcattgctgtgtgcccgtctccctcccctcttgcttcagcctctcccatgacttgatgttcttgtgttacaggctcagtggccaaggagctggagcctttccaggtataactgggtcggggaggaagttccaactggcatatgcttatggaagccaactccatagtctacagctaagcgttacatgttcccaagagccatgtagtcccctgcttggtgtctgagaggcaggagtttaccttgcgtttctttggcagcaggaacaacaggagaacaccatcaggtttccagtcaccgaggttgggtttgctgagaccgaggaggagacagcctccaactgaacaaattctgggtgacaagacaccgaggagacgttggtgggaagtttccatatgctattgggacatggcagatgccctggctggttcatcatcacacaacagtggatatgtggtcatggcccagggtctaggagttgctttgccattctttttttttttttcgagacagagtttctctgtgtaaccctggctgtcctggaactcactttgtagaccaggctggcctcgaactcagaaatcctcctgcctctgcctcctgagtgctgggattaaaggcatgcaccaacatgcccagctgctttgccattcttagtgttaaatgggtgcatcttctcccaaccaaacactaagaggtggtgatccaaagtctatactagtgacagctaccactgaccctatgtcttacttcccagctcttccagtcagcttataacagctctgcctaggcctgtaacctagcctaaccagctcagcctataacctaggcctctgcctgtcctggaaatgttaaacctaggcctgcttagtcagagggctgctgagcactgcctcctggggccggagtacatgtgaggagtcatgaatatggcattattatagactttactttgacatttctggggctggaatcttgcctgattcaggcaagtgcttttattcctgagctgcattctcaagattctgtttttacctgaggcaaactcacatgatcatctgggccaactgtggactcctgtatcttgggcaagccttaaacttgacccttctttttttttattagatattttcttcatttacatttcaaatgctatcccaaaagtccctgtacactacccctgccctgttccccaacccacccactcctgcttcctggccctggcattcctttatactggggcatataatattcgcaagaccaagggcctctcctcccactgttggccgagtaggccatcttctgctacatatgcaactagagacacagctctggggggtactggtcagttcatattgttgttcctcttatagggttgcagaccccttccacttcttgtgtactttctctagctctttcattgggggccctgtgttccatccaatagatgactaagcatccacttctgtatttgccagacactgtcatagcctcataagagacagctatatcagggtcctgtcaacaaaatcttgctgggatatgcaatagtgtctgggtttggtggttgtttatgggatggatccccaggtggggcagtctctggatggtccttccttccatctcagctccaaactttgtctttgtaactccttccatgggcattttgttccccattctaagaaggaatgaagtatccacactttggtcttccttcttcttgagtttcatgtgttttgcaaattgtatcttgggtatcctaggtttctgggctaatatccacttatcagtgagtgcatataatgtgtgttcttttgtgattggatgatatcctccagatccatccatttgcctaagaatttcataaattcattgtttttttaatagttgagtagtactccattgtgtaaatgtaccacattttctgtatccattcctctgttgagggacatctgggttctttccagcttctggctattataaataaggctgctataaacatagtggagcatgtgtccttcttaccagttggaacaccttctgggaatgtgcccaagacaggtattgctggatcttccggtccaatctatgtccaatttctgaggaaccgccagactgatttccagagtggttttaccagcttgcaatcccaccagcagtggaagagtgttcctctttctccacatccttgccagcatctgctgtcacctgaatttgtgattttagccattctgaccggtatgagatggaatctcggggttgttttcacttgtattttcctgatgattaaggatgttgaacattttttaggtgcttctcagcatttggtattcctcagttgagaattctttgtttagctctgtaccccatttttaatagggttatttgattttctggagaccaccttcttgagttctttgtatatattggatattagtcccctatcagatttaggattggtaaagttcctttcccaatctgttggtggtctttttgtcttgacagtgtcttttgctttatacaagctttgcaattttatgaggtcccatttgtattaaggaaaagtaattgttgcttcctgttatttttgttattagagttgggattctgttcttgtggctattttctttttttttttcttttcttttctttcctcttttcttttcttttcttttcttttcttttcttttcttttcctctctctctctctctctctctctctctctctctctctctctctctctctctctccccctccctcccccctctcttctttttttcaagacagggtttctctgtgtagccctggctgtcctggaactcactttgtagaccaggatggcctcaaactcagaaatccgcctgcctctgcctccaaagtgctgggagtaaaggtgtgcgccaccactgcctggtgcggctatcttcttttaggtttcttgatttactttcttgcattttctagggtgtaattcccctccttgtgttggtgttttccatttattatccttttgaagggctggatttgtggaaagatattgtgtgaatttggttttgtcatggaatactttggtttctccatctatggtaattgagagttttgttgggtatagtagcctgggctggcatttgtgttctcttagtgtctgtatgacatctgtccaggatcttctagctttcatagtctctggtgagaagtttggtgtaattctaataggtctgcctttatatgttacttggcctttttcccttactgcttttaacattctatctttatttagtgcatttgttgttctgattattatgtgtcgggaggaatttcttttctagtccagtctgcttggagttctgtaggcttctcgtatgttcatgggcatctctttctttaggtatgggaagtgttcttctataattttattgaagatatttattggccctttaagttgaaaatcttcattcttctcatctattatccttaggtttggtcttctcactgtgtcctggatgttgacccttctacctctgctttccaaataacactgtgattacctacatgatcctgcaaactgaggggtggggagtggggctccagtgctttctattcttctcgtgtgtgtgtgtgtgtgtgtgtgtgtgtgtgtgtgtgtgttttaccccatttttctatcagcctcgggaaaatcaaattttaccctctcactgtttcaccagccctagagaatttacatgctcagagaaaagtctgcagagggattgaacaatcgcggactccacacctctcttcagtgtacctgaccagtccaagctggcctttgacactggtcccttagtagctagccatcttgagctaacctggacttcaccaatttggctagattagcctaccattgagccctgagccccagatgtccccttggctgtcttcttggtattgggattaaggtactatgttaagcatttaaagtggattctgtggataaacttagcttcaagaacacaggtccttatgctgcggagcatgtactatagcaattgaaccatccctctggctttgcatgaatttataacttatagaaaataaatatttgccgggagtggtggcgcatgcctttaatcccagcactcaggaggcagaggcaggcagatttctgagttcaaggccagcctggtctacaaagtgagttccagaacagccagggctacacagagaaaccctgttcaaaaatacaaaaacaaaaacaaaaacaaaaacaaaaaaacaaacaaaaaacctgaaaataaatatttttgttatatgttctgtctctgtcttgtgtcttattaaacatctgtctgtcctgtgagagtgatagtgattgctccaagttaactatgttctcatgtatgccacatagtcgcttggtgaggggcttccactggcaggaggtgcagtcaccctcaataatatcacagcaaccacaggtttttttcatcctgcttggtgattggtttcatcattgccttattttctggctccggtgtttctgtgggcatcctttccaataggattctttgaatatctcccatcacctcatgggagtgactgcccatcaggccaaatgctgtgcttcaggctcacctgttcctctacacctgtcctggcatctcccaagaactgtttgaagccagcgaccatcaactgctacaactgtgagcagaaacacagccttcctccttgaactattcctctcaggtgcttgccacagcagtggaaagcctcattaggctacatgtcacccctctgtatatctgtcattttatctccttcttagtcactgttgtgtggtgaagagacaacacgaacaagacaactcttaaatattacaaacaaacaaacaaacaaacattttatcatgggcttgctcacagtttcagagggctgtcatcttggcagaaaggagacaggtatggtattggagtaatagctgagaactttatatcctcatctacagacagcagctctctctctctctctctctctctctctctctctctctctctctcacacacacacacacacacacatatacacacacacacagagggaggggggaccggtcctgatgtgggcttttgaaacctcaaagcccacccccagcgatacaccttctcctgtaaggccacgcctcctaatccttcccaagcagttccactacctgacagctaagcattcaaacatatgaccttatggggattttcgttcaaaccaccacaatttctatttatctttctcatctgtttgtagattatccatccatcttctctttatcatctatcttttctttttttaaaagagttatttatttattatatgtaagtacactgtagctgtcttcagactctccagaagagggtgtcagatcttgttatggatggttgtgagccaccatgtggttgctggagtttgaactcatgaccttcagaagagcagtcaatgctcttaaccactgagccatctctccagcctccatctatcttttcttatcttccacgtgtctatcttctttacaccatgtaatgatgtgactcacactctcattagcccatggaacacagagaggaacctgtatgctaatgctagtggttaaggaagttgagttaggaggcagaagtgggcaggttgtacgcgtgcctgatgtttgctgtatctggttggttgtaattacagtacataacgagactgcattcatgtctcacaaagaacatatcagcacttgaacccgtgatcacgaacagggtctccagaaacacagagggctctgtccaccaaggaaccacacaaactttgggtgagcgttcacatgcatgagtacagtttggcctgatgtagccttcctgagtcttaaccacacagtaggcaccgacctacctggtctgttttcttcagatagtctcccagcaaacaaacggaggcaaaaccattcagggtgacatggagccttatgtggggagactctgctatcagcacccagaacttgcttgatggccctggagtccatttgagataaatcaggtcttgactggcattgctttttctctggtcactttctaaacccttcattctgatgaaattgcaggggtcagttttctgccacccagccccatacatactttgcctgtaagtctccagtaaaatgcccattgtattgttctcgatctgttggcctctgactttgctctgactacatctagggcctggtcttcaaacacaaggcccaggttgccttggaataacatcgataatggagctgtgaattttaaaatgagatgctagaattaccgggagatgtcagagcggttgttaaacaagatttgggcagagtgggcttgagagatgctcttcttgctgctgacagagtgggtggacattcggagcagggacatgagcagggccggggatactgccaccttctctgccactgcaggtccctcttctctctgttctgctctccttcagcaacacagggtgtgcatgctcagccaagcacaggcagagtccatgtttgtcgtccccccccacacacacaccgaataaatgggtgcctgggcagctgcatggagccctgttccactgttccttgagatggttatctgagggtgcagaggaccctggggctgcccggtctgcatcagcactggagccaggggtcaccaggaccagtaccttcaagccacacttacctgagaggggcagtgggacccttaaggcagcctgttctttgtagccagcggcccacaatagatgtctatcctgaacatggtttcattctgatagcttgacatctggaggctctcttatccttttgggaggagccaactcttaattcaggaaccggtgacctgggagtttgcaatttatgttcagactggccagtctgaagtccaccggcatgagtgacatttctcagtgcttggctcaaacacctgacaggaaaccatgtgaggaagaaggggttatttttgttcctggtttcaggtccatcatggtgggaaagacggatgtgtgagctggctggcgtgtgcagtgaggacactcagcaacggacgctggcgctcagcttccttcctgagctttattcagacccttgcccgtgggaggatgctccctcgaattaggctgggtctacccacctcaacttggttcatttccatgatgattctaaatcccatcaagttaataatcaatgttaaccaaattgcactgttggacttagagccggaccctgtgcccaacaagctcagtttggactccagcccctgaggaggcgatttaagttttttttttttaatttttaattttttgaaaagctaaattgcttgcctgaatcatggtagtgtctgcatcgtgagccacaggacaaggctgcattgtctcttcaggtgtatatctagggcaaccaggcaacactaggccaccatgctgtgtttccagcccagcttcgtctgatatgtaactttccctgagagataggagcgaatgtctaattaccccagattgggtgttgaagacctttgccttgcaggtcctgcccctggggcctctgaggtgccgcctcagaagtgtcccaggaatgaggtgtgtccacaggagcttcagggatgggctaagggatggcaggtgggaaggaaggtgccaaggttcatctgaggcctaggaagtggtgagggctggactcactagaatggagtctgcagatggccacactgggaaaggggacagatatccagtgaccccagcaagtccatctttctagtcgtgatttgaagttgaggttaaagcagaagccaaagttatgcataactttgaagcaaaattattcagcagccctgggtaaggtgcggtcccacccatcaccgcctctcctgtgaagtcgcatgacaaattggaagtctctttccagaacagtttctcttcttgctggtccatgctctaggctttcttctctcaagggatgagaattctgaggtaattccagtcccctggggtctactatttcaatagtctgagagtcaatgagaggaacaaatgagtctttagaatatcgtcttctctgtcacaccacctagaggtgtcctctgaggcccttataccccagaccaatggtccctagagccccagagctaagattggaccctatagtccagaatctgtaaaatcacctacatcaaccaacccacaccatgtcttcagcttgtgaccccagagttcatgacggtcaaccacgattggtccctgtacctcagaatctggaaaactatcatctgtacaaacctagcctatgcctgctcattgaccttgtctggcctttcccatggaaactacatgaaggctctcacctgtacggaccttggtccttctgcttactgataatccctggggcttccccgggtggccttggtggcatggaggaagggttataacaagcctgcatctaggtggtggtggtttcccctgatctgcagcctttgcagcctgcaccatggtaatacctgcactgtgagacaggtcacagggcaagactatgctgtcttagccacagtggatggctagagagatagaacaaccttagggccatagggctgggtcttcagcctagcttctcttcttcatgtattgtgtgagctttgtgtagaaaacatgagccctagatagggcactgaagacaaaccaaaaagaagatactacctaggtctagcttaggtaactggatggaagtcgctcctctcagctgccaggatccctaaccctggatctcagggctgtgtgtgaagcacttggggccgggctgaagcctccccataacaggtttccgctccaggcagcccctgtgggtcccacctgctgtggggcctctgaagagacctgtcttggaaatgttttgggagtgtggtgtggcccacagaagctggtaggaatggggcaaggaaccggcgcctggtgccagaggtcaacagggaggcaagagggaaggaaagcggggagcctcacctgaggcctgggcaggactcaccagagtgtgtggagtctgcagaatgccatgactgaggcctagggcatcagctccagagactgggcctgtgcaagagactgactcttggtttgttcctagcctatgagccccagcaactcagctgcttagcatctctgcagagtgcctgagcccagtctgccaaggtaactactgtagtggtggtaggtcagcatcagccctgaaggcttaggggtctataaagcaaagtggaagtggaggggtacaggtagctgcaggggagacacccaggatgggacagtaggcttcaggctcctcatcccattccaaggtttccccttggaattcccccataaacagccttaccctcttctgtgaggattcatcatctacacaggataaatgaatggattactgagacctgggtatcctgtcaggtgtctggagaggctgtgcacatgaagtagggcttctagtaaacacacacacacacacacacacacacacacacagagttcacaccggacaaactgggaacaacagaacataaattaataacaacagccaggatcaaagcacttgactacagtgagaagccccgggcaatgcattaggaactggaagaaagagagtgttttgctgcagtagatgactagcttcactaaaaaggaggccagaatctttgctacccctccccagccattaaaaaaaaaaaaagcgcagaatttggacaaccatgaagggcaaaagtgggtgagaaggaagagaaggaagatgttcccagcctgaggtgtcttctgactccattttatcataaatacagggaaaggggtggggctggtgagctggtttagggaggaaaaggctcttgctccaagctggtggcctgagtttaatccctggaacccacatgatttaaggcaaaaaccaatttctccaacttgtcctgtgatctctgcatgtgagctgtggcccatgctcacatgtacacagacacacaggctcacaaatacacagacacacaggctcacatgtacacagacacacaggctcacatgtacacagacacacaggctcacacgtacacagacacacaggctcacacgtacacagacacacaggctcacacgtacacagacacacaggctcacacgtacacagacacacaggctcacacgtacacagacacacagcctcacaagtacacagacacacaggctcacaagtacacagacacacaggctcacatgtacacagacacacaggctcacacgtacacagacacacaggctcacatgtacacagacacacagcctcacatgtacacagacacacaggctcacatgtacacagacacacaggctcacacgtacacagacacacaggctcacacgtacacagacacacagcctcacacgtacacagacacacaggcccacatgtacacagacacacagcctcacatgtacacagacacacaggctcacacgtacacagacacacaggctcacataaatataatactccttcaagttgtcctgtgatctctggctggcactattgataacactgtgcccagtcccacccagccccaccccaactccatctctactgtacaaacacccttatcagcagagaagggtgcaggtgcccagccccttgccctgccagagctgcaaccatcatggtgctacctccactgcttctaaatgagggtcacaggcaggggccttctcagtggggctggcttcccccaacccttttcctccagagataggaccatgaagtagagcctgggaaagctcgagatagaagtgcatagggtttttctccatgagctggaaagccagacaaggccgtgggacctagggagaagtttgaggtggaggctgggagggatggggacagagggaggactgcagcctgtcacctgaactcttggatggaagaggaactctgccaccatcatctgatagctgccagtctttgcttcccatttcttagacagtcccttgagtgtggaagttgtcagaatccagagtcagcagtgtcaagtaggttgagaaagagtggctctcccctcactccgcattgcctcagagcaatgaccacaagcgcttggccagaaccacagagccttgtatggaaacactgctgtgagaagccggcccagtcctgcgtgttcaggctcaggctggtgtccccctcattagtaatccttgtgggcagagattatggcttcatgggctgtaacagtgctcactttatctttaagaacctccctggccccagctgccttgaatacggacactgtttactgctgtacatattcaatcccttggaatgttccatcatgtccaaactcctggagaatggctctgtggtcatcaggttaacaagactgcccgctgacccgggcttatccctgtaccgggttcaccgaggcagcaaaggggtatggagtcggagtcagcaatggatcgatcgattgatcgatcggggtcaaaactgctttacctttggcaattctgtcagcgattgcatggccaaaagctgcttactttcttttttttttttttttgggcagttttctgtctttaactctgctattctgtggccaaaagccactgacttctgctaacttaacaccatgctgatactgcaggggatttaagaaagaagtcttagtttctctctgggtcaagggcccctgctgggcagaggagagacttggagtttgttaactcttcatgagccagagagaaaagaaaaggaagaaagagaattcaagcacacacagagacacacatgaacacacacacaaacacacacaggacacacaaacacacacatgcacacacacacacaaacacacacatgcacacacacacacaaacacacacatgcacacaaacacacacagacacacaaacacacacatgcacacacacacacaaacacacaaacacacataaacacacacagacacacaaacacacacagacacacaaacacacacacacatacacacatacatacacacacacttacactttggctgggcccgactacctgtctcaacaaatccacaagaattcatgcaaacttacatacacacacctacacgagtatgtatgtacacacatatagacagacatatgcatatatacatttggtggatggggctcagccccacacgccacacactttattcctttgctcagcctctcttatattttcttagacaaaggttctctagaaaattacctcatagatagaatgttacacaaaggggcttacagaaggatgccaatagtcagttcaaagcagtcatatctgacgagtgggaaggacctgtcatgcccatttgggcacagggaggcattccccagcccctagttatttctggctatttttatttctggttaattgagtttggagtcctgcagatcccctgctgggaccaggagctgaattatgaagtttcaaaagttttgaaaaatgtgaaagtttcacactctgagatgccagactttgactttggctgtcaatgaaaaggattggtggacttctaaagcaaagaatcccagttgttaaatgttgttgccttgtttctctggttttgctttggctttatgtgtcttgtcttgtgtatctggtccatatttatgtgttctgatttggggccgtatcaccgccacacaatggtccctataaggcaggtgctgcctgtgcggccccacttcctgcccaggtacagctggtggcaaggctgagccacgggatctgtgttgacctctgacctctgacagtactgctgtgattttggtgg

SEQ ID NO: 948 - DNA, 834 bp, Mus musculus
cagacatataccgcccatgcaaatggcctgagcaagtgtctgccctgcggagtctgtgatccagacatgggcctgctgacctggcaggagtgctccagctggaaggacactgtgtgcagatgcatcccaggctacttctgtgagaaccaggatgggagccactgttccacatgcttgcagcacaccacctgccctccagggcagagggtagagaagagagggactcacgaccaggacactgtatgtgctgactgcctaacagggaccttctcacttggagggactcaggaggaatgcctgccctggaccaactgcagtgcatttcaacaggaagtaagacgtgggaccaacagcacagacaccacctgctcctcccaggtcgtctactacgttgtgtccatccttttgccacttgtgatagtgggagttgggatagctggattcctcatctgcacgcgaagacacctgcacaccagctcagtggccaaggagctggagcctttccagcaggaacaacaggagaacaccatcaggtttccagtcaccgaggttgggtttgctgagaccgaggaggagacagcctccaactgaacaaattctgggtgacaagacaccgaggagacgttggtgggaagtttccatatgctattgggacatggcagatgccctggctggttcatcatcacacaacagtggatatgtggtcatggcccagggtctaggagttgctttgccattctttttttttttttcgagacagagtttctctgttgtagccctggctgtcctggaactcactttgtagaccaggatggcctcaaactcagaaatccg

SEQ ID NO: 949 - protein, 194 aa, Mus musculus
QTYTAHANGLSKCLPCGVCDPDMGLLTWQECSSWKDTVCRCIPGYFCENQDGSHCSTCLQHTTCPPGQRVEKRGTHDQDTVCADCLTGTFSLGGTQEECLPWTNCSAFQQEVRRGTNSTDTTCSSQVVYYVVSILLPLVIVGVGIAGFLICTRRHLHTSSVAKELEPFQQEQQENTIRFPVTEVGFAETEEETN

SEQ ID NO: 950 - DNA, 29984 bp, Homo sapiens
  misc_feature (1)...(29984): n = A,T,C or G
tcctccctggacctcagtctccttgtctgaggtgtgggacagcactgctgcctcccaaggctgatggaaggacccccaagggcggctggttaacaaataccaggtttggagaagctggggtgtggggctgctgcctggaattaactgcccagagcacctccaaggatgaccttttaatatgagagccagcccaggggagggaagggtcgggggcttcctgggggaggtggccgctggcctggattatcaggaagtgcaggaggagggtgggggcttcctggagcagtggccctggcccccctgtgcagtagctgcggctcagccccttccctggcctgtctccctgttgcttccacagctggagctgcctctgcggcccctgtcctcacccctgaggaggccaggcccgggcaggtgcctgggctggggctgctcctggccaggctggaagactgtcagatggaggacaggtcaggtggtcggaaagctggggacagggagggagcaggtttgacggagggacgtatgggcaggctcctcctcccggtcaggtcccacgtgaccccccagccacgcctacccacatcgccctgctggaggccgggggcggggggagcggggagtggggggtgtggggggtgaggggggtgggggtgggggtggcccggcccggagctagggggcggggccgtgcttcttctggccctggcctccaattggctgccgggcgtgggaaagcgtgcaccactgcctggcgcccataaagacgcctccaccacctgcgccgccgccgcctcccggccgccctccgccccgcgcgctcgttgaggccggtgctccagagtgaagagcgtggcggtgcggcggtagcgcagggccctcctgcggggccaggcaggggcgggtgggcgctccttgccacctttctgctctccctgctgtccgagaagttcgtgcggtgccagcccagctcccagctggggacagaacaggaaacgtccccggcgagcctggcgggggtggcggcaggggtgtctgtcgcctgcgctgggcaggacgcgcgtcctaccggcctcccactccgcgggcctcaccagccacctcattcccggagcccgggccgccgagagcgccgcggatggacctcagggaaggcctggcgcgccgcctccgggaagccttccggccttctccctccaccgagtactggggagtctcaggccacggtgaatgaagagcaacgggccggagagacctcggcctctgcccaggagcagcgcccagcaaccccgcccacaggggacccggtggacgccctggtggccactttgccaggctccccatctcccagcgaaccagagaggatttccgttcccctcctgcttggtgcctagcgccagggcggggcgtgggctgagcagcccctcccatggagggagcggccagtctacatattggaggtggggctctggggaaagggtgttgttaggaaggcggtttgaggcagcgggaggtggggatgcgcccggcggggaggggcaggtgtgtggggagggcctggggagcgcctccccagccgggcagcgcttccccagccaggccccgcagctggaccccggctccgtccagcctgggaaaggactccacggtttatgctgaagtggtggtggggtgggtgaacgctgcgcaatggaagggcatggccctgtgctaattgccccggggtgtggggctgtggaggcactgcgggggggatgtgctgtgtcagttgggcaatggcggccaactgtggcgtgcaggccttggagctgcccctccatggagctttaataaaggcactagccctgcaatttctgcctgagtttctggcccacagcttggccgactgcagcccctgagattggaggcttctgctcaagacgtgggcagggagctcggggctccctgggctggggccctgccccgctggcctctaccctggcccctgctggaaagcccgtcagggctgctctgagctggggacagctcctccctgcccacagcaatctgggggagccccggtttgtccagtgcccctgtgagccctgctgtgtaccagccacctgtgggagtgtccgccagtcacctcccaatagctcgggaggcagagcgacatgactccattttagagatgagcaaacggggctcctgcactctgggaccatgacagagacacaggaagtgagagtgggctgaggccctgcagcagtgggggccggccttggaccgtgatccaacccgaccatggctgcccaacccccacgggctcacctggcccctcatcgaaccatgtattacccgaataatttattctagtgtctgggcccagccccgtgtccctcactgacaaccagaccatggagggcagcccttgtgttttcccagggggaggggagggaggagggggtggattcttaaagggctgcagtgagtgtggccccaaatgcacacccagggttaggcacgcaggtgatggcacagggagcccaggttctaggaagtggcacctgcggccggggaggcagggcctggattttgctgccccctggtggctagcggcctgtccaggcaaaaggcttggacctgcagcccctgtggctcagaggaagagacagaggaagagacagacagaggtctgaggtctcccatcagaagtctcagctcccaaggcaaattcagaggtggagggtcccttggccctgtcccagctctggcagggcggccccccacgtcctggcctgctgccaggggtcgcgcccacagccctgcaccgagcagggaaggcccaggcctgggtgggtctttccgcaggatcctgggatgttgcttaggggaagccgagaccagacgggcagtcacctgtctgggaaagcaccaggccctggccgggtgcggtggatcacgcctgtcatcccagcagtgtgggaggccgaggcgggaagatcacgaggtcaggagatcgagaccatcctggctaacacggtgaaaccccatctctactaaaaatacaaaaaatcagccttgcatggcgacgggcgcctgtagtcccagctactccggaggctgaggcaggagaatggcgtgaacccaggaggcggagcttgcagtgagccaagatcgcgctgttgcactccggcctgggtgacagagccagactcaaaaaaaaaaaacaaaacacaaaaaacaaaaaggaaagcactaggccctgcggaagtccccatggtgacattcacgtcctggccacgtgggcgggtgtaggggagggaccgcagggaggcggaagtccttgttttttcctgcagtcggcccaggcaggacctgagcagcctgaagccatgagtcgctgccactgctctttctgtgcctggtgcagccccagctcatggggtctgggccgcctctgatcccatgccccccacttcacacttggggttctggcttccccgctgtgagcctgtctctcctccgtgggacaggccagcctgggcagccatccctgtacccactgcccagcatatagtgggtgcctcataaatgtgggctgaacagagcctgcccctggggccccaccctcactgccaggcatacagcaggtgcctcataaatgtgggctgaacagatcctgcccatgggccccccgacttccagacataaagtaggtgctacataaatgcaggccaaacagaatctaccctgggggcctccacttccctttgatgggggcagagaccctctgccgggcagcggccacccagtgcctgggacaggtgcccccttctcccaccctggcctatcttggggcatctgagggaggacagggctgtgccccccacttcatcctcgagggtctggcttccccacctgtgagcttgtctctcctccgtgggaggagcagcaccgtcgttttcactttccgtgatgaccactgagtgagagaagatgacggcagctcctgcgtttaaaaaggaaccatccgcgtaactgccgcaggcagggcccgtgctcgggcagtgaggcctcggccctgagaaggcccggaccccacaggcctggccctggctgagagggagttggagtcccccgcctggggcagcccctctgcacctggggtggtggagcaggagcttggctgcaggcggggctttcctcccagctctgggagccgcttcgctgcaaacgctgtgactgcaacctccgccacccaggttcaagcgattctcccgcctcagcctcccgagtagctgggattacaaggcacctgacaccatgcccagttaatttttgtattcttcctagagacggggtttcaccatgttactcaggatggtctcaaactcctgatctcagatgatccgcacgcctccacctcccaaagtgctgggattacaggcgtgagccaccatgctcggcctaggtgacttttcatggggagataacacacaggcatggtgagcagcgtggcagaggacctgtgtgcagggccctgtctcccgccggggaatccttcatctgggaaatctccgctgcgggacagggatgctgtgtcgtcaggacgcagcgtctctccagggcacccgggcctcctctgagcctctttgcgctctttggctgcgtgctttctttcctgtggcaaaaggtacatgacgttttattgaccatttcagccattggcaagtgtgcaaatcagtggctttagtccattcgcaatgcagctggaccccaccctttcctgattcccgcaggccagggctgagggcggggaggggcctgtgcagcagcctgagaccggctgtccaatggcagagcttccttctgggaaagccatgggtcccctggggccccatgctggaaccccagcaatggtggttcacgtgtctctccatctcacttcccgtgcaaaagcgacacaggcgggtacaaacccaaacagtgcagacatggaggagacagaaggtgaaaatggtttctgagcccctccagccgccctctggggacaccagcctggcgttcttcagacacaagcactccctgcagccaggaagaggaggaggcagccgggtcttgggcgcagagggaccaccctgtgaggacatagggagcaggtaccatctgcaggcccaggagggaaccaaccccacctgcccctgcatcttggacttccagcccccagaaccatgacaccattgtgtttccatttcttgagcccccaagtctgtggccctttgctttgttttgacaccccagcaacatgagccccttcccaacccctccccagccctggccccatcatccttgacctctctctccctgcaggttagatctgcctgtcccagaatttcacctgaatcacaaagcgtggcgcctcggggcctggctcccttcacgtggcctgatgtctgcatattcatccgccgtgcagtgtgtgtccacggttcattttgtgttgccacggagcatctcattgtgtggccctagcccagtgtgttaatccgttcacctgctggtgggtgttgcagtggtttccagctcttggttatcaccgagaaagtgactgtgaacttccgcacacacgttttgctgaggacaactccttccatttcacttggttattaggagtggagttgctgggtcctagggaaggtgtgtgtttctctctaaaagaatttgccaaaccgatgtccaaagctgtaccatttcaggctcctgcctgaaatcatgctgtgattgtcatttcagggtccacgtctgacaagtccaccgtggctgcccttctgggcctgttgctgctgactcacgttcccacggccacctttccctgcgtctggacgtagtagcaatttctcgttggatgtggacattgtgctgtgaccgctttgatcacctggcatttttgttgggttgtttttggccttcctttaaaggacgctgcgctgtgttctgcgtggagttcagctccttgctcttcactttggtcttcgtgtggctggttctgaagcctctcagagcaggtccagcccagcctttcctgcaggaagagtccagccccactcccaggacgggccctgctgggtggctgccaacagcccaggatcctccaggactctccccctggcggttggaactcctgtctcccacctgtgagtcccaggggccgggggtccacagccccctagggtcccatccatgctgaagagtccaccttccacatccatggcgcctgactccggaggcctcagaggccctcaggcagccttctggagctttctgtctgtgcagttccctcccttctggagctctgcctgccaggtccctctgcggatgtctccctgagcactgacctccttctcctcagcccgccaggactgctggacctgcctggatgcccgcccctgctcggccatcctcaatgggcctccaccccagggctggggtgacccgggctgaaaacagttcatcctgagtttcagtctcgagctttcgtggcaggagggaaactgctggctgtgttactccacggcggctggaacggacgggaccagctcccttcagaggggcacttcggttggttctagaattctcctttgctatgaaggctgccgggcacattccacaccagccaccctccacctcgcatgtgcgtttatcgatgaaacgccacagtgggacctcctggatcaaatagtgcaatgatgtaaacgcttagtattgtcctggaacctgcctccgaaaaggccgtgcgctcccgcctgggatcctgctgctcctccgccggccgccccgcacacgctccgctgcctctctgggctggctcagccgttgcatgttcctgcgtgtgcactgagacgtccaccctggcacgcttcttcccctcggcacgtggtccccacgctgtgcctgcccagctcggagcccagaggcccccgcagctccccacaacttcatggtgcagtgacctgaggcctcccctggctcagtccctttcccagggtcaggggtccatgtattgaaccaggacgggaggtgccttccccctgagctctgtccctgctgaacctggaaggcagcgcccggtggcggctcagacccccagagcctcttctgaggtccgacactcctctgctccccccagggagaccccctggcctggcccccagctctcggtgcctcggtttcctcacctggaaggtggggatgttgaaggtgcctggcctgtggctgtgcactaagctagggtgactgtgagcttccagagctcgaatgtctggaaggaagggcgcgagctgggtgcgtgtgagtgtcctgatcatggacacagagcgtggggccccttggagggctggaacccaggtgggggatgcctgggtggtgggacagagtggggctggaggagagggtnnnnnnnnnnnnnnnnnnnnnnnnnnnnnnnnnnnnnnnnnnnnnnnnnnnnnnnnnnnnnnnnnnnnnnnnnnnnnnnnnnnnnnnnnnnnnnnnnnnnnnnnnnnnnnnnnnnnnnnnnnnnnnnnnnnnnnnnnnnnnnnnnnnnnnnnnnnnnnnnnnnnnnnnnnnnnnnnnnnnnnnnnnnnnnnnnnnnnnnnnnnnnnnnnnnnnnnnnnnnnnnnnnnnnnnnnnnnnnnnnnnnnnnnnnnnnnnnnnnnnnnnnnnnnnnnnnnnnnnnnnnnnnnnnnnnnnnnnnnnnnnnnnnnnnnnnnnnnnnnnnnnnnnnnnnnnnnnnnnnnnnnnnnnnnnnnnnnnnnnnnnnnnnnnnnnnnnnnnnnnnnnnnnnnnnnnnnnnnnnnnnnnnnnnnnnnnnnnnnnnnnnnnnnnnnnnnnnnnnnnnnnnnnnnnnnnnctggacacagagccctccaagttccacgggcctcctgcaccgccgcctgctcccgccctcctgccctccccctcggcctcccctgtgagggctgcccacctaggtgaccccggagccgcctcctcacgcctccatctgctctgcacaccgtccactagcctgacagctgcccaaagcctccagagcacagaacgggcctggtgtctgcgcctccgtctcggggtgggccacggccggttctgtgtcccgtcccctccccgctcaccagcggtggaccccagcttccctctgcagcagcactcaactcacacactttctcagagacgcgcagcccacctcgcccccgcagtttcctcttcatccctcagagccccccatggcctgggcagtccatcctgagtgtccgcaccacacgactgtagacgtttggcttctggactcaaatccttcaccagatcgtgaccaggatggcaatgaccaggcctcggcctcagccccctgcctggcctgcactggcacagcattgggtctggggagtccccgcgacaggaggcgtggggctcggggtgctcacctgcctccctctccctgctggtaatggtgggccccgggatgggggcagtgatatcctgcgggcagccgtgtcaatgcagatggctgggtgctgggtagggccccgtctcccgcctccttgggctgcctcatttccttcctgatgaccctggggtcctgcacagggcctggcggtgctggtgccgggagagcccacgctgaatggatgaaggagtgagtgctgtacttagcggggggcgctgagcgctgggtggggagcccaggacatttcctcctgctgcccgggaggtaacaccctggacccctggagtctgcattctgtgagagcgggcaggccacagagaagggagaaaagggacggagggccgaggcgggcggatacggggagcagggagcggggacagggcttactcagcaatcagagaaggcctcaaggaagaggtgacatttcagcaaagacctggcactgtctgtgccctcggtggggcagatgggctcccttcagcccccttgaggcctggcacctggggccctatgtcaggcttggggccttggtgtgggagctgaagtcggggtaggaggggcatggaggaaggggcaggaggggctgagtctcactgatgcctgtgttagtcttgtctcttgccatgcctcagtttccctcctccccagggtggggtggatgagacgactctggaggacgtatctgagagagtggggttggagccccgtaccggcaggtgtaggcgctgtgtctgctcttggaggttgggcgttcttggggagttggtgagggaacgtgctgtccctgcaccctggagcccccatgccctcctggggcccccgggagtggaggatgcaaggggcccccttcttcttccttgcaagacccacatggctctgcatgtgggggacattcctggcagggggcgctgagggccaggatgtgagtgcaccagggaaacagcagatggggctcctctcccaggctccagctgtggggtgggagtccatgctcctgcgtgtctcttgggggcttttcctccactgggtgccacctggtcccccaccctgcctcagagtattggggtctgggctcgtccaccctggatgctggccaggagtgcacctgcctctggagctcgggacgcttggccccacaggacggtgtcgcacaccacagccggcctaacttcacccctgcctgctccctctccagggccggcctgcagggctgcacactttctagttggggtgcaggtccccgggctcctgccacagattcctgtggctggccaccctgccaactctcctgcaggtgagggtgggcgcaatccccaaggtcctttccaccagatgccactgagtcccccaggggccagggctggaccctggagggggtcacctggctgaagtcaggaccaggaggggcagggggcagtcgaggggcagggggcggtcctgggccaggcgtctggcagatgggcttgctggaggtgggggttcctggtgtgcagcaggcggtgccagagggggtgactgggacctgctctgggcaagcacaggcggtgcgtgacagacctgggcttccattgactgcatcacgtccagcagcaggaaggggccacgggggcactggcgtcgtcacgtgggtcacgaggttccatgtgatgcagggagcgaggccgtcacgagggactcactggtgcctgccttggggctccgggactgtgggctgtctccatccggaggtctccctaccaccaggctctgtggggcagggaagcccagtggggtgcagggagccaggaagctggggtggggtcagggcagggtccacagggagaccgggcgaggctggcagccttcccagtccgcgcagcgtctctgcagggggagcaagagctgcccttccacccctcccaggggacgggtaggggcactctgggcttttcccaccccctcacgcagggacacaggcctggtgggtctatgactgaaattggccagaccgcattctggtggttttattcggaagggaagtttaccctgttcagcagaagctgagatgggaacaggaaacccacagggcccctttattcggcaaaaatgtcagtcagcgccccggggagcagccgagggtccctgagtgtgtgagtgaggtggggaaacacagatggactttggggggctcccccttctacaggaaacccggagtggactggaatggtgcagggggagaactcgcccctcccatcgggcgcctccttcataccggcccttcccctcggctttgcctggacagctcctgcctcccgcagggcccacctgtgtcccccagcgccgctccacccagcaggcctgagcccctctctgctgccagacaccccctgctgcccactctcctgctgctcgggttctgaggcacagcttgtcacaccgaggcggattctctttctctttctctttctcttctggcccacagccgcagcaatggcgctgagttcctctgctggagttcatcctgctagctgggttcccgagctgccggtctgagcctgaggcatggagcctcctggagactgggggcctcctccctggagatccacccccaaaaccgacgtcttgaggctggtgagcccccgagcctcctctccgtctgctcgcagatcccagttctgaccccagggcctcccacagatctcttccccatgcccctgtcctggccgttgctggctccggcgtccagcccgtcccctgctgcctggggctctcgggtcaacccagacccccagcactgggctcaccacagtggggtgagcagcagagccacagccctacccagcagacctcctcctgcgtgtgtcccccactcaccactccgtccacgggcagctggtgagcccccatttggccggatgtgggcacttctgggggctgggtgtctctgggcgtctctgggcggggccctcgagcaggtgacccaactccccggcagccctgaccttggtgacaggtgataagatcagtgtgcagcagggggctggacccaggtgggtggggtggggatactctccatgctcatgtggcactcctgcctgtccagccactatccccatcaggggcccccgactgcccatcagccagcccaggaacgaggccacggcagagccaccctccccgatgtggccctgatcagcctgtcacccactgtctggcttgtgagcctctggggcccatccctggctgcccctgctggctcttcaggggtcagcaggtccaacctaggccagcaggggggccggcaggttgtctgcccagtgggctcaatgctcccaggtgtggggtgtggggtccctggcgagggcagagttccagttcccagggctccgcgctgccaggcagcgtcatcagggctggaggaggggcggtccccaccctatcccgggctccagcggtcggcaaggttgttccatgagcctggcctggggcccgcttctgtcctctctaccaggcactgccgctcctccccattgcacagagggagattcaggctgtggggccaagcctggcagagcccacagggcagccagggcatctcccaatgcctgtcctgacccccttaggtgctgtatctcaccttcctgggagccccctgctacgccccagctctgccgtcctgcaaggaggacgagtacccagtgggctccgagtgctgccccaagtgcagtccaggtaggtgcagccctttggcgggccagctctgtgggccgagggcagacactcttgcccccttctgccccagacacccctgtgttctctgcccccacagccatgggtgtgatgaagccctggggctaggtgtgcagacagtgagggcagaacccccaggccagcagcttggactcttcaccctgggggaccctcacagtcacactgcacagggggtgggtctgagagacgtggctggcccaccgtggccagagacatgggctcgggggcacataccagagccgggccaggtgtcccaggaggccccatgtgcttccagaactttccgattttccccagagcagctctgctcatggctgatggggctgctgtgtcccgtggggctcatgggccatttgagtccccttagctggtgtctccctgcttgggctctgggcgcgggtggagtgatgggtgggctcccgaaggggcctcccgcagacttgcgaagttcccactctctgggcggcaggttatcgtgtgaaggaggcctgcggggagctgacgggcacagtgtgtgaaccctgccctccaggcacctacattgcccacctcaatggcctaagcaagtgtctgcagtgccaaatgtgtgacccaggtaagaggccagcacagccggcccagcctccgcttgggcagcctggatgcccccgcaccctgcaccctctctccatggccacagtgccccaggaaggccccggctgccccaggccaggtcccaaccccatctccatggatgcaccctgcaggggacgccttgaggtcagcctccggcccccgtccacctctgtctcacctctcactttgtcaccgccaggtgggccatcctgagcttggcgactgacccttatccctcgtccttggctcctctggtgcccggggtgggtgcccagacctctcctgtgcccacgtccctagctgcaaagtggaatgggatggtgctgggactctccggccggcactcgggcctgctgcttccccacagggcttcttgtccctttctcctccagatattggttccccctgtgacctcaggggaagaggtcacctggaggctggtgcccacctgagtccaggcagacagaaaggggaaccagacccagaggtggcctttgagtcactgagcgcagagcctgtccatgcggccaacggctctgtccccttggagcctcatgccaggctcagcatggccagtgctccctgcggccaggcaggactgcacctgcgggacagggctgacggcacacctgggggcagggcctgagcctacagggaggcacagggcaggtgggctagccatgaacagaagaggaagctggagtgctttgggggttcatgcatgtaggctgggatttggggctcacacctcaacctgcatgcccagttccatgcccctcccctcttgtgaaagcacctgtctacttgggctgaggatgtgggggcacaggtggcaggtgaggctgccctcaggaggggcccaggcccagcttgtaccccacctccaccagtacctgaagaagtggggctctcaccctacctgcctctgccattggaatggcctggtttgcacagatgggaaacccgtttgcggggtgggtgtctgggtgggcacgtggggcgaggacctgcctgcgggaccctgccctggaactgacagtgcaagctcggcgtcctgcccatctgggcagaaggctggtttctcccatcaacgaagccctcccaggaccttcctgcaagccctcgtcccacacgcagctctgccgtcccttggtgtccctcccggcctcaggtcctccatgctgggtacctctgggcacctcgtttggctgagccaggggttcagcctggcagggcgccctggcagcagtccttggcctgtggatgctgtcctggcccgtggatggtgtcccggcctccacgtacccctctcagcccctcctcttggactccagccatgggcctgcgcgcgagccggaactgctccaggacagagaacgccgtgtgtggctgcagcccaggccacttctgcatcgtccaggacggggaccactgcgccgcgtgccgcgcttacgccacctccagcccgggccagagggtgcagaagggaggtaagcggtgggtggcggacacccctcccatttccaccctggtccccagtgccccgctgtctggagccccaggtttcctcgacggcatggcctgcccaggggccctggtgagacagaaccttggccagccccaggcccacccacttcagccctgtcctggaagcagcccagtggggaacaggtgatggaggcaggggaaggggcaaggaagggccaccccaggttgctccacctcggggttctgggacttcccagtccccaggcctcgctctcgggcccctggtctggagcctgggtttatgggagtgaccatggttaatgccactgttcaagctaagtctaggaggagtaagtgtccagccctggcctgcatctggccgggcagcccccgcagcactgcaggatgtggacacagagggactcccggactcatgagatcccagctactcaaggccgggacagccagagccaccaccccaggccccacctccaagactctggacagggagcctgcccctccccgctggtcctcccatcacccgtagagcacccaggtctagaagctcacagacaagcagtccctagccgccagccccctcctggcctggtgccctcagccccctctgtccgtccctctcttctcaggcaccgagagtcaggacaccctgtgtcagaactgccccccggggaccttctctcccaatgggaccctggaggaatgtcagcaccagaccaagtaagtgaacccgggggaggcccagctctgtgccctggggagggggctccacgttgcttccctgggagatgaccgtcttctccagcagaaaggcttgaaggtcccaccctgagcggcaccctggtcacatgcctgcgtccaggagagctgcagggctgaagcctgtgtgccccagataaccccttccatgggcccagacaaagcctcatcagatctgagcttcctggaggctcaggatgggccttcccagaagcaggcccagagggaggctgcctccagatcccctgtcccctggggctgtgggtgtccctgaatgtcagggccatgggagggcccctgggcttcaggggttggggaaagtgaacactctgctctttgtccaccttcgggaggacaccttcaaatgctgaccctgggcccctaactgacctgagacttcagagcttcttgggaggagctggggtcccccagcggagcctgggatggagcagggatggctgccccagggagggggcggtggggccttccatcctgctctgccctcctcgtcctctggccccagctcagtcctgtccatctccagctctaaccatttttgtcccgacactggctctccctctaccttctgtccttgtctgccactggtctcccgtgctctggggtctctgcactgctggctgcctcccgcttctctcccctctccctctgccgtcctgtctcctttgcccagtctctccttgtttctcttctcctccttccttctctccacctccccatagccgagcttggaaaagtcagacagacctctgaggtctcatcctggagctgccaccagcccagcctccctgggacctgtcttcactgcctggggccctgggagccagggaggctccctgaggctgagtgaacactgggcgctgcacctgcctctcccacgtcctcggccccactcccgcaggtgcagctggctggtgacgaaggccggagctgggaccagcagctcccactgggtatggtggtttctctcagggagcctcgtcatcgtcattgtttgctccacagttggcctaatcatatgtgtgaaaagaagaaagccaaggggtgagcacacggcggccccatcagggctcatgtccccagccgtcacctcttggagctctgtcaccccaagcctgggaggtggccccagagcttttccaggatccgcggctcctcccagggcagccactgcaggctggggcaggtgggctttctgctgtggccagagcccaggtgtcagctggcctccctgggggaagggaaggtgggacccctgaccgtggagccctcagccacccctgcccacgcactctatgaccctgtgctcctgcctgccccctgtgggatgtggggagcaggacaggccctgctcagctgggagaagctctgggctgagggtcaacagccgccctgctggggacaaggctttgtcctcattgaggagagtaaggccattcattcattcattcattcatccacctatccgccctggtctgggcacctgtgctgtgcctggcctcctgtgcctggcctcctgggcactgaccccgctgtgtggacccggctgtggccctgggagccctgtgcacagcccccggggacgcagcttctaagcattgaggtctgaagggaaagtcagccccatcctccagccaggcggcagcaaagccacctgatcctcacccggggcctccaatgcggggaggtctcggggcctcaggctctagggtaggccgggcagcagcttagtctcacccaactgggcacctgctggtatggtgggcagggcctctccactgtgaagcgcttgttcccctcccatagatgacggttgaattagggttagttatgcacttgggggcctcagctggggaggtgggccgggcgcccccagtcctatcacccatgctgggcctcctggggacaggctgggctagcagtcccaacacagttggcctcctctgctctcagagagggtcagtcccttggggacggtctcccagggagaagcaggagttgtgcctccgccaccgctgtgagaccattgccatgagcctgtgtcccctgatcagacactgcccctccctgacctgtgtgtctgtgtattgcaggtgatgtagtcaaggtgatcgtctccgtccaggtattgatcctcctccccctctccctcccccctccaccttcccacctcccctctccccgctggggctggtgtttctggtgtacatggtgggggctcccagttctctgagggtcctgagtctttcaagtacagccacggtagctcaggaaagaacccaccccctcaaactgaaagcagtaaaatgaacccgagaacctggagtcccaggggggcctgagcaggcagggtctccacgattcgtgtgctcacagcggaaaagacaggaggcagaaggtgaggccacagtcattgaggccctgcaggcccctccggacgtcaccacggtggccgtggaggagacaataccctcattcacggggaggagcccaaaccactgacccacagactctgcaccccgacgccagagatacctggagcgacggctgctgaaagaggctgtccacctggcggaaccaccggagcccggaggcttgggggctccgccctgggctggcttccgtctcctccagtggagggagaggtggggcccctgctggggtagagctggggacgccacgtgccattcccatgggccagtgagggcctggggcctctgttctgctgtggcctgagctccccagagtcctgaggaggagcgccagttgcccctcgctcacagaccacacacccagccctcctgggccagcccagagggcccttcagaccccagctgtctgcgcgtctgactcttgtggcctcagcaggacaggccccgggcactgcctcacagccaaggctggactgggttggctgcagtgtggtgtttagtggataccacatcggaagtgattttctaaattggatttgaattcggctcctgttttctatttgtcatgaaacagtgtatttggggagatgctgtgggaggatgtaaatatcttgtttctcctcaaactgtcacctcccggtgtttcttgctgaacaaggagttccaggatggctgctgggctgttcgggggacccctgccctcctcccgtcatgcctgggggttcactccacccagagaggagccctggccgccccttcatatcccaacagctgagctctcagtgggctcttctgacctctgtggctccgtccgaggctattgctgtggattctgatgctcaaatggtgtcagatttgcccagtaaaaaccccagatctacatctgacctacacttcccagctgtgtccaccgagaaaccccagtatcagtgacgcctgctgtgcccagccctctccacctgctccgggaacccgccaggcccaggtcccgctggcaggggcttcaccaggcctctgagccacacattcatttaatggtcgggatgaggcccctttccccacatctgaagttagaagcggtgaggggaatgaccctgcagccatgccatgaggatggaggccacatagcccctccgagcatgcccgctccaccccgccctaccccctctcctttccttgtcacctgcctccagcagagcccccaggctgagccacccaccccaactcctctcctgccaccccttgtcctgtggaagctttggcttagcgtcctggggtgtggagaggcccatgcaggccaggtggagccctgggcccctagaaagcagcacttctggctgccccaccccgtgtcaccctctccccaactggaggcgtggtctccagggaccacgggcctccctgtgcatggaccggctcctgaccaccgtccagggtcattgccagggtaccttttcagaggctgaccccatagacctggctgccccccagtgctagatgggagccaagcacagcctgcccttctgcccacagtcccgggggcaggtgggagcatggggccatggagtgagcgggcaggggtggcagagggctccctggtcaggggccccaacttcccttcccccagggaggccacctgacatctgggctccaggcacagcaggaagcccacctgccccaacctgtagctcctcctcctgggaggagccatggatcctggaaaagctctggggccacctcccaggtttggggggacagagctccaagagacgacggctggggacacgagccctcatggggccgctgtgtgctcaccccttgattttcttcttttcatgcatgagattaggccaagtgtggagaaatcaatgatgttgacgatgaggctccctgagagaaatcacacccagcgggagctgctgctcccaggtctggcctcggtcaccagccacctgctgcatccgcgggagtggggccgaggacatgggagtggcaggtgcagcccccggtactcactcagccccagggagtgtccctggctcccagggctctgggaggtgagggcaggtcccgggggaggctgggttagtggcagctccgggatgagacctcagaggtctgtctgacttgtccaagcccggctatggggaggtggggggaaggaaggaagaggagagaaataaggagaggctgggcaaagaagacaggacggcagagggagaggggagagaagtgggaggcagccagcagcgcagggccctgagagtatttcagcggcaccgctgtcctgggccgcccggtgccacatctttgaaaacagttgtttaatttaagcttgtccactcagtagctgttgaatgtgggaggttatcttgttctattcaagttgctataaaaataaaaactaccatagactgggtggcttaacaagaacagaaattcggcagggcgaggtggctcacgcctgtaatccccacactttgggaggccgaagcgggcagatcatttgaagtcagaagtttgagaccagcctggccaacagggtgaaaaccggcctctactaaaaatacaaaaactaggtgggcatggtggcgggtgcctgtaatcccagctactcgggaggctgaggcaggagaatcgctagaacccaggaggcagaggttgcagtgagctgagatcccaccactgcattccagcctgggcaagtgagcgagactccatctcaaaaaataaaagaacaggaatttatttctcacatttctggaggctggaggtccaagatcaaggtgccggtagattcggggtctggtgagggtctcttcctggttcctagatggctcctcattgtgtcttgacacagtggtcggggtgagggagccttctaggtctcttttttaagggcactaacccattcctggggcttccgccttcaccaaccacctaaacacctcacctcctccgtgaggtcttctctgattgctgagtaagccctgtccccgctccctgttccctgtgtccgcccgccttgaccctccaccccttttctcccttttctgtggtctgcccgctctcctggaatgcagactccagcagtccagggtgttacctcccaggcagcaggaggaaatgtcccaggctcccgacgcagcgcctagcgcccccggctaagtacagcactcactccttcatccattcaatccattcagtgtgggctgtcccagcaccagcaccgccaggccttgtgcagcaaaccagggtcatcagggagggaatgaggcagcccaaggaggcgggagacggggccctctccagcccccagcggtccccaccgacccggttgcccacaggatatcaccgcccccatcccagggcccaccagaaccaacagggagagagaggcaggtgagcaccccccagccccgcgcctcctgtcaaggggactccccagacacaatggtccctggtggcccacggcctctcctccctacacccccatgacctgggcccagggacacagggcccctccccactcctgtcacagccagggcctgagcccagagaccccaggatcccactgggcgatgccctccccacgaactcagggccaggggccaggccgcggatttatttatttatttatttatttatttatttatttatttattttgagacggagtctcgctctgtcacccagactagagtgcagtggcaccatctcggctcactgcaacctccgcctcccgggttcaagcgattctcctgcctcagctgcctgagtagctgggattacaggcgcctataactgcgcctggctaatttttgtatttttagtatagacggggtttcaccatcttggccaggctgggttagaactcctgatctcgtgatccacccacctcagcctcccaaggtgctgggattacaggcgtgagccaccacacccggcttcaggcaggggatttagagggcattctgggcacacctccccccggggcagatggggaaactgaggctgagactggtcagtgtcacgggcacaaaacacagaccctcacccccaggctgggcctccccccatcactctgcaacagctgaggagccccaggcccccaagagtccagcaccgcatcaccccactgccctccgtgaggccctccacacagccccgacctgggtctccatggatccccacagggtcagccccacaccccaacctcccggcagggccgtctccaggggactgtccagaaacccccaaagatgcttcccttttctgttgatgggagcccctgggcacagaggatgggacagcggctgtgggtacccgagggctggagccacaccctaagggatggagggcagggtccggggcccagttaagggctccccctccactcctgcgccttcaaggtcggcctgcacctcccctgctctgtgccagtgcaggccaggcagggggctgaggccgaggcctggccattgccctcctggtcacgatctggtgaaggatttgagtccagaagccaaacgtctacagtcgtgtggtgcggacactcaggatggactgcccaggccatggggggctctgaatgaagaggaacctgcgggggcgaggtgggctgcgcgtctgcaagaaagtgcatgagttgagtgctgctgcagagggaagctggggtccaccgctggtgagcggggaggggacgggacacagaaccggccgtggcccaccccgagacggaggcgcagacaccaggcccgttctgtgctctggaggctttgggcagctgtcaggctagtggacggtgtgcagagcagatggaggcgtgaggaggcggctccggggtcacctaggtgggcagccctcacaggggaggccgagggggagggcaggagggcggagcaggcggcggtgcaggaggcccgtggaacttggagggctctgtgtccagctctcatggcccagggcgggggcagctccaaggcctcgggcttggggacagaagggagaggacttgggggttgggggtggtcagagcattgtgggagggatctggggcagctggggcttcccagagggtgaggtgtctgctgggaattggggcagccccaggcgtccccaggcctccagcccagccccggttcctccccgctgcaggccagggtatcaattgcctgctgggaaacctcagggtgcctctgtctcaagtgcctgcccctgacactcctggccctgggctccccccgcctccccgtccgtctgctttccccacctcctcccctcccctggccgtctttctgactcggggatggcgtcacctctcaccccaaatcaggaccctgggccccagctctgttccccacctcaccttccttgtgaccaactcctgacctcccatgggcttggggtgtctgtggccggaacattcctcagaccctctcctccagccccactctgtcccaccacccaggcatcccccacctgggttccagccctccaaggggccccacgctctgtgtccatgatcaggacactcacacgcacccagctcgcgcccttccttccagacattcgagctctggaagctcacagtcaccctagcttagtgcacagccacaggccaggcaccttcaacatccccaccttccaggtgaggaaaccgaggcaccgagagctgggggccaggccagggggtctccctggggggagcagaggagtgtcggacctcagaagaggctctgggggtctgagccgccactgggcgctgccttccaggttcagcagggacagagctcagggggaaggcacctcccgtcttggttcaatacatggacccctgaccctgggaaagggactgagccaggggaggcctcaggtcactgcaccatgaagttgtggggagctgcgggggcctctgggctccgagctgggcaggcacagcgtggggaccacgtgctgaggggaagaagcgtgccagggtggatgtctcagtgcacacacaggaacgtgaaatggctgagccggcccagagaggcagcggagcgtgtgcggggtggccggcggagaagcagcaggatcccaggcgggagggcacggccttctgagaggcaggttgcaggacaatactcagtgttttgatccaggaggtcctattagggcgtttcattgataaacgcacatttgaggtggagggtggccagtgtagaatgtgcctggcagctttcacagcaaaggagaattctagaaccaaccgaagtgcccctctgaagggagctggtcccgtccgttccagccgccgtggagtaacacagccagcagtttccctcctgccacgaaagctcgagactgaaactcaggatgaactgttttcagcccgggtcaccccagccctggggtggaggcccattgaggatggccgagcaggggcgggcatccaggcaggtccagcagtcctggcgggctgaggagaaggaggtcagggctcagggaggcatccgcagagggacctggcaggcagagctccggaaaggagggaactgcacagacagaaagctccagaaggctgcctgagggtctctgaggcctccggagtcgggcgccatgcatgtggaaggtggactttcagcatgggtgggaccctagggggctgtggacccccggcccctgggactcacaggtgggagacaggagttccgaccgccagggggagagtcctggaggatcctgggctgtcggcagccacccagcagggcccgtcctgggagtggggctggactcttcctgcaggaaaggctgggctggacctgctctaagaggcttcagaaccagccacacgaagaccaaagtgaagagcaaggagctgaactccacgcagaacacagcgcagcgtcctttaaaggaaggcccaaaacaacccaacaaaaatgccaggtgatcaaagccgtcacagcacaatgtccacatccaatgagaaattgctgctacgtccagatgcagggaagagtaaccatgggaatgtgggtcagtagcaacaggcccagaagggcagccacagtggaattgtcaggcgtggaccctgaaatgacaatcacaacgtcctctaaaggaaaatgtaagcctggtgtgagaaacggaggacaaaacaaagagccaggtctgaaatgaataacgtccttgtaggcacaccagtccccctgggcggctgtcacaggacgccgcggtctagctggcttccccgacggaaatgctgtctcaggcctggaggctggaagctggcgtgagggtggcagcaggtttcgctccctgggagctcggctgtggtctgcagatggcatctttccgtgtgtcctcacgcagtcgcttctctgtgtgtgcacttccctgacgtgtctctgtccaaacttcctcgtctgaggaggactccagtcattctggatcagggcccacccatatggcctcattcagccagtcacctctttacagtccaatctcttcatcccatcccattcttagcgtgaattctggagggatcctgttcagccaataacagtaggattaggccaggtgtggtggctcacacctgtaatcccagcactttgggagactgaggcaagaggatctgcccaggagttccagaccagcctgtgcacaggcaaaacctcatctctccaaaaaagacaaaaattagccaggcctggtggcgcacacctggagtcccacttacttgggaggctgaggagggaggatcagttgagcccgtgagccccggaggtcacggctgcagagagccatgatcacaccactgcactccagcctggccgacagaggaggccctgcctcaaaacaaaaacaaaaacaggaggattaacaacagattagacagctcaaaaggaaacaccagtgaacttgaagatatactatcagaatctaccccaaatgaaaaacacacagaaaatgaataaatgaacgtattctcaaagatctcctggaaaatatcgagctgcctaacagaagtgcagttagagtctcagagaaacagaaagaggcaggaacagaaaatcatttgaagaaaaagcagtgaaagttttctaaactacaagaaaactgtgatcccacaaatgcagaaagctcaacagaccccaagaggggtaaatagagaggcatgcactgcacagcaaatcctaatcaatgcccaggaaccagggacacagaggggacctggacaccggggtcaggtgaggccacctttgggtacaaagacgcaaagataagggccgtgcggacttgtccccaggaacagttcaggtcagaaggtgagcaaaacatttttacaatgctgaaagaacatttcacctttgaactccaaacccagtgaatctgtctgtcaaaaatagaccacgctcggtggcctccgcctgtggacccagcaactcggaggccgaggcaggaggatcacttgagccccaggattcaaggccagctctggcaacagagcaagaccttgtctattaagctacaaaaataaatgaactggaggctgggcccagtctaggggactgaggcgggcggataacttgaagtcaggagtttgagatcagcctggccaacatggtgaaatcccatctcagctaaaaatacaaaaattatccaggcatggtggcacatgcctatagtcccagctactctggaggctgaggcatgagaatcgcttgaacctgggatgcaggggttgcagtgagccaagctcccaccactgcactccagcctgggtgacagagtgagaccctatctcaaatatatatatgaaagcaaatcaaagactgaggacatactgacagctgagagaatttctcagcagcagacagatttgcatgacaagaaacatccaaggactttcttcaagcacaaggaagttttttcatagggaaattgtttctttttttttttttgagatggagtctcactctttctccaagctggagtgcagtggtgccatcttggctcactgcaacgtctgcctcctgggttcaagggattctcctccgtcagcctcccatgtagctgtgattacaggtgtgcaccaccatgcctggctaatttttgtatttttagtagagatggggtttcaccatgttggccaggctggtctcgaattcctgacctcaggtgatccgcccaccttggccttccagagtgctgggattacaggcgtgagccaccttgcctggcctcatgtggaaattgaaatctgctcaaaggaattatggatgaaagaaatggcaaatgtgggaggaaatttttttctcatttttaaatatcttcaaaaataataaaatgcttaacgcaaatatgttagtgatgcattgtgacatttaaagcatatacaattaaaacctatgacagtagtataagttatgaaagggaaaggcaagtgtgtgctggtgagattcttctgcatttcccgctgcgtgggaaggtgcaggcatgtttagtggtcacacaacctgaatataggctgtgataagtgcagatggatgtcacaaacccttcaataaccactaaataaggaaaacaaagatgtatcactaagaaggcaaccatggggatgaaatgaaatactacagaaataatcaaacagaaggtaggacaacgggaaatcagaaatatgaaacagcaaataatagaaagatggtgtgcccacatccagctgtataggtaatgactttgaatataaatggcctaaatagtccaattaaatacagaaatggccatatcagatacaaaaccaacagccaactaaaggctgactacaagaaacccactttacattttaagaaatgggctggttaagccaggtgcggtggctcatgcctgtaatcccagcacttagggaggcagaggtgggaggacagcttgagcccaggagttcaagacctgcctgggcaatatagagagaccctcttctgcagaaaaaggggaaaaaaagacacacacacacaaaagagaaatgggctgggtaaaagcaaaaggattgcagctggaaattacaagacagagctgcagagaccagggagtggtgcagaagctgagcccaggagatggcatgcagagtcgccccatgcctcaagtctgcaggtgagacaggatgtgtctttctaaaggtcaggagccaggcaaggactcccatcctaccacctgcactcaacatggtactggaggtcctagccagtgcaataagacaagaaaaagaaatggaaggcatagagattggacacaaagggggaaaaagacattgcctctttgcagagaatgtgctcatgtgtataaaagtcctaagaaatcgacaaaatgcctgtgagaactagtcactttattatcaaggtcacaagatgcaaggccaatattttaaaaactaaacattggaatttgaagtataagggaaacaagaacatatttgcatcaaaaaacaggaaatgcttaggggaaatttaacaaaatacccgcaaggccagtgaaaacgttgtcgagagaagtgaaagaagttctaataactggaaaggcatggcatgtggatacatcagaagaccaagtatgaggaaaatacccattgtcccccaaatggaccaatgcaatcccagtcaacattccagcaggcttggtcgtcgaaatcgagaaactgattctaaacatgtatatgaaaacagacaggacatttaccagccgaaataatagtgaaaaggaagagcgaagttggagtattttcatttcctgacttaaagacttactgtagagcttcagccattgagagagagtggggcgggcatgaggcgtgccaataggtcaatgaaacaggagcggccagagagagacccattcacagatgatgcaagcatttctgacagaggtgtcaaggtaatgcaatgtgaagaaggtagtctttttggcaaacaatttctggaatactggataaatgacaggggacaatggccttaatctttacctacacgacacaaaaaattagcttgaaacgaacgataggcttgaatgtaaagctcaaactataagacttcctgcgaaaaacattggagaaaatatctgtgacctggacgtgggcaaagatttcttagacaggacgcagaacacaagagctacgagagaaaatgtttgaaattgggacttattgacattagcaactcctgctcttggaagtatgctttccaggaaatgaaaaggcaaaccacgcattgggtgacaattccaacactctgagaaaattcttacaagtcaatacgaggacaaacagcactattgttttttaatgggcaagatttgaacttcaccaaagccatgaaagggtggtcagcatgcacagtcattcgggaaatgacgttaaaccactgtgagattccactccacacccgtcacggtgatggagaggaaaagttctgaccataccaagtgtgggaaggacatggggtaattagagctcccacgtgctgctggcaggagcctgaaatggtacagctttggacatcggtttggcaaattcttttagagagaaacacacaccttccctaggacccagcaactccactcctagtaaccaagtgaaatggaaggagttgtcctcagcaaaacgtgtgtgcgaaagttcacagtcactttctcggtgataaccaagagctggaaaccactgcaacacccaccagcaggtgaacgtattaacacactgggctagggccacacaatgagatgctacgtggcaacacaaaatgaaccgtggacacacactgcacggcggatgaatatgcagacatcaggccacgtgaagggagccaggccccgaggcgccacgctttgtgattcaggtgaaattctgggacaggcagatctaacctgctgggagagagaggtcaaggatgatgtggccagggctggggaggggttgggaaggggctcatgttgctggggtgtcaaaacaaagcaaagggccacagacttgggggctcaagaaatggaaacgcaatgttgtcatggttctgggggctggaagtccaagatgcaggggcaggtggggttggttccctcctgggcctgcagatggtacctgctccctatgtcctcacagggtggtccctctgcccccaggacactggcgcctcttcttcctataaggacaccattcctcctgtgtagtgctggccatcattacgtctcttcaccttaatcagttctttgagggccccatttccaaacatagtcacactggggtgtagggcttagacctgtgaattgggggaaacgtcattcagtccatagaagctcaacaagggaactttcttggaaatgtcttcatcacaaaagtgatggtggttatgtgagggcaggcacttgccagactcaaggctcacaggctcacagc

SEQ ID NO: 951 - DNA, 1558 bp, Homo sapiens
ctggtgcctgccttggggctccgggactgtgggctgtctccatccggaggtctccctaccaccaggctctccgcagcaatggcgctgagttcctctgctggagttcatcctgctagctgggttcccgagctgccggtctgagcctgaggcatggagcctcctggagactgggggcctcctccctggagatccacccccaaaaccgacgtcttgaggctggtgctgtatctcaccttcctgggagccccctgctacgccccagctctgccgtcctgcaaggaggacgagtacccagtgggctccgagtgctgccccaagtgcagtccaggttatcgtgtgaaggaggcctgcggggagctgacgggcacagtgtgtgaaccctgccctccaggcacctacattgcccacctcaatggcctaagcaagtgtctgcagtgccaaatgtgtgacccagccatgggcctgcgcgcgagccggaactgctccaggacagagaacgccgtgtgtggctgcagcccaggccacttctgcatcgtccaggacggggaccactgcgccgcgtgccgcgcttacgccacctccagcccgggccagagggtgcagaagggaggcaccgagagtcaggacaccctgtgtcagaactgccccccggggaccttctctcccaatgggaccctggaggaatgtcagcaccagaccaagtgcagctggctggtgacgaaggccggagctgggaccagcagctcccactgggtatggtggtttctctcagggagcctcgtcatcgtcattgtttgctccacagttggcctaatcatatgtgtgaaaagaagaaagccaaggggtgatgtagtcaaggtgatcgtctccgtccagcggaaaagacaggaggcagaaggtgaggccacagtcattgaggccctgcaggcccctccggacgtcaccacggtggccgtggaggagacaataccctcattcacggggaggagcccaaaccactgacccacagactctgcaccccgacgccagagatacctggagcgacggctgctgaaagaggctgtccacctggcggaaccaccggagcccggaggcttgggggctccgccctgggctggcttccgtctcctccagtggagggagaggtggggcccctgctggggtagagctggggacgccacgtgccattcccatgggccagtgagggcctggggcctctgttctgctgtggcctgagctccccagagtcctgaggaggagcgccagttgcccctcgctcacagaccacacacccagccctcctgggccagcccagagggcccttcagaccccagctgtctgcgcgtctgactcttgtggcctcagcaggacaggccccgggcactgcctcacagccaaggctggactgggttggctgcagtgtggtgtttagtggataccacatcggaagtgattttctaaattggatttgaattcggctcctgttttctatttgtcatgaaacagtgtatttggggagatgctgtgggaggatgtaaatatcttgtttctcctcaaa

SEQ ID NO: 952 - protein, 283 aa, Homo sapiens
MEPPGDWGPPPWRSTPKTDVLRLVLYLTFLGAPCYAPALPSCKEDEYPVGSECCPKCSPGYRVKEACGELTGTVCEPCPPGTYIAHLNGLSKCLQCQMCDPAMGLRASRNCSRTENAVCGCSPGHFCIVQDGDHCAACRAYATSSPGQRVQKGGTESQDTLCQNCPPGTFSPNGTLEECQHQTKCSWLVTKAGAGTSSSHWVWWFLSGSLVIVIVCSTVGLIICVKRRKPRGDVVKVIVSVQRKRQEAEGEATVIEALQAPPDVTTVAVEETIPSFTGRSPNH

SEQ ID NO: 953 - DNA, 2492 bp, Homo sapiens
cacgagggactcactggtgcctgccttggggctccgggactgtgggctgtctccatccggagccgcagcaatggcgctgagttcctctgctggagttcatcctgctagctgggttcccgagctgccggtctgagcctgaggcatggagcctcctggagactgggggcctcctccctggagatccacccccaaaaccgacgtcttgaggctggtgctgtatctcaccttcctgggagccccctgctacgccccagctctgccgtcctgcaaggaggacgagtacccagtgggctccgagtgctgccccaagtgcagtccaggttatcgtgtgaaggaggcctgcggggagctgacgggcacagtgtgtgaaccctgccctccaggcacctacattgcccacctcaatggcctaagcaagtgtctgcagtgccaaatgtgtgacccagatattggttccccctgtgacctcaggggaagaggtcacctggaggctggtgcccacctgagtccaggcagacagaaaggggaaccagacccagaggtggcctttgagtcactgagcgcagagcctgtccatgcggccaacggctctgtccccttggagcctcatgccaggctcagcatggccagtgctccctgcggccaggcaggactgcacctgcgggacagggctgacggcacacctgggggcagggcctgagcctacagggaggcacagggcaggtgggctagccatgaacagaagaggaagctggagtgctttgggggttcatgcatgtaggctgggatttggggctcacacctcaacctgcatgcccagttccatgcccctcccctcttgtgaaagcacctgtctacttgggctgaggatgtgggggcacaggtggcaggtgaggctgccctcaggaggggcccaggcccagcttgtaccccacctccaccagtacctgaagaagtggggctctcaccctacctgcctctgccattggaatggcctggtttgcacagatgggaaacccgtttgcggggtgggtgtctgggtgggcacgtggggcgaggacctgcctgcgggaccctgccctggaactgacagtgcaagctcggcgtcctgcccatctgggcagaaggctggtttctcccatcaacgaagccctcccaggaccttcctgcaagccctcgtcccacacgcagctctgccgtcccttggtgtccctcccggcctcaggtcctccatgctgggtacctctgggcacctcgtttggctgagccaggggttcagcctggcagggcgccctggcagcagtccttggcctgtggatgctgtcctggcccgtggatggtgtcccggcctccacgtacccctctcagcccctcctcttggactccagccatgggcctgcgcgcgagccggaactgctccaggacagagaacgccgtgtgtggctgcagcccaggccacttctgcatcgtccaggacggggaccactgcgccgcgtgccgcgcttacgccacctccagcccgggccagagggtgcagaagggaggcaccgagagtcaggacaccctgtgtcagaactgccccccggggaccttctctcccaatgggaccctggaggaatgtcagcaccagaccaagtgcagctggctggtgacgaaggccggagctgggaccagcagctcccactgggtatggtggtttctctcagggagcctcgtcatcgtcattgtttgctccacagttggcctaatcatatgtgtgaaaagaagaaagccaaggggtgatgtagtcaaggtgatcgtctccgtccagcggaaaagacaggaggcagaaggtgaggccacagtcattgaggccctgcaggcccctccggacgtcaccacggtggccgtggaggagacaataccctcattcacggggaggagcccaaaccactgacccacagactctgcaccccgacgccagagatacctggagcgacggctgctgaaagaggctgtccacctggcggaaccaccggagcccggaggcttgggggctccgccctgggctggcttccgtctcctccagtggagggagaggtggggcccctgctggggtagagctggggacgccacgtgccattcccatgggccagtgagggcctggggcctctgttctgctgtggcctgagctccccagagtcctgaggaggagcgccagttgcccctcgctcacagaccacacacccagccctcctgggccagcccagagggcccttcagaccccagctgtctgcgcgtctgactcttgtggcctcagcaggacaggccccgggcactgcctcacagccaaggctggactgggttggctgcagtgtggtgtttagtggataccacatcggaagtgattttctaaattggatttgaattcggctcctgttttctatttgtcatgaaacagtgtatttggggagatgctgtgggaggatgtaaatatcttgtttctcctcaaa

SEQ ID NO: 954 - protein, 199 aa, Homo sapiens
MVSRPPRTPLSPSSWTPAMGLRASRNCSRTENAVCGCSPGHFCIVQDGDHCAACRAYATSSPGQRVQKGGTESQDTLCQNCPPGTFSPNGTLEECQHQTKCSWLVTKAGAGTSSSHWVWWFLSGSLVIVIVCSTVGLIICVKRRKPRGDVVKVIVSVQRKRQEAEGEATVIEALQAPPDVTTVAVEETIPSFTGRSPNH

SEQ ID NO: 955 - DNA, 3459 bp, Homo sapiens
ctggtgcctgccttggggctccgggactgtgggctgtctccatccggaggtctccctaccaccaggctctgtggggcagggaagcccagtggggtgcagggagccaggaagctggggtggggtcagggcagggtccacagggagaccgggcgaggctggcagccttcccagtccgcgcagcgtctctgcagggggagcaagagctgcccttccacccctcccaggggacgggtaggggcactctgggcttttcccaccccctcacgcagggacacaggcctggtgggtctatgactgaaattggccagaccgcattctggtggttttattcggaagggaagtttaccctgttcagcagaagctgagatgggaacaggaaacccacagggcccctttattcggcaaaaatgtcagtcagcgccccggggagcagccgagggtccctgagtgtgtgagtgaggtggggaaacacagatggactttggggggctcccccttctacaggaaacccggagtggactggaatggtgcagggggagaactcgcccctcccatcgggcgcctccttcataccggcccttcccctcggctttgcctggacagctcctgcctcccgcagggcccacctgtgtcccccagcgccgctccacccagcaggcctgagcccctctctgctgccagacaccccctgctgcccactctcctgctgctcgggttctgaggcacagcttgtcacaccgaggcggattctctttctctttctctttctcttctggcccacagccgcagcaatggcgctgagttcctctgctggagttcatcctgctagctgggttcccgagctgccggtctgagcctgaggcatggagcctcctggagactgggggcctcctccctggagatccacccccaaaaccgacgtcttgaggctggtgctgtatctcaccttcctgggagccccctgctacgccccagctctgccgtcctgcaaggaggacgagtacccagtgggctccgagtgctgccccaagtgcagtccaggttatcgtgtgaaggaggcctgcggggagctgacgggcacagtgtgtgaaccctgccctccaggcacctacattgcccacctcaatggcctaagcaagtgtctgcagtgccaaatgtgtgacccaggtaagaggccagcacagccggcccagcctccgcttgggcagcctggatgcccccgcaccctgcaccctctctccatggccacagtgccccaggaaggccccggctgccccaggccaggtcccaaccccatctccatggatgcaccctgcaggggacgccttgaggtcagcctccggcccccgtccacctctgtctcacctctcactttgtcaccgccaggtgggccatcctgagcttggcgactgacccttatccctcgtccttggctcctctggtgcccggggtgggtgcccagacctctcctgtgcccacgtccctagctgcaaagtggaatgggatggtgctgggactctccggccggcactcgggcctgctgcttccccacagggcttcttgtccctttctcctccagatattggttccccctgtgacctcaggggaagaggtcacctggaggctggtgcccacctgagtccaggcagacagaaaggggaaccagacccagaggtggcctttgagtcactgagcgcagagcctgtccatgcggccaacggctctgtccccttggagcctcatgccaggctcagcatggccagtgctccctgcggccaggcaggactgcacctgcgggacagggctgacggcacacctgggggcagggcctgagcctacagggaggcacagggcaggtgggctagccatgaacagaagaggaagctggagtgctttgggggttcatgcatgtaggctgggatttggggctcacacctcaacctgcatgcccagttccatgcccctcccctcttgtgaaagcacctgtctacttgggctgaggatgtgggggcacaggtggcaggtgaggctgccctcaggaggggcccaggcccagcttgtaccccacctccaccagtacctgaagaagtggggctctcaccctacctgcctctgccattggaatggcctggtttgcacagatgggaaacccgtttgcggggtgggtgtctgggtgggcacgtggggcgaggacctgcctgcgggaccctgccctggaactgacagtgcaagctcggcgtcctgcccatctgggcagaaggctggtttctcccatcaacgaagccctcccaggaccttcctgcaagccctcgtcccacacgcagctctgccgtcccttggtgtccctcccggcctcaggtcctccatgctgggtacctctgggcacctcgtttggctgagccaggggttcagcctggcagggcgccctggcagcagtccttggcctgtggatgctgtcctggcccgtggatggtgtcccggcctccacgtacccctctcagcccctcctcttggactccagccatgggcctgcgcgcgagccggaactgctccaggacagagaacgccgtgtgtggctgcagcccaggccacttctgcatcgtccaggacggggaccactgcgccgcgtgccgcgcttacgccacctccagcccgggccagagggtgcagaagggaggcaccgagagtcaggacaccctgtgtcagaactgccccccggggaccttctctcccaatgggaccctggaggaatgtcagcaccagaccaagtgcagctggctggtgacgaaggccggagctgggaccagcagctcccactgggtatggtggtttctctcagggagcctcgtcatcgtcattgtttgctccacagttggcctaatcatatgtgtgaaaagaagaaagccaaggggtgatgtagtcaaggtgatcgtctccgtccaggccaagtgtggagaaatcaatgatgttgacgatgaggctccctgagagaaatcacacccagcgggagctgctgctcccaggtctggcctcggtcaccagccacctgctgcatccgcgggagtggggccgaggacatgggagtggcaggtgcagcccccggtactcactcagccccagggagtgtccctggctcccagggctctgggaggtgagggcaggtcccgggggaggctgggttagtggcagctccgggatgagacctcagaggtctgtctgacttgtccaagcccggctatggggaggtggggggaaggaaggaagaggaagaagtgggaggcagccagcagcgcagggccctgagagtatttcagcggcaccgctgtcctgggccgcccggtgccacatctttgaaaacagttgtttaatttaagcttgtccactcagtagctgttgaatgtgggaggttatcttgttctattcaagttgctataaaaataaaaactaccatagactggg

SEQ ID NO: 956 - protein, 172 aa, Homo sapiens
MVSRPPRTPLSPSSWTPAMGLRASRNCSRTENAVCGCSPGHFCIVQDGDHCAACRAYATSSPGQRVQKGGTESQDTLCQNCPPGTFSPNGTLEECQHQTKCSWLVTKAGAGTSSSHWVWWFLSGSLVIVIVCSTVGLIICVKRRKPRGDVVKVIVSVQAKCGEINDVDDEAP

SEQ ID NO: 957 - DNA, 1517 bp, Homo sapiens
ctgggacctgctctgggcaagcacaggcgccgcagcaatggcgctgagttcctctgctggagttcatcctgctagctgggttcccgagctgccggtctgagcctgaggcatggagcctcctggagactgggggcctcctccctggagatccacccccaaaaccgacgtcttgaggctggtgctgtatctcaccttcctgggagccccctgctacgccccagctctgccgtcctgcaaggaggacgagtacccagtgggctccgagtgctgccccaagtgcagtccaggttatcgtgtgaaggaggcctgcggggagctgacgggcacagtgtgtgaaccctgccctccaggcacctacattgcccacctcaatggcctaagcaagtgtctgcagtgccaaatgtgtgacccagccatgggcctgcgcgcgagccggaactgctccaggacagagaacgccgtgtgtggctgcagcccaggccacttctgcatcgtccaggacggggaccactgcgccgcgtgccgcgcttacgccacctccagcccgggccagagggtgcagaagggaggcaccgagagtcaggacaccctgtgtcagaactgccccccggggaccttctctcccaatgggaccctggaggaatgtcagcaccagaccaagtgcagctggctggtgacgaaggccggagctgggaccagcagctcccactgggtatggtggtttctctcagggagcctcgtcatcgtcattgtttgctccacagttggcctaatcatatgtgtgaaaagaagaaagccaaggggtgatgtagtcaaggtgatcgtctccgtccagcggaaaagacaggaggcagaaggtgaggccacagtcattgaggccctgcaggcccctccggacgtcaccacggtggccgtggaggagacaataccctcattcacggggaggagcccaaaccactgacccacagactctgcaccccgacgccagagatacctggagcgacggctgctgaaagaggctgtccacctggcggaaccaccggagcccggaggcttgggggctccgccctgggctggcttccgtctcctccagtggagggagaggtggggcccctgctggggtagagctggggacgccacgtgccattcccatgggccagtgagggcctggggcctctgttctgctgtggcctgagctccccagagtcctgaggaggagcgccagttgcccctcgctcacagaccacacacccagccctcctgggccagcccagagggcccttcagaccccagctgtctgcgcgtctgactcttgtggcctcagcaggacaggccccgggcactgcctcacagccaaggctggactgggttggctgcagtgtggtgtttagtggataccacatcggaagtgattttctaaattggatttgaattcggctcctgttttctatttgtcatgaaacagtgtatttggggagatgctgtgggaggatgtaaatatcttgtttctcctcaaa

SEQ ID NO: 958 - protein, 283 aa, Homo sapiens; identical to SEQ ID NO: 952

SEQ ID NO: 959 - DNA, 1550 bp, Homo sapiens
cacgagggactcactggtgcctgccttggggctccgggactgtgggctgtctccatccggagccgcagcaatggcgctgagttcctctgctggagttcatcctgctagctgggttcccgagctgccggtctgagcctgaggcatggagcctcctggagactgggggcctcctccctggagatccacccccaaaaccgacgtcttgaggctggtgctgtatctcaccttcctgggagccccctgctacgccccagctctgccgtcctgcaaggaggacgagtacccagtgggctccgagtgctgccccaagtgcagtccaggttatcgtgtgaaggaggcctgcggggagctgacgggcacagtgtgtgaaccctgccctccaggcacctacattgcccacctcaatggcctaagcaagtgtctgcagtgccaaatgtgtgacccagccatgggcctgcgcgcgagccggaactgctccaggacagagaacgccgtgtgtggctgcagcccaggccacttctgcatcgtccaggacggggaccactgcgccgcgtgccgcgcttacgccacctccagcccgggccagagggtgcagaagggaggcaccgagagtcaggacaccctgtgtcagaactgccccccggggaccttctctcccaatgggaccctggaggaatgtcagcaccagaccaagtgcagctggctggtgacgaaggccggagctgggaccagcagctcccactgggtatggtggtttctctcagggagcctcgtcatcgtcattgtttgctccacagttggcctaatcatatgtgtgaaaagaagaaagccaaggggtgatgtagtcaaggtgatcgtctccgtccagcggaaaagacaggaggcagaaggtgaggccacagtcattgaggccctgcaggcccctccggacgtcaccacggtggccgtggaggagacaataccctcattcacggggaggagcccaaaccactgacccacagactctgcaccccgacgccagagatacctggagcgacggctgctgaaagaggctgtccacctggcggaaccaccggagcccggaggcttgggggctccgccctgggctggcttccgtctcctccagtggagggagaggtggggcccctgctggggtagagctggggacgccacgtgccattcccatgggccagtgagggcctggggcctctgttctgctgtggcctgagctccccagagtcctgaggaggagcgccagttgcccctcgctcacagaccacacacccagccctcctgggccagcccagagggcccttcagaccccagctgtctgcgcgtctgactcttgtggcctcagcaggacaggccccgggcactgcctcacagccaaggctggactgggttggctgcagtgtggtgtttagtggataccacatcggaagtgattttctaaattggatttgaattcggctcctgttttctatttgtcatgaaacagtgtatttggggagatgctgtgggaggatgtaaatatcttgtttctcctcaaa

SEQ ID NO: 960 - protein, 283 aa, Homo sapiens; identical to SEQ ID NO: 952

SEQ ID NO: 961 - DNA, 2271 bp, Homo sapiens
ctggtgcctgccttggggctccgggactgtgggctgtctccatccggaggtctccctaccaccaggctctgtggggcagggaagcccagtggggtgcagggagccaggaagctggggtggggtcagggcagggtccacagggagaccgggcgaggctggcagccttcccagtccgcgcagcgtctctgcagggggagcaagagctgcccttccacccctcccaggggacgggtaggggcactctgggcttttcccaccccctcacgcagggacacaggcctggtgggtctatgactgaaattggccagaccgcattctggtggttttattcggaagggaagtttaccctgttcagcagaagctgagatgggaacaggaaacccacagggcccctttattcggcaaaaatgtcagtcagcgccccggggagcagccgagggtccctgagtgtgtgagtgaggtggggaaacacagatggactttggggggctcccccttctacaggaaacccggagtggactggaatggtgcagggggagaactcgcccctcccatcgggcgcctccttcataccggcccttcccctcggctttgcctggacagctcctgcctcccgcagggcccacctgtgtcccccagcgccgctccacccagcaggcctgagcccctctctgctgccagacaccccctgctgcccactctcctgctgctcgggttctgaggcacagcttgtcacaccgaggcggattctctttctctttctctttctcttctggcccacagccgcagcaatggcgctgagttcctctgctggagttcatcctgctagctgggttcccgagctgccggtctgagcctgaggcatggagcctcctggagactgggggcctcctccctggagatccacccccaaaaccgacgtcttgaggctggtgctgtatctcaccttcctgggagccccctgctacgccccagctctgccgtcctgcaaggaggacgagtacccagtgggctccgagtgctgccccaagtgcagtccaggttatcgtgtgaaggaggcctgcggggagctgacgggcacagtgtgtgaaccctgccctccaggcacctacattgcccacctcaatggcctaagcaagtgtctgcagtgccaaatgtgtgacccagccatgggcctgcgcgcgagccggaactgctccaggacagagaacgccgtgtgtggctgcagcccaggccacttctgcatcgtccaggacggggaccactgcgccgcgtgccgcgcttacgccacctccagcccgggccagagggtgcagaagggaggcaccgagagtcaggacaccctgtgtcagaactgccccccggggaccttctctcccaatgggaccctggaggaatgtcagcaccagaccaagtgcagctggctggtgacgaaggccggagctgggaccagcagctcccactgggtatggtggtttctctcagggagcctcgtcatcgtcattgtttgctccacagttggcctaatcatatgtgtgaaaagaagaaagccaaggggtgatgtagtcaaggtgatcgtctccgtccagcggaaaagacaggaggcagaaggtgaggccacagtcattgaggccctgcaggcccctccggacgtcaccacggtggccgtggaggagacaataccctcattcacggggaggagcccaaaccactgacccacagactctgcaccccgacgccagagatacctggagcgacggctgctgaaagaggctgtccacctggcggaaccaccggagcccggaggcttgggggctccgccctgggctggcttccgtctcctccagtggagggagaggtggggcccctgctggggtagagctggggacgccacgtgccattcccatgggccagtgagggcctggggcctctgttctgctgtggcctgagctccccagagtcctgaggaggagcgccagttgcccctcgctcacagaccacacacccagccctcctgggccagcccagagggcccttcagaccccagctgtctgcgcgtctgactcttgtggcctcagcaggacaggccccgggcactgcctcacagccaaggctggactgggttggctgcagtgtggtgtttagtggataccacatcggaagtgattttctaaattggatttgaattcggctcctgttttctatttgtcatgaaacagtgtatttggggagatgctgtgggaggatgtaaatatcttgtttctcctcaaa

SEQ ID NO: 962 - protein, 283 aa, Homo sapiens; identical to SEQ ID NO: 952

SEQ ID NO: 963 - DNA, 203132 bp, Mus musculus
  misc_feature (1)...(203132): n = A,T,C or G
ccaacgtcaaaaattcaaagaggtaaaaagtaattgtatatttttatagagttataatatgatgctttgatctgtgtatatgctgtagagtaattaaattggtgtatgtgttgattttgttttgagatagggtctccctatgtagctcaggctggccttgaactcacaatcctcctgcctttgcattctaagtactgaattataggtttccttcacctggctttatctcatacttgttaacttttgtgtttgtgaatgtgacaagaatatttggaatggtatcttaacaactttgaaatatacaatacttattagtagctactgtcagcatacaataaactcaaatgctctttctgcctgcctaactgaagcctgtgttctttgatccacatgtttccgtgtctacatttttttttttttttttttttttaagatttgcttgatttaaggccgaggatgtagctcagtgacagagttcgggcctagtctgtgtgaggccctgggtttaatctcgagcgctgaaagacagaaaaaaaaaaaaaaagttgtgatagtttctgcacacgcagtgcagtgagcaaaactgaggagctgagcgagctaggtttgactgtactaggataggagcaaggcacggagagaaaatgcccgccgtgaagcaggaagcagaccccacacgcaactggcagcttgcagtcggcctccagaactctgtgagatgcatgtgttgttggagcctaacaggacaggcttattaaaggacatggaactgaggcaagagaaaatgtggtgaagatgtgaacaaacttggtgaaaagaggaaacacaggaagggacaaacaccacacagaatgtataaataggctggcgatgtagttggaggtagagagctggcatagtacacacaggacctgggggtgatagtctgcactgtgcacacatacgtgcacacactcatgcatgcacatgtatgtgtgcttaggactggaagctgagagagactattaactagtaaggaataacttcctcatcatttgggtgaggaggagatggtgggtgaagcctcataggcaatcatgtccctatctattttgagacatattaccataatgacatgggaggctgataggtatgtgaggccatcagactgttatattattcatttattttattttgtgtatgtatgtgtgctgtgtatgtgttttttgtgccatggcacatgtgtggaggtaactccttatttttattttatatatgtgtgtgtgtgtgtataattaattaagagctaacattttgattacattgttcccttccctttcctccctcaaagccctctcaattccccccatctctttcaaattcatggtctttttttcccctctagttattattgcatatatgtatatgtatatatacaaagatacatatatatccctaaatataaccttctcagtccatatgatattagttatatgtgtgtattctttcttcctctctttctctctctctctctctctctctctctctctctctctctctctcagaaccccaagtaggtctcaaactcttgagccttctgtcttagcctcccagggtctgtgactctgagtgttcccctatgtccagcttgagggtttgaagagagagaaatcaaataaatctcttagaaaatgcccaggtgacctctaacacacttgctgggtagcacaaaggatggtggtcatacatttgatgtaagatttgtaggtggtaaaacataggcaggtcaatgagtaggagattctggtgggagccaggagtcattggaacttagacactgaaagcagtgagtccagtggggacacttcgtccttgaccccaccaggaagtctaactttctaacatcccaggcttggtttcttccagagaccaaagtaaataggaaatagagttttgagtacatccttaccaaaatcaaggcttggtccagggtgatgtttccgtgggtaaagttttcaccagctggtaatcatcaaatgctctctgcttggatctactgatgaggatccagtaagattaaaatgcttaggtatgttaattgtatctctaaataaagaaaatgaaaagtttacaaggaatagtcacctcacaacttttggctaaaacgtgtttattaacaaacaaacaaacaaacattaaaaagacaatgacccttgggggctggggtgtggctcacttgggagagtgtctgcctggtgtgcccttaccccaacaggaaggaaactgggtggtgcacacctgtgattccagaactctggaggcggaggcaggaagataaggagcttaagatttcccctggctatatatagggagagttgggggctagtctggggtacagaaggtcctgtcttataaaaaaagatacaatgaatggccccaaagcccctaaggatgggcctcttgtttacttgcactttgcaagtcttcttgagtctctataaactctcgcacagaaggtgaggatagcctgaagttgaccaagggcccacacccatccctgaactcttgaacattttgtgcttgtcaagtcatgagtttagatttataacatttaaagcttttggtacatatcctggatgcctgtgatcctattatgtcagctatctgggcagggagtccttatctaggcccaaactcacaaagagcaaacagaagaaacaaaagagggctagttctttgctgtggaaaatgggaggggtgtagggggtccccttttggtttcagctttcagctacatgggagaacaagccccacccgcacaccatctgctgcgtggagaccacaaagatcccaagtgggtttgttgttattttgaaatgctacaagttttctggcttcattggaacccctgctgtggggaaattgaaggcaggtgaattctggaaacctccatcctgggcctccctgagccgccgcttctcaggaaatggcatgctggcagaggctggtggtttaatgatcacagggaattcgcttcatgttttcatttcaaagccctggcaggactcgggtctaaagcaggtgctcatttggctctctgccctgcacgcagggccatcgaagagtcatttttccttgttaattggaattttgcctgttgcacattttatcagtccagacttaccccttctcagatacagatatagaaaactgtggctctaactttctgccttcaattataatgccgtatgagacgcccgcaagttcgccctggcgtcttcggaagcacactttcgaaatgaagttctaaggcgcccctgacaataggccagctaaagtgaaggtgagcctgcacgctggagtctgtggaccgcgcctgtcacagcagttttggaacagcgtttgctctgtcacacatccttcagagtggttgtgcaattgccctctggctgctcgctgcttgctgttcgctgtgcttgacaaactttaagctcacgtttgggcctgggtgaaaggagcctgtttttgtgaatgagtggaagtcaacagttccactcaacaaactttttattttattttattttattttattttattttattttattttattttattttttattaatctagtcaagttccagagagctttaaaacccaaaacaatgaaataagactttctaacctaggcacggggctcattgtcacctgtggtacagagtacagctgtagatatggactctggagcccagtaatcacctgactcagcctcttgcaggtaagtgactcagcctctctgagcatcctgtcatacttgatgatatgagggtaacagaactgttataggctttattttgctattcacatagacaaggcctcatagagatcaggttggcttcccacttccttacaaagccaaggctgacctcgaacttctgatcattctctctccacctccaaaactgctgggaatgcaggtacctgccatcatacctagtgtctatggtggtaaagataacacctagggcttcatgcatatgaagcaagcactgtgtcaacagagctatgttccccagccctggcacagggtctgattaattaaattcataaattataaagaatatactgagttctatatcaggactatggaaagaaaaaacaaccataggatttttaaaaatgaccagggctttcagaagattggagttcaggggggccagggcgaacctagagcaaacattacggacaaacaggttattacgcattttctcagttgcctgcttatcagtgggatctggagccatgccacaggatgagtcaccgtaagagtgagtccctgcttaggggagggactgttccttgagacagacacgggttctgtaaatcactgggactcggctgtcaaacatctcttgtgcaagtaagatgaagtattaaaaaaaaaaaaaaagtcagttctctttacagctcttcttgggggtgggggagaccatccgtttgcctgaacaagacctgcagaatgacaccaccagttgatgtgggggatgtgggtgggggaaatgtcacaaagccccacccttagatgaagagctgcaggcaattaaccagtcttctctagggatgaacccattggtagttgagtcagttctaaacacatacacataggagcaaccctaagtggacgcaaaaggttctctgtctctctgtctctgtctgtctgtctgtctgtctgtctctctgtctgtctgtctgtctgtctaaaacaataattaaagaagagatcatgaatttgagggtcagtagagggggacatagagttggaagaagaagaagaaggtgtagaaatgaagtaaatgcagtattcaagtatgagattctcaaaaaaaatatttaaagctcaaattaaaaatgaccatttgtgtgcctgctttaaaaaaaaaaaagttttctaccgagtatgaagtcttgaatggcttgtgcctagattcctcagaagggaaggcaggaagatcagtagttctcacattgtgttacacatcaggttacaggacaaagtgggacacttgagaccctgcctcaaaccaaagaaacaataaaagcaaacaaacaaacaaacagaaatggatgaaaccggcaaaaggaaatttctcaagatactacctcggtccaaaggaagatggtctctatggcaacagctgacattcaggccagggaggtagcttagtaggagagaatgcttgatgccctgacctgagtttgatccctaaaatctgcatcatggagagagaaagccaactccagaaagtcaagacatgatatgtgcatacaaataaacaaaggggaaaagatttaaagtgatgctacctctgcattcacagctagtgaattctgaagtgatgtcacctctgcacacacagctagttagtgaatactgattcagtccttttgttttctcatgacgtgtgccctctcatgttgtcaatatggaagcttctggcggtcaagcctgctggttaaggatttgaactcaaggtagataagtattcctacttagtagctacaggcttctgttcgtacacaggacttggagagtgtgttcgtatggatagaacattagtatcctgattggcaaagagtaattgggttttattttttaattttaagttttttttggaaaagtacttcctttttttaaaaaaaatgttttgttttaagatttatttatttattttatgtatgtgaatacattgttgctgtctacagacacaccagaagaggacgtaagatcccattacagatggttgtgagccaccatgtggttgccaggaattgaactcaggacctctagaagagcagttagtaatcttaaccactgagccatctctccagcccagtaactgggttttaaaagtggtgtcatttgggctctatggataggtacttcatcagtcttcaaagacaaaggctatgtaattgaggttggacctcatgatcctcttgccgtatccataccatacttggtaatttaagggttgaattaaataatcctgcccagttcaagcgctcatgtgtgcacttgagactaaaggcatgacttgaggcatcaatgctgtgtactcaagtgtaaagaaatctggaggcctaaagttaaactgtgttcaggcctgggctcactggcctgggtcttgtttcttcaggatattatatctattagcatttgcaataccttagctcccactctcaaacactgcttgtttcttcaggatattgtgtctattagtatttccagtaccttagctctcattctcaaacaatgcttagcacctatcggtaaggtgttgtgttcagtaccttgctgtggctgtggtgaaacaccctgagcaaggcaagttacaggaggcacagtttacttggtttatggtgtaagaatctaccatgtcagggtagaaacgtaaagcaagcattggtgatgctctcatgagcagggagccaagagattgcacctttaatagcaaacaccaaacagaatgaactggaagtggggagaggctgtaagggctcagagacgctccccaccaactgatgtactccccccagcaaagccccatgagtggtgccccatgttccctccccaagcagcaccaccaactgggaaccaagcgttcatgcctgagcctctaggggctggggggtggggtggggcatgactcattcaaatcaccacagatacccaacaaagagagtttcatagtaactcatttgattaatgatataaatcattacaacgaatctctgtagctacatataaacacatggaagaagtgagaagcagttcccgttttctcaagtagtggcttccaataactttctattaaagttcagtccgtgtgtagagcacttagtgtgcatgaaacctgtctccatccccggcaccacataaaatcaggcgtggtggcaatgcctgtaaccctcccaggaatcatgagatggaggcaggaagagctgacgttcaaagtcatcctgggctacacgagacctcatcataaagtgaaaataaatataacagaactcatgctctgtcacagtggctctcaaccttcctagccctgtgaccccttaatataacccctcatgttgtgtgacaccccccctccccataaaatcattccgttgctccttcagagctgtatctttgctactgctatgaattgtaaagtaagcagatctgtgttttccctgcatggtaacctgtaaaagtgagtgttagtttttacatccccacactggtgtgcaagtgttctcgtttctctggtgcttgccagacattatcatttacctctttgatagccattcagtgggattgggcatccgtggttttaattttttgctttcctgatggttactggtgctaggcatatttcgtggtcccgtgggtcatttggatggatgtcagtgtactggtctagccacttcctcctggtgctgctcatctgtgtgctgctggggtttggaggctgttgtgctgtgtgccttgtggattgatatcagcctcttgtcacctattgttgtgtgtcacacactcccgatctctggcttgttgctcccttttgttatttgttatcattgctgagcacaagttttatataatcaatcccatttgtctgctcttacttttttttgtttagtatcttatcctagggtaatctttgccattgcaatgtcaaaaacccaaaatccacccaccaaagtgtcttccaatggtcttaggtgaccccaaaggggttgaaacccacatgctgacactggaagcctcctccatggggtgtgctggctggcccatgcctgtgaccttgaacttgggaagtatgaggcagaagcaggagaaatgagagttcaagggcaggcttcactacttaatgagttggagaccctgaattacttgagacctattcaaaggaaaactaacccaaaacaaaacaacatcaacaacaaaaccctaaaaccctaccactcaattctcctcgttagaagcctagcacttttagaggaaggctgaagtggaagcttaagggttctttcgaaagtcagttgtgttaggtggtgttttgctggggcaaacatgtgaaggagtgttttcctgaagcagacacaggtgtacgtttaaggcagtgaaaggaacattccactgaagcagacacaagtgagaggatgttctgctaaagcaagcacgtgaaaggacatgtgataaaagattctttgctagtgacagacacatatattggtccgccttccattgcatagttgagctccatttgtcaggacttcaaagagagaaacacaccaagaaacttaggtggcgtgacacagtttcttgtggcttccatggactcgggctgattgacagagtgatgtcagctgagacagactcacgtgctgaggcaagacctgtggggaggcaagacccgcagaggacataaggcgtttgaagggtataagtaaaactccatggacagtaacagagtatagctaggattgtttatagagctagcggtgtaatgctggtcggtttggaatctttgctgatcttcgcttctcagaggggcatagctgagagcttctcctgacattcctgttggtccctgctgctgctgaggctgaggcctggctgtttctgctacgtagtgccaccgctgttgatttgtgttgactatcctgactctactgaacttcatatatctgtgaagtgtttgcgagtggatccaactgtctcttcaaacctgtgaactgaactacagatttccagacaacacagatgggagttgctccaaagaacctttctaaacaggtctacttccccatatcctttggtttttcctacttctctggagggtggtgggcaagaagggaggttaaagtgtttaagaaacatcattaaaaataggctttaaaaacttaaaattacaaaagtctagctgggctactcatttgtgcaaaggttccctgacgatccagcagctgtcaagactggaaacttgtctttgaaccagacacttcagtcactccatctgttgtggcacctgtagagtttcccgtgaagtaactggtgacagaattccatggataaaggtgcttgctgccaaccctgaagaaatgcaccaaagatggattcttgggccctacttgaggaaagggagaaagttgtcttctgacctctactctggccaaggctggttctgaacttgtgattcttctgccgtacttggttgtatgtggtgctggggctcaaactcagggctctgtgtatgctgggcaaatacattactaccgagctatagccccaatgggcaattcaccttttaatagaaagtgaagcgtaaacagtgccagatttgtgttggtgactgaagtagctgcattcaactcttgcaaagcacattcatgcaggcaggaccctgtgtgctcgcctatcctgtgttcagagggccgcggggaaaccgtaggaatggaattcagcagctggagaaggcactttaattcagcagctggagaaggcactttgagctaggctgtagaaagtaagagaccctgaccacaccacaagagcatatctttagataaccgaaactggagaaaaaccaaactggggcagaatgaatgtgtgcatggggcttcgatgtgggaatgggtttctctgagattttttttaaaggaatttttatatcaacaaccaggaatccaataaaactatcttctcctaaggccctggtagtttgaaggatctagggaaaggcagcgagtcttcgcagtgcgcgccacatcccgggtactccacacttcttccaggccggggatgcccagctgtcatcccatctcgggccgaacccccccccccccccccacacacacacacacccgacttcctttctatccttacagctccagccttctctgcccgaagggaagcacaggctggagcaagctctctaggctcatccatcagcagtggaggaggaggagaggaggggcaggaggaggagtttctaggcggccgagcccccgaggcccgcggtgcccttcccccctttcgctgattgctgtggctgcgcgcccgaccccgcccgcgcgtgtgcgcggccgagttagggcgccgcacgggcctgatgggggtgatccaggctttcggggacgccgagcgccactttcctcctccctggcagtgagagagagagagaggtggagagggagaagcgggctgctgtccttccaggccactttcgctgcgcgattccgcgagctcccggcaggaggtgaaagtccccggcggggtccggatggcgcagttgaactgcggctgctgagctcgcggccgcctgcgcgcgctgggcgcggggactcgtctgggctactcccccacctcgcgttggacgaccggtcctggacacaccgcttgcgaggtacgtgcggtttggcgccctatcagaggctgtgcacgctgcgtagtgcgggtcggtgcctgctttgcggggttgctctggccatccaggaccccgaggctgggacctggctttggtcccgcagggttgacgctgagcggaaccgggatccgctgcggtcccgggtgggcagcgccggggaggagttccccacacccgctttcgctcttcctctccacggtttcctagtcccgtgcggggctgcaggccactgcgctcctggcgcgtgacagcgtgggtgggcactcgaccatgatgggtagcagaggccgcggccgcgggactcgcgcgccaacgccagtcctgggtccccgctggccgcgccctggctcggggagtcagtcccgaaaacgctgtgaaggacgctcccgggttaaccttgtggcgctcccgctgatggtagaggctccctacgatttgtgaacttggttgggacaaacttgaaactcttggatgttgctagaggaatccgcttgtagagttgggcttattggggcatttgtcccaccttcccgcaccggataggagtgcagacagctggagtgacaagccgcaagtatcacggcttaggtgttggtgcaaacagttgccctactcgctaaccgtgaactgggaggacacggtcccccaaggtggctgtgcggtttggaggagtgcacagatgtttctgactgggaccgtgcggagcgcagcacaggtgttagcgcctcgtgctgcgccctgctgtgacaggagagccgcgaggataggcatcccgtgagtgtcagactgagataaagaaccagccaatttaaaatttcttctttcttcgaagaagtgagcggtttgggagggtaccaacacgcaaaaaaacccatatcgggatcctttaatatccagggaatggccctttagattgtagcgggtaattttagggagagctcagcaggtccttttggggtactaaaacgggaatatattgatccctccctgtatgtcagtatctccagcaactccagctagttcctgtcagggcttaaagactacgtcaactctggttcaaagtgattttagtggacccattttacagatcatatatgctagactccagcagctagaggcaaagttacttgtccaaggtcacatagagctttctgttacttttaacccaagagctgcctcggtcagtcatggcggaaagtgtggtaagatccatgggccctaagtccttggccctctgttctcacccagcttcctgtctgagttgaatacatcttttgaaacacagatacaaattatctgtgattaatttagaggatcatatacgtatgtactttgcaggagccagaatccagcttctctgagtctgggtccaaataattataaatagaactctgactcgtgttaatttcaatctttattcttcattacttttattaatccaccagacattgttgatcaaggccgcttggcttccttaggaaacagcttgaggctggcacaggaggcagggaaataattcttaccccctgaagggctattaaagacgacttgatttcatgccattgtctcagcaagaggatgttgctctgtttcttgatgttctctgcttttggctttaattctgcattgtttagcatttcaaggcttaggcatacttttttctcttgacattgttgtcagctttaaacgtcccctattgtgatggaatctggccaccccacaccacctttgcttaactgttgattaagatatgtacattaaaaaacaataaagtcatcaactgagttttgaaccccagcacttcaaaggcctatgccttgagaaattcattgttattttaaacactagccagcagggggcgcacagcatattattgatgtcctgctgacatctagacctgtttgtactgtgtgtagcatatatttcagaaatggaaattattgtagctttatctagtacagtaactaagttgctttacgattaattccaactggttaaaagtgggatgatcttgagttccgggcctgaatgttaaatgtgtgtctagaacctgtagtgactaggtaaatatttaaatacaaatcacagggttccccccccctccttctagtttgcttttccttgagaggtatgtctgtaagattttgtgttgtttgaatagcactttaggttatttagaagtggcaatctaaagagattcatttgagagtcctttagtaatgactcccattgtctcatttataaaactgaatgcacgaactcattcttgaggaggctgacggactcagtactgtcatcatcatctttcattagcattttcctcatgtaagggagcccgttatcctgtgtcccttttatagagctgaacatgctgcagacatttttgttttttgttttgttttgttttgtttttttgtttgtttgttttggtttttcgagacagagtttcctgtagcccctggctgtcctggaactcactctgtnnnnnnnnnnnnnnnnnnnnattaaaggcatgtgccaccactgcccgacagacatgtatgttttaattcagtgtgagttccctcatcaaaagtgtttgggggtgcccgcgcactcaggaagcagaggcaggaggatctctgtgagttggaggccagcctgctctgcagagccagttctaggacagccagggctacacgcacagtgaaaccttgtctcaaaaaaataaaatgcttgtgagtaaaagggctttggatttgttcagactttggaatatctgatgtgcataatgatctcctgggagagggaactgggtctaaacataatttgtgtgcaatatatatctgaaaacataaaggtagtttcgtacaatgtttttagtgtatctgtgtcttgagttcagctagttatatgacatcgggtggaattttccacttgtcagccttgtgctgaaaaagttatagatttggagacgctttggatgttagattttgggtcaggggtgttcaatttgtatgtcaatagttcaaagccatattctgcatgagtacaggtatctggtgtgtctaggcatccgaggtccctattttaaataatgattttaatagctatttcagtcagttccttaaactgtcaaacattgcatttttccacattaaaaaatcttttaactagtttttgaaatttacgtaactggttaggttcatggttttagagatttttaacttagatgttctctttcactgccttaggagagtggccagttaagaatgtgagggtgagcatagattataagaataactactattcctattattttgaagtgctagggtttgagtcaagggtcttatgcatacgaggcgagcaccaggtctctgagctacactcccacaccccgaaagttatccctacaggagcatcggtgagtaagagattccgtgaggtgtctgcatcagtagaacacacacacctggcacaggaagttctttggtttccctgtcttcagtctcaagtgtgaagtgttagcaatgcttctttgcagcattttgtaaaaacgcaaactgttgctaatttgttcagtttctagtcaggctgaaataaaccaaacaccacttggaaaaactgctaaaatgatctgggtccattttctgggctctggatttcttgttgttatagcctttgaaatcacacatttacttgttaattgacttacttgctccatttacaaagtccttgctaaggtttaacatgtatttctaagcgtgcctgctctcctcctcagcctcccccccccgccccccccccccgaaaccttagggagaggtccagttatttggatctccagatctctcagccaagaaatgtaatattttgggtttgactcagcatttgtataaattctctttggggctactcttgtgggccttattttacagtttttccttaatttttttcggacgaaagatggagatttaaataggctaacaactacttataaggcttgtatttaagaaggaaagactggaggagagccccagaaacacatctgtaggccaccctaatgcacctgccaatgagtattgtatagggtgtgcatatgtgcattagtgtgcacagtattgctatctggtatttgtgtcagcaactgctgtgtgttgaaatttctttcagccaagcgtagtggaccatacctctcacttcagcccttgggaggtagaggcaggaaaatcaggaattccaaatcagcttacaatccatagtgagtctgaagccagcctgggctacatggaccctgtcatgggaaaaaaaaatcccccaaaacaaaaacaaaaaacaaaagcttttccaaatctggggaaaggactctaagtgatgtgtaaatgtgagcaagtttcatttttatttcaaatttaatgtcagattgtcaccagaataatcattgaaattaagttagattagtaccaaacttctgtttactttaggaaaatggataacagaaaagtgtctgtttcttgggtgtcaggttgtgactgagaaggacctgtggggtttggtaccgtttgcactgggaagggcacctgtttttctgtccctccaaatacataattaatttttctggcatatgctgaaggtcaggttgttgtatacaattacagaaggaccgtttgtgaaaacacatttcatttggttagtttgtggtggtgggaaataaaaaccctctttagagagtaccccgtgaagtgctctctaaagagagtccggagcctttcccctcatctgatcatcctcgggctcactggcgtggtgcactgaacggcccacgtggagggtctggcaggacattgcattttctttttactgcttgagtctttttcgtggaaacttgatgaatacttagttccatgtggttgtgtcatcctgttagcatcttagcaattcatgtgctttgacagtgtgatgctggcccttggatacagcaccatgctggtggctgtttgcacatttcacttcataattacctaactgtgcaataattgctcgagtagactatgacttttcttttccctcacattaggagggttatttgaggtgagacactttgacacaaagcctaaataaatatcattgtgcaagcctctttgtgttgttggtagttgtcccttctgtggcttttactcttaaaacagaatgcactcaaacacaaacctttctcggtatccttaaagggtgtgcgcccttttcttacatgactttatgcagtgggctggcaagttcagtttgactggggggaaagcaccatggagtcatagtgtgtgctgagcatcaaggcagtatcaggtcttccctgtgtggggggaagtttctcatcttctaaatgggtctacctctttctgccaaggcctttctgtccagacattcttcttcattttctattctttcttgtttgtttgtttttacctttatgactttagagaggaggttacatgttgtatatttatagcataccatgtgaaccatgaacagcgtatgagcaatggcctgttttgtgcagagacagctgcactcgtcttggtttctgatccctcctattcacacctgaccacagttgcagcctggcattggattcatgatgttttccacggcagctcagggaggacagacctgtgcttttttccctgtggttctctgcgaatgccttttcagtttgtggcatctgtgtttccttgttagagtgtctgttcacagttttagttttattcagtgtgtgggcttagagaaagagatttcttttaaaaggggttctgcaagttcttgaaaacgcctccagaaaatgtctcaggtagatgtcatttgaattggggatttgaattggggctggttgaacccagggtgggattctttggagtttaactgggttgggagtctgggaaagagaagagtgtctctcctgttggatagctggagaaagcttcactgtgttgggaagggactgatagcaagttttaggtgtgcaggcaggaactccaaggctgcctcaggttggtgttgcagctggcaactcttagcatcccaaagatactgttctccaaaagccagggaaaacagcctggctccaattatgcatattgcgcgcatgcacacgtgaagctaagccaagaaaaatgtccatctgggatacgggttggtgttctgaagagaggaagaacaaaggacaatcgatacgaaccttagagaatctgctagtttttcttttggcttccagatgcctctcaagtgctttgtattggagattagaagcaattttagggttgagttttttggtccctatgttttgcagagaacagaagagcaagcagctaggcagcttttggtggtgctaaaggaaagagggttctgggacccagctggtgtgtttgagaaagcttttcccaccttcacagtgccagaatagggtgcaaggtcctcccccctttcctcacaccttccccgtgttttccatgcagctgtggtgtctaggctcagcggtactctagactctgtgggaggatgttagaggcaaggtgtgtaggcagctggatgatgaacatgaacacattgtccttcacaccaggcagaaacaacttgctcgttctctctctcttgctctctctctctctctctgggatgtcatatgcccaggctgacctcaaactggtagttttaaggcttcctgttcaatatcaagtccctgtttgttggcacttatgttagcccactttctgttgctaccacagaatagcccaaactgagtgatttatacagaataaaggctgggagactaagcttgtgaggtacttgttgctggtggtggtagaggggctctgccaagtcctcagataatataaggggagacggcatcctagctcaggtgcctctcctcagggccctagccttataacagctccaagccttaattgccatctcacagtggccttgcctccagtcaccacagctgggtccagctctgtcctctggctccttcataaaggatattaaatttcaatgtaggttccggtgagggacatccacactgttaacacttttcctgcccatctttcttctcagcctacatatagtcaatgaccctattcattctagaaacttctagttttctgttttagagccatgttcacagcagtctgtaggcagcctcatgtggttcaaacaggtcatcccattaaattaagcataccttctaacttcctatatactctgcagcccattgtcctcgtcacttttcatgtcatccttgctgctgtccccctgtgcatcgatgtggtctgagctcagcgctgttggtctttctgcttggatgggaaggcgtcctgggacttgcaaggccaggaaccacatagctctgaggtgggacagtgtcccaatggacaggtgtcctgcaacatgggaactcaagaaccacacagttctgagaggaagcctcctcagcagaggcgttgcagctccccagggagggtatccccagctgagctcaggagctcagaggcctcagtctgctcggtcttgcttctctccttttctttattgcttgtcttcttctgatgagagaatcacaccaggcagcaaatctcattgaaagagatttattggaaggtcaaagacgtggaggaacgaattcaggactggctgcctatgctcctggaagggatcagacagcagcaaggaattggacaaagtgcaatgtttttatgggggcttttgtgggttggagcgttctagggtggagatttccacggtaaagattggttggatttcaagtcctgagcttgagggagctcagggattggtgggttttcctgttcagggattggtggcttttgtttagacttttcatctaaattagcataacccagggagggtcctgttgagggtctgcagatgacagtctggagatgacctttgtgatagttacgatagttgggagggttagggtaagggaggggcctagctgatggagctccaccccaccccacctccaggccctggccacttttctttcttaaggtctacaaagtttacaaagtatacaaagtttacaaagtatacaaagtttacaaagggagtccacagcagggaaagccttctctgacacttgagtggtgtgaatatctaacaggtgcatctctgcagatagcatcctcccctttcctcccaggtcttcccaggaccctgactattcccatcatcttccagctgtttcttgtggtttctgcatccaagttctcgtccgtgatcactggtacctttgaaagcacatctcactttgtgtcgcttggatcttgcagatttgtgattctgttctccttagcatggactgtatgattattaaaattttagccattttcccctctgcttctcttgaacctcagtgtgttcacctgaggcagctctgatttcccaagtgttccatgtgcgttcacatcctgtttctttcataaccacacttttataaccagtgtgccctactcttccagcctcctctgttagcttaaagttttactctgtcaacagataccatgaccaaggcaagtcttataaaggacaatctttaattggggctggcttaccggttctgaggttcagtccattatcatcatggtgggaagcatgggttccacatcttgttctgaaggcaaacaggagaagattgtcttgcaagcagctaggaggagggtctcaaagcccactccacagtgacacacttcctccatcaagaccacacctcctaatagtgccactccctgggccaagcgtattcaaaccaccacactgtcgttagctcttctgttgaagcttcacagggttcctctctgaagtgacttctcttggtagctcacaagaacctctttctttctgtgaactatcctcgattaaaactgagggtaaggtcagcttttcatcaccataacaaaaatacctgagatcattagcttataaagagaaaaggttgctctcggctcaccgttttggggggtcttgttcagaattgtgggcctgtggtaaggcagcacatgtggtgggaagcatgacaacaaaattattagcctcatgtctaggcaggaatagaaaaggctgcggtctcatcacctcttcaagtgcctgtcttcaatggcctaaaggcctctcactataacctgcctcctgaaggttttaccactccacatgatgcctttaataaatcagtcttttggggaatattctgttcttccagatatctgaaggtcacttcctatagatccttagtcaaaacaaagaaacttaagactcccacctgatatacagttatgtgtcatgcttatgctgtctccagggctcccagggcaggtacttgtacattttgtgccttgtatccccatattggaggcagtagctggtgtggagcaagtctctcagaactgtagtgtttgttgagtgaataaatgaatcagaagaagcaggacctgggagggtttgatagcttcagtttagcatacactcaggtatctcttctgcagggaggtagagaacctgaattttcactgcctcattggagacaagctgggctgggacactggcgactctcccagcctttcaactggtttgggagattcccattctacctccagcaggcaagggcttgttgtggtttctctctgcctgtggtttgccctttaacccatcctgctaaaaagatgaaaaataaacctggcagcagaggaaggggtttggggagagggcgtgcagagcagaaggcagctcttgctgtgcccctacatcctcctttggctctgagctcatcctgttggcagctcactgaactatccagatcggccctgctagggcctgcgctacagtagcctgaagtctgccaggcctcatgtcttttgaattttttttccttcttctttgtcctattttctttgaaaagaaatgttccacttcaggcaagaaggacatgggaggaaattacattactatctttaattatttattattttgggatggtctcatgtagtccaggctaccctcaaacgcaagactatcctgcatctacctcctgtgtgctgggattacaggtgtgcaccatcatacccagttttttttttttttactatcttagttaagaatatttttaaagattaatttttattgtgttttatttgtgtgcatgcacacatgcatacatgcacatgtgtggggttccgttttctcctatcctgtgggctctggcatcaagctcaggttggcaggctatgcaagagtccctacccactgatccatctcacctgcagcccatctttaagatgaagtggagttttaacccttctcagattcaaggactgttggtgaagctagttcttgcttctgtctgtgatgctagtgatgggtggaaacttcatgaagcagtcacttaatcctaagggccaggaattttcctgctgaagagtcaggattttggagcccagtgtatgtgggccaaagcgtgtggccagtgtcattgtgcctattgagagaatatcaatttggtcttctcaggacaggaagtccaaggcttcaaagaagtggggctggtgagatggctcagccggtaagagtactgactgctcttctgaaggtcctgagttcaaatcccagtaaccacatggtggctcacaaccatccgtaatgagatctgacgccatcttctggtgtgtctaaagacagctacagtgtacttacatataataataaataaatctttaaaacaaacaaacaagctattataaagtcagcattataatgtagccctgggattaaagatgatcaggttagaaataaactgatatgtgtgacatcatatatatgtcaatatgatatatctatatcatatgttatatgaaataaaatgatagagctactagtggctagttgaagggggtcctagtcacctgacagctttctaggtattctttttttttaaaaatttattttattttatttattttttcaattaggtactttcttcattcannnnnnnnnnnnnnnnnnnnnnnnnnnnnnnnnnnnnnnnnnnnnnnnnnnnnnnnnnnnnnnnnnnnnnnnnnnnnnnnnnnnnnnnnnnnnnnnnnnnnnnnnnnnnnnnnnnnnnnnnnnnnnnnnnnnnnnnnnnnnnnnnnnnnnnnnnnnnnnnnnnnnnnnnnnnnnnnnnnnnnnnnnnnnnnnnnnnnnnnnnnnnnnnnnnnnnnnnnnnnnnnnnnnnnnnnnnnnnnnnnnnnnnnnnnnnnnnnnnnnnnnnnnnnnnnnnnnnnnnnnnnnnnnnnnnnnnnnnnnnnnnnnnnnnnnnnnnnnnnnnnnnnnnnnnnnnnnnnnnnnnnnnnnnnnnnnnnnnnnnnnnnnnnnnnnnnnnnnnnnnnnnnnnnnnnnnnnnnnnnnnnnnnnnnnnnnnnnnnnnnnnnnnnnnnnnnnnnnnnnnnnnnnnnnnnnnnnnnnnnnnnnnnnnnnnnnnnnnnnnnnnnnnnnnnnnnnatcaccaggggcggagggcaccacacttccctctacagtgtactgtggttggcgtcatgatcccatgcttcacttctcttggggcctcccattctgcttctctccccaccccttggctttttcttgttacagtgtttctttctcctctgccgggaggtcttccctgactactctggcacagactcagcatcaccaaaccagctgttttcctagtccccactggaagccagactccatgacaaagatgaactgaagccaccaacctgtgtttagctcccgagggtctaacacacaatagttacttctaaagttttgttgagttaatgaatgagggacaaactttgccatactgatttcaaaacaaagtaacttgtgcctatgtcagccctcatcagctaggagctgtccccttgtccccatccaatgcccaaagtgatgtaggaatgtgcacagcccctttcctttctttttctattttttttccttggttgttagctatttctggcagagcccctgtttatagtggctaaaagcatggactgtggaattagacagacttgggctcaaatcctggtccagggcttcttagttggtgaccttggcgttgcttagcaacttaaaggaagcacccatctctgtgggtggttgagaggattaagtgagaaatcatggagcatacagcaggtgctctgtagctagtcactgagatgctgtatggtgtcagagacgaaagccaggtactgaagtctcctcggaaggggataaggtttgcacattcgaatggtcagagcagttagaacacagcctgggaggaaggcaacagagggccagtcatggagccttctgaattctcggtttgcctatctgtaagagactgatgtggatacacccgtttctaacaccctctgttggctcagaataggtgtaacatggggtacattacacaaagaccataaggctgggattaatcataagtgggctttagaatggggagagagaaatgaggagaggtctcagaccttgaagacacatgtcaggttttaataaaaaaaaaggcgaatataaacttacgtctctctctctctctctctctctgtgtgtgtgtgtgtgtgtgtgtgtgtgtgtgtgtgtgtaataaataaaatgaacagtcctgacagaaggtggagttaaatgcttgcattgctgggagcatactgcatttttgttcccgtaagttccagagaaaaattttcgagtgtaatctgagtgttctctttaccactgagctgtgaggttgaatgttcgttctcctgggacagtgtgttctggcttttctcagttcctgccagaccttgcacagtgaggcatttgaagcttccacaggaatggatggtagcttgtttactgtgagagattctcatcactgtccattcagatgacaactgtgtggaaggcatggaagaaaaacaattctttaatctattcatactaaagatgaacaaagtgaaggcctaggaggcctttgggtggcagagctcttgcctcctgcgtgctagggtgctcagggttcctcgttgtatctgcctcttgtttgcctgtcatttgttactaaaaatgttccaacaaattcctggccttccataaatttcctattgtatacaatagtgtcttgtcttcttttcttgatgataacaatctagcccagggtcttaagcatgctataggcacaggcccatcactgagctatccttttttgctggctagttttattttgcctgatacagactggagcaccgtgtgtctcattcagcatcctattgcaatgaagaaatgccacatcaaggcaaatcttataaacatggtggcccacatggcgctggggcagctgaaaggtacatcgtgattcacaggccaagagagagaaaaagaaagagccctggcctggcatgggcaaagcccacctccaaggtttcaaaaaaacctcaaaatgacatacttcctccaataaggccatgccttccaattcttctaatcgaagtccctgatgactaagcattctaatatatgagcctataggggccaatggtattcaaactaccacacctgggaagagacatgtctatgtgcactttcttgattgacagtgatgtggaagggaccatcctatgaaggatggcagtacccttgagcagtaggcctgggttgtataagcaagcaggcaagccaaggactggagagatggcttagtggttaagagcactgactgctcttccagaggtcctgagttcaattcccagcaaccacatggtggctcacatccatctgtaatgggaactgatgctctcttctggtgtgtctgaagacagcaacagtatactcacatacattaaataaatagataaataaataaatattgaaagaaaggaaggaaaagaaagaaagccagccagccaaggaagccatggcgagcaagccgggaagcggtgttgaatcgccttcctagagttcctacctttgtttgcctccgagattgactgaaacctgaaagtcaaataagccaattccttctcaagtggctctcagtcagtgttttatcctagtgacctagagcacccactccggtccctgcttattcaacagaaccctgctggaatccttgcaccatcacgactaaaacccctggttctgaatcgtttgggtggcttactggccctgccagtctgaattccacagtctcctgcgtaaacctctgcagatttgggatccagcaggtagaaaaggagggctgtgcagccaggtcctgaccttagccagtggagtccaggcaacttctctcgatggggaacagcaagcagttacaacggttgctagggctcatgtccttttttttttttttctttctttctggttttgagaaaacatcttgctggcctggaagttgcagcgtagatcaggctggtgttgagtttgtggtagttttttttatgtcatctcttgagtgctaggattacagatgtcacccagcacacctggctcagggctgctttgcttgcttgcttgcttgcttgcttgatttagtttgtgtgtgtgtgtgtgtgtgtgtgtgtgcaagcatgcccatagcaaccaagtagtggtcagagggtactttgaggaactgattcttccctgctaccttgtgggatctggggatcaaattcagtcaaattcctttagactgttgaagcatctctacctgttgagttatcttgtctactcaagactcatctcctatcttgaaagcattctttaaatgttttttttttctttccatttttattaggtatttagctcatttacatttccaatgctataccaaaagtcccccatacccacccacacccactcccctacccgcccactccccctttttggccctggcgttcccctttgactttaaaattaagtgtacgtgcttgtctctgtgtggggatgtgcccctgagtgaaggtgcccatggagaccagaggctggggagcctcggagaggtttgaccttagtctctgtctcctctactcacaccagactcccttagagctcctgtccttccagcacttgagaagtagaagcagagggatcaggagttcaagatcatccttggatgggctggcgagatggctcagtggttaagagcactgactactcttccaaaggtcctgagttcaaattctggcaaccacatggtggctcaccgccacctgtaaagagatctgtgtctgaagtcagctacagtgtattcatgttgataataaagaaatctttgggcctgagcaagcagagttgaccagggctaacagaggtcctaaaacattcagttcccaacaaccacatgaaggctcacagctacagctacagtgtagagctacatggaaactctcccacctggtccaccctctctcctggctaagaacatcaacaccgggcctagcgctttctctttccttgagactgaactgcattttatccttgaaaccctaggtgtgcctggttagcccctggctcaggagtggctcagacatggagaagttagcagagccatggtgtgctgcagcccttccgtcattggcccttaatgtggacagggctaaagcttccatctctctcacacatgacccagcccacagccctgtgggcctctggctcctgatccctagtcacctgacctctcactcccctgtagcccctgttcaggtgttaagacccatctgaattttgggcagcactgtatcataccctaacccctacagtatacgcactgcaaagccaagccaagccgtcctctcaactgtgctcttaactgtggatgtgacctgactggctgcttcaagttcatgaccctttgaccagagggtttgacactcacccaggtttctctgtgtctgaccttttaggatgtgggtcttcctaagaacacttcctttggacttcttaccatactgtataattctgtattcgtgactatgtgcctgtcttgccagactgtaagcccagaagcgtaaaacacaagcgctttgattgcccaccacatttccactacctgatgcggcacaaagagtacataaaggtctgttgacagaggaaaggacgctccagaagctaaatgtctcgagtagcaagtgatgctgccttcataatgccaaacaaaggcagaggtttggttactcttcatattgccacacccttggcaccttggctggtgcctggcacagagtggtagtaaatatttgctgaatatcaactatacttagatatgattccagagatttcttatctaaatcctctcccctccccctctgggggcctgaatgatccagcttctctgtgtggaggaggcctggcagtagctgctgtgggcatctgcatacaggtctaaagggcattcaagtgttaccagacacagcagctactgctctgtgtccccctccctggctgccgcgctaccctctgatgttgtaatccacactgccttccctgagtagcactgagtagcagtcagaaccgtgctgccagcttttattgaaccattttcaaacctgtgtttttatcacaaaaaggaaagaagagaagagaaaagaagagaaaatcatctaactgacaaagttgaaacatttaaaatttttagtgtgtatgtatgtgtgtgcgcatgcatggacaagctcgggtgtgtgcatgtgacctcgggtgtggctgtgtcgtgacattcatgtggaaggttaaagaacaacttccatgcgtcggctctctccttttattccagggattagattcaggtctctgggtttgtacagcacgtgtacttttgcctgctgagccattttgcccagtctattcatttctaagccattggaaactcggggataacttattactgaagttcaggccaggtcaattttccctttttgatgttttgagtagtggttgcatacagcctaggctggcctggagcttgctacgtagcaacagatgatgttggacttcttgatccttctgcctctgcctctgcagtgctgtgagttcaggcataaaccaggatgcctgctttatgtggtactgtggaatgtaggactttatgtgaggtaaacaagcattctaccaacagaaccacaccccaccccacccccactctccaccgttgtaattccactcactgtatcagtccctgtgagctctctcagccagtaagtactgactactgacaacccaagttcaatccctgagacccatggtggaagaagagaactgactcaaggtgttctctgactgtctcgtgagtgagtgtagtatcatgtacacacatgcttgcacacatgcatgtacacatatgcacacacacaacatgcataccacacacacatgcacatatacttaaatgcatgcacacatatgcacaccacacatgtatgcacacatatacatgcacacacagacacatacaacaagcacactgataataaataaaataaaaaatgtaaaagatcttgctgggcagagttgagcacactttttaaaaacctttttatcgattctttgtgagtttcgcatactgaaccccagtcctgtttatctccctatcccctcatatctgcccttcactcttgcagtgttccccgcctccaaataaaaaacacatgcatagaaggcatctctttgtggaaactgtaatctgtggcagtgtgtcctgaagtacacccctctgtccacacatccttacttgcaaatgttcattgctatgagtcgttggtgtggttcaaggcatctgttttctgtgacgccatcaatactgggtcctcaccgagacgcctctggttatcttgttgctgccctgtgtcgtggagatcctgcagatttgcatttcacacatctcaacagctcacagatgatatagatttttgggtgggccaattcagagccctggatctgggcctgggtggcagctgagccggttaagtgtggcagctcttccttgtctacactgcaggggtaagctccccagcactgctctccctgggccacctagagccaccatctgcaggagacagagtcagctagctctcttgccctcatgagaacaagatcttcaaatgacctgcaggtctgattcctgtcagtatcaggagacatcaccactcaggtctgtgtccttgctgtgaaaaactccagaatttgtcctcgtcaggctgcctgttcatcatagctgcccctgtggtccagactcaagtcgtagttatagtaagtagtgctttgtgtagggtctgtgtcagtatttgctgtcagcactgccagcccctgcccttctgtttcagagatggaatgttggaggtgaatggcggcctgcttgtagagcagagtagtggtggtggtcagtgcagtgatcatggaaaagatcttgtctctagtcctgaccttactgtgttattctgggcaagtgttcatcttgccgtttggggcccctcttcactcgtgaagtcaaatgcttccaacttcaaaagttacttatgctaatttaaaacacttttcaaattaatatagatcagttgtataaagtatggtttcctttgtatgatttaacattattgttattgttattattattattgttgttgttattattattattgcaggcacatgtgtgccacaatatgccatgtcatttctctggtccgaaataatagttgttttgaaataacctttatacatattcatataacattctttggtcgtagtcactctctagctagctgactttaaacagttatttattatatgtcaagctttcaagtatgtaaagactgcctttcttttcttttttttcttttttttctttttttttggtttttcgagacagggtttctctgtgtaaccctggctgtcctggaactcactttgtagaccaggctggcctcgaactcagaaatccgcctgcctctgcctcccaagtgctgggattaaaggcgtgtgccaccacacccggcttaagactgcctttcttaactgagtaactgaacagttacaagttaattgtgaattatgtctcactttgaaaggtgtcctgtacttagccatcttaagaatagctagcacatttttttcttcctggctaccagacatccattttgccacatttccctctaaaaacaatgttttcccttcattaaaacaaacaaacaaaatcttccgggccatcaagatggtctaacagtaaatgtgcttgctgtgcatagcctacacctgatgactgagttagattcttaaactgactcagagctggaagagaaaggacttcacaaagttgttttctgacatctgcatgggctgcccaatgcacatgtacacacatgtacatacatgtacatggtgtcatacatgcccccatacacccacacaaatgtacatagacacatacatatacatacacagatacacatacagacacacaccacacacacagattgacagatgcacacataccacacacagacagagacacaccacacacacagaggaacatacacacatgtacacacacaaatatatataatatattatatatagagacacatatacaacgatacacacagacaaacacatacacaccacacacacacagatggataaatatacacacacaaatatacatagacacacacatatacatataccagatacacacacacacacacacacaccacacacacaaattgacagatgctcacacaccacacacggacagagacataccacacacacacacacacacacacacacacacacacacacacggagggacatacacacatcacacacacaaatatacacacacacacacacacagatacacagagacagacacacaccacacagacggacacacaaacacacacagatagacacaaacacgcacacacacacacattccttccttagtctaggcttttctaagtagctcctttggagcgtgggtctagattcgtggtgctgtcaaggatttggttgagcaggctttcctcagctaatccctgtatttacccaaatgctttgctggttctcaggaatgtgcagcagccagctctgattaatggtctcagaagtaaacacagcatgctccgaaatcaacagacttagcaagcggcacattcttctttgtttttaacctgtgagtgcccccccccccctgttttcttctgctaatttgtggtgctaaaggctcccatccccagcagtggagcacactgctgtgaagctttgggtggcgagcaaagagatcactctgcagtcgcctccagattgttccagggtctcagtggttctacttacgcactcacacagctcatgagcccaaagagatttcatgatgtcaaggcgggtcagcagctaagtgactatgacagaacctcacctgaaagaggagttggtgttttctggttttatttcagaggtacacaattatggaggcctggctccacccagcattcagctgaggggctggattcctgagtcatgccacagctctggtctgtagtcttggctggacatcagccaggtgggacccctgggattcccttcctgtcctcccaggccctagaactctgtcagcacactggggagattagacaaaaaaaaaaaaaaaaaaaccctcgcagtttgctttcttttcgaacacgttctcataaagaggggcttcagctcaaagaagctccttctttgttcaccacagctgtgtggagtctcaacttgtcctgcacttcctcggagatgtctcgagatccggagtgaacttgctgtggttgcctttgggcatcaaactgtttagcttggctcgattatataataattatataattgcccaatattcttgtcagcaatttgcaggccgtatttttaatagggccatttgcctttctttccatggttccttcaggactggtgtaagctcctggattattgcagcgcagccccacaggccctgcacagatgtgagcagaggtgacgcgcgccctgggctgcctgtggttatttgctccataaaaatcctcctgtaaaccatcttctcagtgctccttatgggtctttgctttagtaagatttctgttggtgttcgttgaaatggtatattctttcagggagatttctctttattaacccgtttaggaaatctaatttttgaagaaaaaaacctggaaacaaactctccagcttattaacccatttaggaaatctaatttttgaagaggaaaaacgggagacaaactctcagtgttgttgtcgagttcttaagcaaacagacatttccatttatctgatggtgagagaaaggcgaggcttccaggggttagctgaagtaaatttcgtggctttcaaataagttttctaacttgtcagcattgctggtaactttgttctcccttgaccttgacttctttctccctgtggcaatacacaaaacttgttgggcaggagctaagaattacatgaatgaccgaccacactccgatcttttcagttatcagcaagaagacctcaaagagaatggggtagtgatcaaaatagctgatattttttgattgatagcgtattatatgtgtggcaccttataaacctgggtgcgcgctctctctctctctctctctctgtgcctctctctgtctctgtctctctttctccctctgcatctctgtctctctctctcacacatacatatatatatttcaactgtctcaaacaaagcaacaacctcccctcccccgatacacatatcagtcacaaatctcagctagatgacggccacacctttaattccagaactcaggggtcagaggcaggtggatctctgtgagtttgtggccagcctgttctacagagtgagtacagacctaccaggactacagtgagaccttgcctcaaacaaaccacactcacacacagacccagacacacacagatccagacacacagagacccactacacacacacacacacacacacacacgtaaagcaacagcaatacaaccttgacagagctctagacaggaaccagaaatggttagaaagaggcttctggatcacatggcccaggactgagtttttctgcaatgtggcagagaggcagcaaagccctttctcctttttaatattggtgaagaggtgaagagttgaaatatgagttttgttctttctgttctttttttgttttttgttgttttttgtttgtttgtttgttttttgtttttttctctctgcagattgactctcagtgcaattgaagttgatcttagtggtaacctcgccatggtgaggctcagtctctaagaactatttctgcttgctggctcttggaactgcatgtccagtgtccctgactgtgtacattgttactgctgatatgacaggtgtctgcctggcgtgtctgtcacggtcctaaaaactccacacagaaccaaagatctacttgagtgtgttggtacattcctgtgatgctagccattcagggaggttgaaacaggagggacttgaacccaagaatgttgggctagcctgggaaacatagtgagaccctgcctcatgtttagtatgtgaagtataagcatgtcacttttaaaactactctctgtaagagtctttgttaacagtcactgtccaccccaatttgcctgagggctgccccggtctttttcaggacaaattgtttctcttcgatacttttcagaaattctccatttaactttttacatatgacatgtgtgttcactagcgaaatttcaacactgttttcttactgaaatttgtttatttttctaggcaagttgaacattgcagagaaggatcttaaggctacacccgacttgccacacttgccatccagctgaagaaccaaaggctgttggagagatggcagtgacatcccaccacatggtccctgtgtttgtcctgatgagcgcctgcctggccaccgcaggtaatgcaccttctcaattgggaggctcttaaccttctcttgaattcctatttccttctcccctcagtctctttggctaaaaatatttagtccatattatcttatgtaaaatgtgaatatttatgttatttaggtaaataaaatatttgactatcatactgatacataatatgttttcctgtgttgtagtttactaagctggggctagacattctaatgtcatgacacgggacccagctaacctctgttgaggtaggcagataacaaagagccccatttgaattttgttacaggcatagttaagagcaaaataagaattgtaagggtctttttattctcttaaaagaatgtttttataaaataaatagatcttttgatatagaggtaacatccttatcgtgagatttggggaagggaggcgtctagtttcagctgcttcggacatattaataagcattctttaagacccagagagagggtctgagaagtaggctgtcagtgccagcttcagcactgaaggagagagagagagcgagagagagagagagagagagagagagtgagagagagagatcgctcgcgagagagagagagagagagagagagagagagagcgcgcttatgtttcccagaggctgtcagaatgtaagggcaacgctttgggggagtgttaggggtatcatcatttaacacatttggaaggttaattcgctctattttatcattgtgtgcacttgttctgtaatgagctatataaaagcaattcattgtatcagttctggaaacgggcagttctcaacaaggacagcaccgacctaaacgtgtactccagccagcctttggtatatatcgtatataaactcgaacaaaatagttccataagctctggtaatcaaagctctgagagaagtgtgccatttagtaggagataaaatgagatatggagatacatagttcatttacacgaagttgtgtagcgggtccagatttttacgttttgcattttgtgtggtgggtggaagataacatctgaccacggaggcttccggaggcagacagggactgtgcagacagactgtgggaaggccagttggtagaaagatgtgtgagactggagatcagaatgctacccccaaccactgtagacattttgaaagaaagttcttaatgttttttattgattctttttttctttccttctttctgttgttgttttaaatgccagtatgtgaacttgaactgcccgctctgtctgtgtggctctctgtcagcagtttcactttgtgtcactgttgaagaattgtttgcctttcagggtatgcaataaaatggatcttttctttctctttcttttctttatttttatttttttgagatagggtccctctatgttgcctaggctatcctggaacacacagagacccacctacctctgccttctgagtagaaggattcaagatctatgccagcgtgctcagcaaaaatgagtcttactgttaaaatggatcaagcggtgggcgagaggaggcacacttgctgtgataaggtgtcgaactgtgcctggggtcttgacacaggggttctgctcttactgatgtcacgtcacggagagcggctccatgggaaagctgtgagcatgacggcttgtgtagccttgatagttttgacagtgaatcactcttgccaaacaccctcctttctctttcagaacataagagggggatgggggagaaagaaaaagaagaaatatatacacttagtctcatatatatccaaagttttgcaaaagtagaaaatacaatagagccacggattttgtagactcacagggcacctggtaggaaagcagaggggcgggtgcctcttctgtttttatgggttgtgagtgtgtgtgtgtgtgtgtgtgtgtgtgtgcatgagcatgcatgtatgagcatgtatgtgtgtatgtaggccagaggacaatccaggtgtctcttttcaggctcggtgcccttttgctgagacaggtctctcagtggcccagaactcaccaagtaggtagattggcaatccaagtgagcccagggcacccatctgactctttttatttttatttttttaaagatttatttatttatttaataaatatgagtacaccaccaatgctctcttcagacacaccagaagagggcaccagaccccattacagacgtttgtgagccaccaccatgtggttgctgggaattgaactcaggacctctggatgagcagtcagtgctcttaaccactgagccatctctccagcccccccacccctgacctgactcttacttgacattggtgagattacagccgagccacactcagcttttaaagtgtgggttctggggacagtctggggattgaactcaggtcatcatgcttgcaagacaaacattttactgactgggtgctaatccgtaggaaggctttttaagtgtagaagttcattagctggtgtcattttgtgcaacccagtaagggcgaatgaatggaggagaaatagttcctgcctgtgccgatgtatgccagcttgcttctctgtccctcaagtttgtcagcggctaaggatgaccttgaactgctgatctttgtgcctctggctttagagtgctgaaattattgacgcgtgtccttatggccaatttatatgatgctggggacctccaacatgttaggcaagcactgactgggccgcataccagcccctttcaatagtgtgtgacatagactcagtttacgtcccaaaatgtttcttggagtattctggctgagttgaacttcaagaagatcataataatgaaaacttatagagtgattactgtatgctaagccccacccttcaatgcttctttttctctttctttctttctttctttctttctttctttctttctttctttctttctttcttcttcgagacagggtttctctgtgtagccctagctgtcctggaactcactctgtagaccaggctggcctcaaactcagaaatctgcctgcctctgcctcccgagtgctgggattaaaggcgtgcgccaccaccgctgccctgcagtgcttcttacatatgacatcatttcatttccagaacaatgtgaatactgtgattacccataattcttaggtgaaggaacagaactgcagaaagactagctgttccttcaagggctacccagctaaggagcagcagttagtggtacatagattactttaagtttggtgactgagcctttttgtttctatattaagagaacgttgagagtatttgcttttgtttggcttccttttgttgctactgttttgaaacagtcttactttgaaactttggctgtcctggaactcactgtattagaccaggcaggcctcaaactcacagagatctgctggtctctgtcacctgagtgctgggattaacggtgtgtaccaagctgccctgcctgaaaggtgcttgagaaagtgatgatgggtttcacttgagcatggactctgtcttctggcgagaagactctctgaaaattttatgggcataaagcaaggctggtttgggagtgaaggaggggagtggactctggggatactgagtttcagagcagagctttggatttcattttgtgctttggtcctgctgttcttcagtcctctgaggtgagaggcataccccgcttaagttatgaatctaagcacctcctaccctcttcctgaagctgagaatacagccagtttccaggcgggagggctgcaggctagtgtgtgtgtgtgtgtgtgtgtgtgtgtgtgtgtgtgtgtgtatccgtacatgagtgcatgtatgtctgtgtgtgtatatgtgtgtgtatgccttgtgtgtgtcagttcctgtgtgtgtgtgttattaagacaacttaacccatgattatcttcaaataagaaaccgagcctcagtttagttaatgacttgtgcaaagtcctgcgacttccgagtgggaaactaggcacttgagcctaggtatttggcagtgaaatgcaggccattgctgccctattggggtgccccaggaggagagcccacatgtggaatgaatgaaactcttagcttgattaagtaccaggtgagtagtgcccgagtggcatgcgcccagagagatataatgaccttggttgtcttcattttcatttcacacaaagaacctcgtggccatatcccaagactgctggagagcaggcaggatgaatgtggtaaaaatggcttgtatgggcttttcatggggcagggcaagcatgcaagacacagcagggtttgtgtgtttaccccatgggctcggtggggcccttctgtagaaatctttcgcgctctgcttgtgttggggaagagcaaggtgaagcaggcaggtggcagccagccatgactcaggttaccaactagtttgaaaaaaaaaaactatctatcctttatcccccaagtctttctctacttggtattacatggcattgtgaaagtgagggctctgctcttgaaagatataccatgtaagaagcagggtgcctttttattagaaattaccacaggctgttgactggccccttattgtacatcctgtgatctaacatcaggaaagcaagaagctcgaaaactaatgcttgtcccataagctcaagtctgctttcactttaaagactactacacatctctaaaaacaatagtggttgttgcttctgaggtctgccagtgaccagcaggactgtgtctcccttgtcctagtaatgaggaaaaggcatgcagagagaatttcgggaaatcagtttggctagaagacagggctttggctgcgtttgctggcaggcatgtgccaggtcaggagaggtctttgaggtgagttctgcaaagcctcccctgttgtggtgccagggccttcttcattcctgannnnnnnnnnnnnnnnnnnnnnnnnnnnnnnnnnnnnnnnnnnnnnnnnnnnnnnnnnnnnnnnnnnnnngtcctcttggaagcttgcccacaacctggacacacatttgtctcatttccatttggatgcacctggaattccaggtgcagtccacgggaagcagagatggttttcatctacactgctttcctgctgagcaagctttgaagtccggtatcctggtgacagacagcaagctgagatactagctgggccaagctggagcttggagagcatctaaactaataattagaccctcccggtagctgccagttttttttcaggatggtgtctgtacctcccatttcattggaacctccagcagcctcagatgcgtaggtcttggtctcttcatttctaaagtgagaatgttggggcttagactgagtgatttcgaaagattgattcagttctcggtccaagtagaactcaaacacagacaacctgtggtaccatgtgttacaatgcccctcccccttaccccccccccccccacacacacacacacggcacctcgcttctcctaactgaagcctgctgctttcctgggcccaagacatagatctgttcatttaatccttacagaaagtgcatgatcttgtcattcaacatttgtcactgctgctgtctttgccatggcctctatggccaatattttaacccatgttacaaatggatcaactatgacaaattcaaggttaaggctagctgactatatgacaccatctcaaacaacaacaacccctaaaaaaaaaaaaaaaaaacctagcaaaaccaagaatactagagtatgctgttccaaagacattgatattcaatttatttttttagttgacaataaagataggtttgtggggtccaatatgacattttaatatataaatattatgtgagtttatattaggagatgtcatatttaatatttgaatcacctctcccttttaaaagcctaattgatctattactgtgtatgggtatacaggccatgattgatgtgtgaaggtcaatggacagcttgtgagatccaggtctttccttccatcctatgctacctggagatagaacttatttcattaggcttggcagcaagtgcctctacccaccgagccatctcgctgggtcctatatttaccacttttgtttgcctgttgtaagaagtagaacttactctcagcaattaaaaaaattaataagtgtgtgtgtgtctgcgtgcgagagcacatgtgtatgtgcacagttcactgtgatctgtagacaactttcagggattggttctcattttctatcaagtgaattctagggatcagactcagattgtctggtcgggcagcaagagcctcagctgcctgggtggagttctctcctggccccgcctcagcatttcatgtccttagtacattatcactgacttacagcctccgtgatactttggagatctcaagccttttcctcccaagactttttatcttttgactgatctctccacagtccccaccccctccatctcagcctcaggcaaccagggtttgattctctgtttctatgtgtttgattctttgaggttctgcgcatgagtgagatcatgcagtatctttcatttcctgtcctgcttatttcacttaacaccctacagttttatctgtgctgtaggtctgaggggatttctttctttgaggctggggggggggggggctgtgtggtcctccactaggtcatgtgcctcattttctttacccatttatcttctaaatgctctagattttgcatcaatgagtcatggatttcagaatggggaacaatcaactatctaacccaaggccaccacaaaacaacaacaacaacaacaacaacaacaacaacaataacaaatacagaaatagccacagcagccaaaaggatcaagggttgggttgcagtcttaaagcttcacaacagagtgagaacaactcctcttgccagccttgaggtcttgggacacaggagttgatttgggttctttagtggttcgaatgagaacaacccccatagactcatatatttggatatttggtcagcagttggtgaagctgtttgggaaggattaggaggtgtggccttgttggaggagctgtgcctttgggaacaggttttgaggtttcaaatgtccacaccattcccagcccctgcctcttgcttgtggctaaggatgtaaggcctcagctccagtagaagatatagaactttcttctataagttgccttggtcttcatagccatagacacataactaggatagcctgtagttatttttgtctttaattctttacttttgtgtttaatatttctttttgatatatagagaaagcctgctgtcagtgaagtaccagccatcatcagagcactaaattttatgtttattctatttttaattgtatttatttggtgtggtgtgtgtgtacatgtgtgtaccacagcatacatgtgtaagtcagaagtctgcttgggggagtccatccatatgggtcttgacaattgagctctggtcatcaggcttggtggcaggttctttgcatgctgaaccatttcactgccctacctatgatggcccatctattccaaagagcaaattagtgtttttgaaaaagagctggagtggctgcagtggtctgcatttgggctgcgttctctgtgatactgtatatgttgcgcgcgctcaactggccaggaagaacgacgctgctacaggatccttctgcacacatttattcagtcctgtttcttctttctccatatatctcccttgtttatatctcccttgtttatatctcccctgtttatatctcccttgtttttatatctcccttgtttatatatctcccttgtttttatatctcccttgtttttatatctcccccgaaccctgggcctctcactccttttatactctctctcatccacgcactgcaggccacgccccctcgccagtcacgaggcttcagctaatcagggcagcaggggcaaatctccaccaaattggattcacctgtatcctggtacacctgcgcagcactcaagatgtttgtgtcttatatgaggaagtcaggtgcaagtcatatgacttagctgcagtctctggcgcctttgggactgccgccacacccgctccccacaattccccctttttttcttttttggcagagagaatgtctgtagatagccccccgcagccatgccccttacccgtccttgggtgacaaacagcattggtttgatccctgtcttaggttggtgacatgcccagggagtcttatcactgactacttctctatcatgccaagccacacctggggagattgtgttttgcttgtggcaggtgcatcaaaaggccaggatgttaattaacctatggccagatcttaattgctgcaagcaagcctcatgggtgaaggtagaggtctgatccccagtgtgcaagcataggggccctacacaaaaccatcccttaggctcatcacccagagaggtcttggccagctcccgtgtcatttttcctgggggaagggaactaggacactgaaccttcatgcaatcagacgtgccttccacaggatgccaacagcaagctatcctctgtgcagtgcttagcctcgcaccccacggcataacgcagcataatttcttttagagcggcaaaccgaatctgaggagattgtcccgcctccactgcagcaaaagcctacgctaccatggcgaaagtgcgggccgcacactctgcacctaacacatgtgccaaacacaaaaaacacacacactataacaagcatacatcccagggctctcatccccgctcatcttccctgaagcaagggatagatagccagaggggctatatctttaaggggaattcagggatcaaaaagcgtggaaaaatttgaatgtcatgtcgagctggtatcggcttctggaataccgaaaggatctctcatctcggctccatcctttgtgcttgtgggatcatccaccacatccacaggggcaactggatcaggagcctcattcttgcagcgtctcatcaatctctccggctcccaaagaggttctgtctggtcctgtggaaacacaaacagaccttctcgcccaagtcaacacctgatctactcgatccccaggggggatggacacaatacctcgtggtgatgagaccataacctcaatcacctgtgtgtccatctggggagtcaatatgagagtcaagttttcactaacttcccctctgttaggcaatgatttccacgcccttataggaatctgattcacctgctcaaacacctgcactggatatcctgtctgttgttgtgcaaatctaccttgatcaagcagcatatctctatcccatgcaaatttagcttgatcagtgaaaataggacatcccagcaaggagaatctatcctctttccagacctccggacagaaggtctgcccatagatggctgccgaggaggcatagggaggaggcgcagaagctaattcgccttcctcttccgcctcagctcttttattttgtcctttctgtccacctgataacactgtgtctcctttctttttcctttttctttttaagcccttttcctcttccgacatactttcttgttgctctgtaaggattttctgacctgtcttgactgcctctcgattcaaacagtaacagagtccatatatcagaacaaacaagaccaaaactatcagacctacccacaaagggtcaatgggagaaaaaagcataactacacagcgaggatctattgatcactacactgaggttatcatagttccttaacttgtccccaaaccgggaaccttaacttgtcccaaagccgggaaccttttgttaccttgtgcctgcttcctggcaactttatgctcacctctattttatccgaggtccttcccaaactcctgggttactttgtgcctacttcctggcaactttatgctcacctctattttatccgaggtgcttcccaaactcctggggtcgcaagtttcactcaccttgaacttaccctgccggcaaccactgactgctgaaagttctgaactcggtgggggagtcggttccccgtacgggccaccaattgtcgcgcccactctcgaccagcaagaacgacgtgaccaccagtccttttaacagcagtttattcagcaaatttcagtcttcctctctcttctttatcagtaccgttccccagctgaagagttctgaatccacgccagatccttctcaacagtctgtttcacgggaacacttcattaccacagttccccgtgatgcagttctgaatcctccctgtagcagggggtcttcgctcatgcctgaagatgtttcttttcccgggttttctcgtcccaggtcttctcgtcccaggtcttctcttcccaggtcttctcgtcccgtcccgagtttttcttcccgggtttcggcaccaactgttgcgcgcgctcaactggccaggaagaacgacgctgctacaggatccttctgcacacatttattcagtcctgtttcttctttctccatatatctcccttgtttatatctcccttgtttatatctcccctgtttatatctcccttgtttttatatctcccttgtttatatatctcccttatttttatatctcccttgtttttatatctcccccgaaccctgggcctctcactccttttatactctctctcatccacgcactgcaggccacgccccctcgccagtcacgaggcttcagctaatcagggcagcaggggcaaatctccaccaaattggattcacctgtatcctggtacacctgcgcagcactcaagatgtttgtgtcttatatgaggaagtcaggtgcaagtcatatgacttagctgcagtctctggcgcctttgggactgccgccacacccgctccccacatgtatacattcacaggcgatgaagtatcactttctctacttcccttttaggttttttgcacagaaacaacacacacacacacacacacacacacacacacatgagtagtcatttctcaaggattcttctgcattgcagtgtgtgtgtgtgtctggtgtgtgtatttgtatatatggggtatgtttgtatagggtgtgttgtgatagctattaaataaaaggatatatctatgtatatacatgtgtgtatgtattttcagggaaatttaccaacagcctttgattcaggtaactagatatatacacagactaggaagggcagatggttaacaggacggtgaatgagattgtccacagatcggatgtcagacccctcagcaaatgcattttttctcttttgcatctgtatcccaggttgtgtaattgctacactgctctggatttctgattatttgaattattttagaattccaatggcaggctgttttatgaagagtgattaaacattctctctaggacacagctatctgtgtattcccagacagctgtataattgctaagtttatagttggccagagttgtgtatacaggaacttagacaactgatccttgatacttcagcagcaatgcatagtgtgtggtgcagcgaatgccacttagcccgcagctggccctgagtcttttcatgtagaagggggactgttcatcattttacattcactttaaacaaaatccactgtgtttttgataagacccatgatcttgtcattagaccaagtaacctgttgtacctcagggttttgcttggcttccaaggcacaatgtggcagggatggggtggggtggggggacgtggggggttgggtccttaggagtcactgcttttgtccctattctttttacctagtaaactgcttacagtgctagtcagttgctgtatttagccagcatttattgagtgcttactgttttcatacactattccaggtgttggaggtagactaggaaaagaaaaaccacatacccaagagtatttgatcttatgaatcatgtctggagcagggagaaacagcagaaacaacagtccagctaaggactaaaaccatccaagtactgcatgcctgtgatccccgacctcatgggtggagggtgggtcacgagtttaaggtcattcttagcaatatgagaccctgtctaaaacaccggaagaaggaggaggaagaggaagaggagaagtaggaggaagagggagaagaaggaaggaggaaaagaagaaaagaagaaatgagaagaagagaagagaatatttcagtttgaaagaacttgcctagattttactagacccagtattttattcctaataccaccccaaaatactgtttttttgtttgtttgttttttgtttttttaaagttggaatttgggccccatgatagactctaggtatacaacgtgcaaggctcatcatacaaaagcacatatatccatccatccatccatccacccacccaccccattcctctcacacaaccacccacccatccatcagttcacccatccacccatgcataccataggtgtgatcaagaaaggcctgactgacttgacctttgtgcagaaaactgaaagaagtgagttaagtggctctctgaagagagagagggagggagaaagagagggagggaggacgggtaaggtcctgagatggaagctggccagtagtactcaggtgttggcaagcagaccatatgtgtgctgggatgggtgagtcagagaactgaccatacagtgaggaaagcttggtgtgtgtgggatatgttcggtgtgtcatgttggggctgtgcatagtggagggccttttaggccctgtgatgactccagtccaggagatggagccatcagagtgctcgagccaaagaatttgatcaagggcattttcttctttttccattttcatatgtgtatgcgagtgtgcacgtgtgtgtgtgtgtgtgtgtgtgtgtcttgcatgtgtgtgtgtgtgagtgtgcaagtggaagccgaagcttgatgtcacgaactgcccacctttgcggtcactcttccaccttgctcagtcaatcaggtctctcaatcaaactcagagctcgctgataggggtagccttgttggccagcttgctcagtgaatcctgtctctaccctcagaggctaggaacaaagatgggcagcagagcccacccaacatttacctgaattctgggcatctaagctacagtttgtgtgcttttgtggttcccctgagcactctgggacactgttctgtggttgtagttactgtgttgagacatggtaggaaccagggtcacttactacaaggatcaacctttgggagtgatctgctcattgaatgggcttgacaattctgtgatgcttgtcagtcaaaggttgcctttgggaagagggaggagttctgatttgagctgatttgcttttctaagcctcatcccaggcagtaaaaggcctgtgaataaccaagtataaccctgaggagcccacagctccaggaggtagtctttctgtgtttgagactgactagggaagtttagaggaatgcttcaatattttctctttcagccccctgctgctcccacccccttcttcaagacttcctctacatatgtttatcttgttggcatatggagcaggctacacttctgggtggccttagatagtgaagactaaaaaaaaaaaaaaaaaaaagaaaacctccccacatttgtgcttatgggaagaaggacatattagattgtgcgggagggagaagagggagggagggacagaagagagagggggaataagagggaggggaaggaagagagaaagagagagagagagaatgaggctgactgaactttaattttgaggggtgagtgtatagaggggatgggaatgtgtgtttctatgggtatgtgccctagaaactatgtcaaacagaaaaacaaacagacaaacaaaaaaccctttcttttgaaagaacagtttgaacttcaggcctgttaatgatataattggagagcagggcctgaccccagcacctactaccttcttggttgataggaacagctctgctgtttgtcacctgttgggtctaagtgtggctctggtgggagccctacaatcctgtctcctgtgtttgccaggcttaattagctctagaggatgctatcaaaggctgtctggcagtggtttgttaatgataggggagagattcaaaagcactaattaattgttagattatttgcaaagcacatgctggaaacccgaagcctgcagagagggttggcagagaggcctgaagagattagccccgaccttcaggctcaattgcctcttggagttgggccaagaggggcatagctgttctttgtggagaagtacacttggccttattcttccctgaatggccaatttgctgttgaggctccagggtgacagaacttctgtggccctggcagaagcagaccgcccaaaggacactcttaggaagttgtgtgtgctttctgtttagtgagagaaatacaatcacttaacattcattaaccaaataaacacttcctgagggcctctcagaacaggcagggagctgcagtttgatcttgaagcagttcaggttcacagtgttaaatgtccaaaagcatcagggttaggcttttaggggtttagaacacttgctgagcgtgcctaaggctctgcccttaatctgctatcttaccaaaaatacctggccccaaacatccatcatgtcaattagcacctccctccccatttaggggagtcagcaaaaaataaaatatttaagtgcccagtgtaaaggaaaatgatgtttaaaactttgaaaaaaacttaaaaacccctaaatttgaaattccgtgtcccagtggaagctcggtgtagaccatacagggggaaaagggaaaagcaggctggtgctttttttcttttgggcagtgcatttagtgtatcttacagaatcgcaatccctagactcagccccatccgtcgtccttgtgtctgccccgtaaagatgagcgggatctgagcctttgccagcgaccaccattttctgtggattctgaggtcagcgttgtagaagaaagcagtaagaatttggtgattatccgagagccaaacgagtgcatgcaaatgagaaagctgctgtagccctgcttaaaaacaggctcagaaatactctaagacccaggtctggccttcactctgcctgacaggctgcagtggctcctccccacccctcagccccaccccaacccccacccccaacctgctcttctaggcttgggcaccggagtaagtagctacaaactccagaccaaatcgcactttattaacaagattcaaaagcaaagaattctaaagagacatttcagagatccatgctgagccatcccatggtactgtcacagcgtcctgaagttgagaaaggcacaagatgtgctacttctgtttattaagcaactcggatccgcaggagagtgttttcatgagcgcctcctggagtgcggtggagtgatgctcacccacggatgcctccttggttactttgaggtcccgtatcctgagaacacgaggacgtgccccagctggcaggccccagggccggactttaacactttctgaaggcccttcctgatagctttatggagtctgatgagacagaagctctcagagctgtcggaatcacgaggaacttcagcttaggagccatctttgggttggtaagtggctaactgctgtgggtgtgtgttgtgtatgggttaaatcaatggcctcacgtgtgctgagcctgcactttggtgtcagctctgtgtccccacctgtttttaagattggtttgtttcagcttcgttacatttttgggttttttatttttttgggtggggggaggggggaagtgatgccagcaggtagcatatcccagctaagctgtgagaggatgctgtgactagcacttgagttttatttattatttttaaagactttaatttagctgccttggaacataaccatgtttatttacatttaagtacataggagtgtgtgtgtgtgtgtgtgggggggggtgtccatgttgagagaggggggggggcaaatggccgagtgttcacagcctgttgtgtttgttctactgttcatgaatatggtacacccatcttactagttttttaaaaaatccttccgtacattgttgttttggtaggtgttttttcctcttcttttcttgtgtgtgtgtatgtgtgttctaggcctttcctccagtgtctcatgcatactaaacactaaacgtgtgccctaccactgagtgagtgaggctccttggccctcagcagttcagacttggaagacatcagtgtgttcacactgaaccatattcctcagacatgtttcttaaacttaggtccagggccctaatttagggctgtaatttcaccctctgtcaagcattcttcattaggaatgatggccattaacactccctatggctagaaggagcatgagttcaggatcaggtaactaaggctggttgctaaggaaggtcgctggtctggatggctttgctctaggttataggaactacagactaagggatacggtgtttagctaaggctcaggactaagcctgctgatggtcacagcatccttgcactgtggttaaaatgagaatccttgatactttggactgtacatcattaggagcagtctcagcatctaaatattgaatgctgcaccctttcgtcaggtcctcagattttcagtgaaatttcgctcactccacagaaggttttgggatttgtgaccaagagatttggtagagatttgccttcggagtgtgagtgtttgaagacttcatcatgctgaacagtgaccctgttaactattattgtacatttattaaaggaggtatttgtggtttgaatgtaaaaacggtgccagcttcgatgctgttagaagggcgaggggctggcatcactggggagtggggcagtgtgttagtccatacgtctgcattaaacaatctccagtttcgtttgtgttgttaatgaagcccagaaacctctagattcatgtgagcagacagctttatgtagagcggagttgtgagctgaagtggtctgtctttcatagaccaccatttccctgaaagaacactgtacagacagtggtcatccaaggcgttgcatgcagttttgacttaagtacagggtgcatcttttactcaaaggcactatttgttgcctgtgataagagtgtatccaatcagaattcattatttggagaatttgcatctgtcaccatggctatgagagtgtcacggtagttagctgcttttctgacaggagtaatggagacgctatgagcacgtgacattaaagatacagcacagcaggatgccttgtctgatgattctgtaagactcagcgaggcgttgctttccaaatgattggtacatggcacatgatgataccattcatctttagagcacaggacagaacagttgattcttaaagcctttatatatatatatatatatatatatatatatatatatatatatatatatatatatatatatatatagttgttgttgttgttttggagacagagtttctctgtgttgccctggctgtcctggaactcactttgtagaccagactggcctcgaactcagaaatccgcctgcctctgcctcccgagtgctgggattagaggcgtgcgccaccacgcccggcttgcagtggattttaatgcatcagagtaggaaaagctcattctgtgactcagaggcagggtttcgggaagccttaaaaatgactgcttgttgatccgagatgcgatatggaagagccccaaggacacggaaagactgttaagatctgcagtttccagtagcttagatggccaaccctctgtgcctgtgggattcacaggcaaagcttcaaccaagcagattggaagtatgtaaagcaaattgcatatataccaaagatatatagacagtccttctccccattatttcccaaataatccaatagacaaactgttcgcacagtattcccatgtgtcaggcactggagtaatctagaggtgatgtaaagtgtacctgagagcattgtctggctgtgctttctcatataagggacttgagcatgtctggtgggggtgggggtgggggtggggtgagggggttcctggaaacaatctcccgaggaaagctagggactcatgactctgtgtgaggccgcatttctccatgtctttcaagcagaataatgcatcataacaaattgaatgcagaagcaggtctgaaacccagctgcctctcattaagctggacattgaagagatttgcaaagatgcagaacagtctaactctgccctctgaatcaagagctgctttagaagttgcttttcctgcacaatgctgtttatgctgagatgcgctgtatctgaggttggctctgaacaatgtagtatgtacttaaatagttcccaggcttagtttctattgttgtaaacatcaatgtatgttatgcatttatatgtgtatatatacgtatgtgtgaacatgtgtgtatgtatatatgatacatatgcatataaatgcatagcatacataagtgttgttcaaggttagaggtaaagagggtagactgcagtataatttatgagacaggaattcaaggggttgttctgagcttgggacctgtaattgatttctttagctacttcccttaaaaagtagaaaatttaatgtagataggattttttttcctacaacgaacaaggaactttgaattattgctgaatgttccagcagtttatagatactacaaatgtaaaagtatctagttttgtagaatttttctgctgtaatgttgtatataagcttatagtaaacagtcacgtttttcacaaatcactttgttcatattttttttaattttattctttttttttaaaagatgtatttatttattatatgtaagtacactgtagctgtcttcagacactccagaagagggcgtcagatcttgttacagatggttgtgagccaccatgtggttgctgggatttgaactccagaccttccggaagagcagtcgagtgctcttacctactgagccatctcaccagccccctgttcataactttttgagatcaaccctaaccatattgtctaggctgtgatcctcctgcttcagcaaaggttaaccaattgcttgtgatgtctatattgaagcaggaagtgtaggttatagatatttataactgcttataatccttaccaaggtagttattttgcttcttaaaaaaaaaagcagaccaagaccaccaagaagataggttaggtggcattagtgcttgtaaatagagaattttgaaaaataagaccagctgtgctgcagaatccaatactttaaaaaccaaattaattatcccaaactttggaactaagtgtattttattttgttctgtattgttctctgacagtttcaggcggatgtactgagtttgggcacttacatcccgttcccctctcaatcctcctccctctgcggccttcctctccaggctctctcttcctcgaattgaactctctgtcttttccttgtgttagactaagaatcctaaaccttggagttagcttttgaggggtcggactgatgctagggatcacacgtagggtctcccacattctaggcaagggctccaccactgagtgacatcctcaagcacactgccctaggcaaggcagcaggacagtgtccgtaagtgtccgtctaaaccagcttttgagcaagagtctgtattccacgtagtagattttgtaatggaaaccgccactgttaaggccagtgccaccatattcaaccatgtgggcatccatattcatggtcatcttcagtcatatttaacagaaacataaatatccagacaccgtgtttgtccacgtttcatgagaaaatatttgtcactgattttgaacccaattctttactttccatgcttatttttatgtgtctgagtgtttttctggcatgtgtgcctatgcaccatgcacactatgtttgtgcctggtgcctgaggagggccagaggagggcatcaggtccccagagattggaattgcagatggttgtgagcagccacaagggtgctgggaattgaacctgggtcctttggaagagcagccagtgtccttaactgctgagcaatctctccagcccttgcaccagattcttttgatgtctaaggtactacttggacctctgatcttggagctaaattaacttactgtgcactggtacaataaagtatgttattagttcaaaacatactgcatatagattagaaatgttgggtgtttttgtatcaaaagaactctattcaacagaccacaagttttatttagtattttagaatatgtatgtgatccagtctaaagagaagattctgcttgcccccagtaagagaagttaactgagcacaatgctttcagaattgacttagagtcacatgtccagatgcacacatagctcttccatgaaatggccttgtgaccttgttcagtgttcttgccaataaaatgaaggtggtagcagtatctgtctcattgaattgttttgaagatttaataatatggtgcttttatgtacaaacccctacctgccatttactatattctgttaagcccatcaggactggtgaggttttatcaatcatttgtggcttcttttctcgtgacatcacaaagttttctgatgggtgtgtgcatccgtgcacacacaggcctgaagttaaccccaagggtcttttctcacactgtccatgttttattgttgttgttgttgtttccttgagatggggcggggggggggggggcggtgtctctcactcactgggcccagagctctctggttaggctgggctgactggctagtcagttcaagggaatcctcttgtctctgcttctctgtttctctaagaacaagaattgtgtgtgtgcaccgcaatgccatgctcttttgtaggcacaaagcaaacttaggttcagtgcatagcacagatcttacccactgatgcatctcctcaaccccgatattagaacttttatctcattagcaggattatcatctagtaagtcagacctggaaatatttatgttcataaggcatcatagcatcatagaattctagtaatgacatttgacatttaacattttaaagagtctttattttgtccagctcagtctgaaattatgcaaattatctctctaacgcccattaatggaaattctcagcctttgattaagtttaaacaagaaatctcctggctcatgaaattctttcttgtattgtcccgaaacctccactcttagctctgtatctgccctgctgagctacaatgggccacagttaatgaaaacccatctcaacgctggtggtgagctaatgagttctggacagttagatactacctaaaagtgacagcattcttgccttaatttagcaaaaaaggatttttctttctagtgatagaataactaaagctcacgtttgcagcttgagctgtcctgaaccagttggaaatacgatggcataaggactttcttctgtagcctggaaggttgtaagctagaaggtatggttagtgctctgatctctagacacctcttcccaaaacaccccctgaatggctgtcctttcccaggtaaaggggtgaactttcagtatgatggtcacaagttagggaggaagggtctatttgggcttgtagcctcagagcactcgtctcttggttgcttggtgcagaagtgtgtagaggaagaagtctttcacttcatggaagatagaaagtaaggagccaggccaaaagaggtcagggccaagatttccccaaagattcatcccagtgacaaacttctagctaaggccccttccccaagttcctagaagctgcctaaatagtaccactctgcaatgagcaagcacttgaaaaatgagtctaagagggtccatttatattcaaattctagtcctgggatgcttttggctttaaaattcaactttgtgtgtttggcctctgtctttgtgtcctcctgatggtggaagctctgtgatggtaaagatggagctgccttctgttaacaggttgattgaggtcctttgcaacaggcaagagctgttggcctggagcttgctgtgtagatcagactggtctccaacttgtggctatcctcctgcctctgtctctcaggtgcttggattataggtgtacactaccacacctagtttgaaatggcttatcttatgcagctaccagaacttggcctacaattcagtattgaaatgatggcattacaggtcatctctagatctccagggtgaaccctgctcttcacttagcacaagaaaatatacactgtcctctcttgtgtgtcatggccaatcagctcttcaggctggaaatggaagggaacccctcagagaggagcgtgaaagatctcaggagacgtatctataattatatgcaactttcagggaaaaggcattctttttaaatttttcttctcttttctgcatgaggctttcctagagagagagggttctaatcttatcagaagcaggagtatgctgtgctatcagtaggctattctattgggccagtctggtaatagctttccattatagccctggccaaggactacactgaacccagcttgactttctctgagaatgaaacaagaaacagcaccatcaaaacatcacaatgtagaagaaaactgtagtgaaatttctatcatcttatgatctcacacttactggggctttaaacattttcttatgtaatttgcaaagaccacctgattgcataaaacatatgtgaaactatgaagtgacaggtgttgcgatcctgagctggtaactagggaactgtgggtccctttcctttaggtgtctgtgtctgcctaccacactagtagctactcgttccatagggtgaggacatgtttgggtcagggctcactggctcagtccagggactaactggatcattttctccaagagaagcccctttggttttgtatcctgggagacagcttgccttatctgtcaggtttcacacttgcttgcagcctgccttggcttcagcgtttgactcagtagcctgatggctttgagtgagttagtataattcagtttccactttctttaacccgattgtgtatctcagggtggttgtgaggaataatcatacaataccacataaagggcttaggagaggccctggcacagtaatgctgcaggagacaggactgccgttgtcattttggatgttttgagcaggatagtggaaaagagaaaaaaggatattagaaagcttaatgtccttacatagactcaaaggactatgcttatactactgagggacactgtgtttccatgtgtgcttcttatggagtgagacagtggtgccctcttagccacaaactaggaaagaatgctttgagaagtttaaatttactagttagaaaataaaatgatggatctaccttccttccttccttccttccttcnnnnnnnnnnnnnnnnnnnnnnnnnnnnnnnnnnnnnnnnnnnnnnnnnnnnnnnnnnnnnnnnnnnnnnnnnnnnnnnnnnnnnnnnnnnnnnnnnnnnnnnnnnnnnnnnnnnnnnnnnnnnnnnnnnnnnnnnnnnnnnntttccccaaccccccttcttccctttctctttcagtccctgcttccctccccctttccctccctcaccttccctttctcccttcctccttctattcctcccatcttatgtagctgaagctgatctttttttttcaaggtcggattatttatttgttactcttttgttactctcccctcctttttattagatattatttgttactcttaaagacttacttttgactggactcagacttggaagtagaagctctcagcaaggagagcctacatctcttggcaatctgttcctggcgcttttctttggcttccctctttctcttggccaaaagtttagcatattctgcagcctcctccttgtttttcttagtgcattgtttcttcagagcaatacatcggcatttgtgttataggacacgtggagtaagaagatgctgaatcttgggtgctttggtcctgggcttcttcccttctttgtttaagggctttctgacaacatattggcagagatcgtcttctttgaagagattaaaaagcttttggattctactagctcttttaggtcccaaccgaggaggcacagtagtatctgtcagtctaggagtatccttttctcctttctttacaataaccaagtcggaacacttagattagcatccacaatgcatctgcaagcagacttgtgcttcctctctccagttctccttggtctgtaacagggatgccccttactcaacagcaggtgcactctgccatgggtcaaaatgccttgcttcatgggaaaaccttgtttatcatcccaccactgatccggaccacacaacccttccactcttcaccaagagcatcagcagctacttcttcggccatgcacttctcatagaccgtgcaaagcttgcaatcatctacttcagtgagtttctgacagccggtggcagggaaggagatactcagcttcatcttggtcgaggctgattttgaactcctgaccctccatcttccactccctgagtgtgcaccaccactccaggctgactttgagtttctccactttattggggggtggggtgactaaggatttaatccagagccttatgctccaccattagccacactcttagccctaactttgagttttctaagctgttcttgtacttggagttttagctgttgaatttcttgcatcagggggtcttagaaaaaagtgctctttctttatttggcttaacaacactcatatgcaaagtacaaagggaggtagacaaggtaggaagaaagggcatatgtgctttatgttttcattatttacgtttttaattgttaaactttatcataaattgcaaattaaaaaatattaaaattaaccagacccaaagacgatacagctgttcactttagcaaagactcggaatcaacacgtgggtagtgaaaatctggagtatacttaaatggaatactattcagctctaaaacttgtaggaaaatggatggacttagaatgtaaaatattaaacaagattatacgttccctggaagaaaaaaaacccaagtgttcttcctcatatctggaatctagccaagaatatatgtatatacaaaaaacaaacgtgtgtgtgtgtgtgtgtgtgtgtgtgtgtgtgtgtgatgggttgcctagacaagagaaaaacaagagagcaagagactaagcgttggggtgaggaagggctgcacacaggtaatgggcaggagttagggaaaaggatagaacggcaattgtctttccagttataatgctgtcgtgaatgtttcgttcttggtgatggataaatgaattaaatatatccagtagtgaaagtataaagcccagcaaaatccccacagcttccacaccaaacacctcctctaagtccgcacgcgtgcctgacactgtgtgctgatgaaaacccaggcatcttgtcttatggctttgtccccaaccagagggagcagatttgaacatgccatggaccagcccctgcccagagtctgccctcccttccctgttaaaattaattggccattacatttaataggactttaaacagaggtaattaattgtgactactattttgatgttcagtaggggaaggaagcattactttatgtgagcagaggctaacagggagtctttgaagtctgcccaggagcaaacgtcttaactatttggttttcctccagcttacaataaaaatctaagggcaagaatttcaagaattccaggatttgaacatttaatcctgtttgcaaagcaggttctgcccagggttccaagcttatgagttactaggatgaattagagggttctcggctttataatgatctgattgggtctttcggtaaagacagaaattgatgtttttgagaaaggcaggtcttaatttcacttatcttttaaatggccatgtttctgagtatggtaccagtgtagtgtgtgtgtgtgtgaagtgtgtgtagtgtgtgtagtgtgtgtgtgttggagatactcttactatctgtagtctagggtagcctcagactcactacatagtccaggctagccttgaactctaggtaatcgccttgttccaggaagtgctgaattcccaagtgctgtaattacaaatgtgagccacatactcagctaattttattatatatatgtttttcaaatgaaggtgggtcacaaagacagccaagtggggtttatgttcacaacatcccgtagcttctatgggccccagtcagggtgatttgattttactcaaaagaagaggcttgatttttaaagaagtcttgtgtgtgtttgtatgtgtgtgtgtgtatagatatatgcatgtttatgggtatatatgcattggaaggccagaggtagatggccgctcttgttctaccactctctacattgtatatttagacaggcctgtccagtgagcccagagctttcaggttgggttagtctagctagacagcttgcttcagggatgttctgccttggacctttgagtgggattacaggtaggctgccacacacccatctggcacttgtgtgggtgccgtggctccaaattctggctcttgcacagcacatgttttacccaccttggccttagtgattcaacctctatagtagtttttcttagaaagcctgtttctagaggacaggagctgcattctgcgagtaggaggctaacaactcctgacttttacaggtggacattcccagggcacttggacaggctgcaggtgctgtgcctatcacacactcgtgcgcattcacaggcctagcagatcctttgaacaaagttgccttgggaaggtggaaagagtaatagtggcttcttgcctgtaagccttggggttccaggccagtttttcctgctgggtagaaagaatggtgagcttcctgctgtgggctgggaggatgggttctgcctcacccgggacagggaagggcatatggcatgcatgtatagtgagggcacggccactccagggtgtggttgaggagctctttattgtagacatgagggagactacactcaggagcatctggaaaggtccagatcagggaagagagtagtccactgaacatggccagcagagacagccatgagaggagagaaaggcagagagcgagagaagaagagatgaccgagagaggaccaagagagagggtgtcaagagagaagggcccaagatagagaggagcccaagagagaaggaaccaggagagagggtcccaagaaagaggggatcaagagagatggagggccaagagatgaccaagagggggccaagagatttccttgctgaaatagcaggattatctaggaatcagaagctggggaagggaagtctatgaaatggaggagtttagggtggggtggggtgagaagtgctcacaggtactgagtgagcctgggcgcccacatgtgctttggtatgctaacgggcactacagttagccatttgtcctaagtttcttttggacctgacaatacacagtgtctctggcccagggccagtttcacctctccaagatctcttctgtcctggggactgctcaaatcccagagaggaagtttcctctcttctcatgccctttactcttcctgagcctccaggacaagacctgtcagaggggcaaaatcctgtttgcctgtcacagccgctctgcagccctcagggtcggctcctggatgaagtaggagatcctgttgatcactgtgcacagatgcagagaaacagaccttagggcccaaggaaagctcagagtgacctctgctattaggcagctgcgcccgacaccagtcgctgtggtaactgggctctgtttacaaaaatgaataagcacttcaagcctagggcatccacaccatggacagcctgccagattgccaaggctaaaccaaaacaaagacaaaccaaacaaaagtagcctggaagtattctgtcccccatggggggcatacacaaggccccagaatgctggcatccttcgtcactggacagaacatcccagggtgagcttatcttggttatgtcagagaaagacagaggccaagactggggcccctgtgtggtgctgcatgggcctagcttctcggcagtgagtttagatgcaagtagttgttagtactacagattcaaattcttgaaattgtcttttaaattatgtctttaaagaatatttattttagagtgtgtgtgtgtgtgtgtgtgtgtgcgtgcgcctctctgggggcatctgattttctgattttctggagctggagttacagccggttgtgagccatctgacatggatgatggggactaaactgaactctggtcctctgaaagaagagcaagtgtgctcttaacctctccagcgcctggttatgtcctttggtaaactatggagctgcatttgagtctgcagctgtgttaggaacagctgggtttgggggttatcctccctgagttcttctttttatgaggaacaatggtctgttgcttgcaaagaactggttgtttggctttcccttatagaaaggctactgacatctatgagtctactgtgaagcttggcgcttcttctggcctgtgctctgggtgtttctgcattctcaggtttcctgattccatagccgttgcctttcagtctggtgtgtctctctgcatttgctatacccatgaagtcatgaaggccctcagctgctcaccctgctctgtagacatcaagaagttgagggagaaaagaggagagagcctggaggtggggtgtgccgtcagctgcaatgacactgatgggaactggctttaaccagagctccttctcagaacaattcaggtccacctttgccccctcagcccttcatttcccaacaggctgtgagccctggggcccagccagctgttgtgggaccagagcactgtctcgaaggtatctcgcccttcaggccaatgcagttcctgtggcagttgctattgtttgctcctgatagttcatcgtgtggtctcctgtcgatcaactgaaccagatcagctttagttttcctttaaccaacgatttcagttaaagcctaacctcaaacatcctgctgatttccatgatcacagccccaggcctgcacacaaggccgtgaattcagcgccaaagcccttatggcagattctctttccttcagctcgctaatgaggccaaaatactgatggagaggtggggaggtcagttggtcatatttggggattcatcatgcggggtgagacttggtgctggcaaatctagtaatttatgtatttagtctctgtgtatgtgcatacacacgcatgcatgttcatgtgtgtgtggctgcactactctgtgtgtacacatgctgggagagggcagaggataacctgagccttatgtctcagacactttgtactttttgtctgtgacagggtctctcattgacctgggacttcaccaactagatcaggccagctggccagcaagtcccacatatttctatcccatcttaccaatgatgggatttcaagtgctctttctccaccatgcctggtttttcacttggattctggggatctgaactcaagacctcatgagtgcaaagcaagtactttatctactgagccatctcccagtctcgaagctagtgcttcataccaagaaattgtaaagtaggggaaacagccctagactcttccagggttatcctgtcactgtcagagtcccaggcgctgttgccttaggagtgaggaagaggcttgttcaagggtgccctggctgcgctgtcagattccctagggtggttcaagctagcagcaggatgctattctggacagtgcagccaaccgtctctctggcatctgtcagccagtaggcatgttaataacaagtcagtcggagagaagcctgcactggtcatagctaccttgccttctgaatgtgggtcagagagactgaatagatacattcattcagtgatcagggagtggcagcacctttacccaaacagggtgattttcagctttttgatgacacacgctgttattgttgtaaataggactggctgaaaatgtgcccctgggagttaaggctttgctctcttctctaccacagatcctgtctccctgtatctctgatcattctgtaagtatctgttaagggccagagacatacacagatgcataggaaggagagggtaactgggggtcctcctttgtgtctcctccttaccagtctttggcactgtccatcaaggacaggaaatagccatcggttcctttggtaagagcagtttttagacaggtttggaagaggaaatgaaaactgttgaaaaacaggagatctgcggacaactgctagagtcttcttagtcctgtttcctgggaactctttcccagttaccactgaaaatggtggttttttaagtttaactagcttgtaggtgacgcatgctgggaatagaagccagaaccatcccatgctataaactaccagcctgggtgtgtctgccctggttctgtgcctctggttgctgtgatttgaaacttcaaatgctaactgtgtgcctagcactacacctcacacctccaaggccacccaggaccttcctctatggtggtatagggtatggtggagggggagggacagaagctttgctttggtaaggcctggtgtttgcttgaacccacaagtggactgcaggtctgtggggaatctgaaatactaacttccagccatgctgtgtacaaaatgaaaccagaaaacaacgaggcgtgtgtagagcaaaaaggactgaaagtgactggaaagatggctcagcaggtaaagcaaccgacctctgtgcaagcctggtacccgagtttggccccagatcccacatgaaggtgtaaagggagcactggagccatagtgtcccctgattgccagctatgcatgtacacacacatgcaatagtgaaggataaaagagagagaggctgaggataaggctctgtgggaaagtacgtgctgtgcaaatgtgagaacccgagttcagatcgctagtacctcgggagatgcccggtgggtgtggtggcccagtgcttgggaggttgaggcaggacccttggagcaggaggctagctggactagttgaatcagaaagccctgggttcgagacaaaggccttgcctcaacatataaagcaagagtcacaagggaagacagctgacctcacctccacgttcacatccacatccatacgtgtgcatgcacacttacacacgtgtgaaaaaggaggaactgggcatcctggcagatggagaggaagaggcaggaggattgctgcaagtttgaggccagcctttcatttctctggtactcattttcttaaactacagttgagatttccttttgttttcctgcaccagagagagagagagagagagagagagagagagagagagagagagagtatcatgcttgtaatccaggcctgcagatggctggcagctgtatgcctcagcgtttggaaataaaaggaattttagcccttcatgaaaggtagacattgaaaaactctttctctgctacgattcttatcttccctttttggattcccagcacaaggaagtcatttgctacaacaaggatttgtggaaacacattcattcaaatacaaaaagagaaaaacttgactagtgtgtcaagcaagccttccctgtgacagtgctggaatacgagtttacatgccacagtttaaagtttaaatcattagcgacaagctcattgcagccactggtgagtgtgtatttactgcaaaggcccgagagatctaagctcacggcagcacacatccccctggttatcagtaccatcctcatggctgagctggggccctcgttccagaaaacatacttcctttcgtgttggaaataatccgcatttattttgaccttcagaggactcgtggccttgctggaggacatgagccaaaatttatcctggcaaggccagagctgttggaggcttgtctccacagggattgcatagagtgagccgttagaggcagcaggaggaaggtggctgaggtcaaacagacattcctgaactttccggcctgaaaattaaaggggtacttaagaaaagcagtatttgcagcccctctctctgtgtctgtctctccatctctgtttctctctgtgtgtctgtgtctctccatctctgtctctctgtctctgtctctctgtctgcctctctatctctgtctttctgtttctccgtgtctctgtctttctgtctctgtctctctgtctctctctcacccctccccttcccaccccagagttcctgtttgtctgactttgccaaggttagagtgttctttgtagctgaccttggtaggaagaggacatcgaatctcatttgtcactgtggattaatgcctgtaattctctaaagtttgtcaagtgcagatctcagaagatggatcacatgacttttgagcagtattccttggttgtaaaaatgttgttagctgaggatgcagcttatgccagtctttgcctagcgtgtgtgcaaggtcccagttggggagatattttaatccatcaggtgctgttgcgtaagcacaagtcctcaagttccgtttccagaatccatgtggaaagtcaggcatgatgtgcatgcttgttccctgtccccatgctggggagacagacacaggtagattcctggggctcactggcctgacagcctagcccgatggtgagcccatggtcccaaagagacattctgtctcaaaaaacgaaacaaagcaaaccaaaccaataacaacaaaaccccaaacaagatgaatggctcctgaggaataatatccaggtttgacccctggtctctcttctcatgcacacatatatgcatacattcacacacacacacatcccccaagtttgatccccaacatgggcaaaatatgaataaatgaataagcccttataaaagtaccgtcagactgttaggtggctggagatgactgtcatggtgtcttccctccaacctcacctcagctgagacagcgaccaaagcgcaaggcagaattcaaaggactgctcttactgcaaagccaatgtgctaactagaggctgcgtggcgagtgtgagaatccttagctagaccagagtctcttgtgacgctgaaccacagttagcatctgttatatttctagctgttttagaaacaggagatgctgaggcgctagataaatcacacgtggtaacattaagacatttgttttactaagaatatccattatgtgagaacaattaaaaatgatcattttagagtcaagctctcagtttgatttgggggaggggtaagtattttatatcatacttacatgaagaatatggatactgatggtcttaaatacttcatgtcactgttgatgtttactgtgccggtgaagagtttcatctgagcccagtaaatgggaaccacattctgtaatgattttcagaacataaggtgaaagaggttccataaaatactcaggtgggctgagtgatgagatgaacatctgctagggctgggacgatagctcagtggtagagtgtttccctcgcattcacaaggccctgggtacaatactcagtacaaccaaaaaggaaaaataatagggagatagataaatagatagatagatagatagatagatagatagatagatagaagatgatcatttaatccaggacaaaggattctgaccttatagctgtgtgccagccaccttggttgtctgtgtgttttcttaactacacaggaagaatgttaacaagtctaggtataaaagaatacactatgcaatgtgtgttcagcccaacttcatgcccagtgcaggtgagagggcaggatgataagagtctgcaggcgagagctagagaggtgatccccggaacccacagaaggactgttccatcactcagaggcaggagcagatccctggggcaagctggctagaaggttagctgtagagctctgggcgcaacccaaccgaaagaccctgtctcaatgaacaccgtgaacaatcaaggaagacttccgtgtcaatcttgggactccacattcatatgtgcatgtgcacatgtgtgccccacatgtgtgactacacatacattatgcatgcatgatacacatatatgcatgtccagtgcatgcacacacacacacacacacacacacacacacacaaacagaggaagaagtttgcaggactggttatgtgtagggaaaataagaaagaaagaaagaaagaaagaaagaaagaaagaaagaaagaaagaaagaaagaaggaaggaaggaaggaaggaaggaaggaaggaaggaaggaaggaaagaaggaaaaggaggaaggaagaaaggaagaagagaaagaaagaaggaaggaaagaaagagaagaaagaaagatagatgtgtgttttgataatctttgtcaagtgttttttcaaagactggcctcagatttaaagcattatccagatgtagtctttggcctccggtagtcttctgataggaactcggcctggagctgaacttggacacagcctgttttctcttctgtttaattactaagtgtccagtctgcctctctttgttatttctcttcttgcccttctgttgctttcttcaggggctgctgtttattctggaatgcaggacacccacatttagaattagggtttgtgtgcctcgatcctaaccaggaatggggaaaatgtgatctgatgttttaatctacaagttttagtagactcagaagggttctaatccacagctatgtgctcagaattccaacctgtaaagcctgcgggttcactggttagtgataatgcaccaacctcgctcttccaggctcaggctgtggaggctgctcactgtgtcttcattggcttcttctttattgtgttcaagaggaatctttctttgcttgccagcatcggtctatatgccattaaaatctaaattgttttctgtttttgtttgtttcttcagtgctgggatcaaaccagaacctcatacaagttggacagatgttttctgtttagtgccaaagttcagatttcttactgggcaagtctaactcattaatattttacagatatctcctgcccaaatttatagaattttttttgatgcctgttgcttttgttcatttttggtaagacaggcaatatttgctccaggtgaaactcaggtaaaggaaaccagggcaggcagcttggacgcctcagatctaagccagagtctccagactgccaagatcagtgtttcctgttggttctcactgtaaattgtggccttttcttttggagagtgggatagggtggaagaagaaatgagatactttccaactgaatttccatatattggtaatatatctttatttgtgtagaactttccagtttaattatgaaaaacttttaagtccaactcttaatagtttttataccttcccttgggggtagcgaagacaaaaattatccctgtgtttaaaaagaaaagacaggtcttggaatgtcttcagtagttagagtactggcctagtacacacaaagccctgggcttaatccccagcaccgtataattgtgcctatcagcatgtcacaggctgtgtgttcaaaaccatctgcctttagtttgttaatagtatagtagaagttcgtagggctgggtgtgctagcgataaactcggtaagaacccactttagggtggaggaggggtggaaggtagaaggctatgctgtagatcaaggcctgatactgctcatttctctatgtgtctagttcataggctgactagttcagtataataatgcattacatagaaaagaaaacgtaagtctgttgtggcttccagacagttttaatgttttttggaaaatctctcacttatcgtctttaatattccaaagctttattgtgactcgctttagctgtacagtaatagaagaggagaccttgttgcgtgggagggggagatggctcagcagttcagagcacttactatcctcgaagaggacttgggtacagtttctagcacccacaacccctgtagctccagttccagggactctgacactctgtctgacctctgtgggtacagcatgcatgcgctacatataatgcctgaagacaaacatgcatacagataatgaaagaaattttaaagagaattcccccttgaagactccatgaagaaatctggagaattatacctttgcagcacgtacatattaatttttttctaaacattgagatttgtttcatagttgtgagcagggcagtgttctgaatgagagagggcaaaatgtaaggagttaaaaaagcatagttaatttttccctctctttgctcaaacatgtagttttaccataaactactgacagtttcctgttctggcttgatttaaaaaaaaaaaaaaaacaaaacaaaaaccctacacttccattcattgtttccacgtgacttcctatgccttttatagtagagaagattgaaatctaggataaattacgagttatctttggaggcagagggactctttattatttcagaaaggagcttgacaagtctacctatgtgtgcatgatgcctgtctttatgcaaaggtttgcagagagtgcagtcagaccattattgggaatgcttgctgacccacactgtgtttgttaaacgttacgttgtgattgcgccagagaagggttttccgaatgacaacattctgtgttgtcttggactgaatcacccatgatggccatttgtatagtactggctgagggtctctgatggtgccttctcgccctgatttgagtgaaggcaggaaggagttgtgactctaaattctttggtggagccattgaggagtgattcccacctggtgctagaattgctgttaatctggcgtgtctgtcacttttgcagcacacaaatcgacttgagcaaggactggttagtgtggctctgttcagagcacagttcatcgaagtgggaaaatcacggcagcaggggctctaggccactgctcacacttctggacatgctgcatgtccagaagcggcaaagagatggatgctggtgctctgcttactctctcctttgtactcagttcagaatatcatagaatggtggcatccacagtcaggatgggccttccctatcagttaacacgatatagaatctcccttgcagacatgcccagaggtttgtctcctgagtggctctaaatcctgtcaggttgataagcaaaactaaccgtgctgggatgtgcaggctctgcactctctttattctaacagggattcattcgggggagaaaaccatgagaagctggggatggggcaaccacaggaacttatcagacctacttatccatttaggattttttgttttgttttgtttttccttttagagtttctaaaatacttgaaggtctctgagcagtagaagcttgaatggacttttaatagagctttgctgtgaactaaactcccaacagttcaccttactgtatgattcttgctttctttggctttttattcaaaataggcaactgtgggcctgggattcttactattatctaatattgttttactgtgtcagttttgtttgttttttgcatcctgaaggaacccacaatgttttaatgacttgcaaggaaatcagatgtcacaaatccacatgggccattgtgtaaatggggcagggagctccacccagcccttgctagggtggatcgacttaaaattgaatgtaagtataaatgttaaagtgacaggcttgaagatggacacaggcctatatccagagggagaaagcccttcaggtgtgctcagagtccaggcagaactagtaagtgtacaagtggggccattgtagtagagatgcaaactgaaatatcagggctgactcagggagtaaaagctttgcaggcccggggcctggggccgatttctggaactcatggtagaagaagagtaatgtgcttgtgcacacacatacacacatgcacacatacacacatgcacacaaacacacatgcacacatacacacatgcctgagcacacacatacacacatgcctgagcacacacatacacacatgcctgagcacacacacaaaataaataaaaatgccaaaacaaagggatgaagagatggctctgtggttaataggacctacatttggatgtccaaataggacccccatggttgtttgcaactgcctgtaacttcagtttcaggggatctgacaccctctattggcctgcttgggcactgcacacatgtggtatacatacagacatataggcaagcactcatacacagaagataaaaataaatattaaaaaaaaaacctaaagtagcatgccaacccttaataaactataattagtgtttataatgataaccttaaatgaattcaggaaaaaatacaataagtcattttcagaatgctcaaaatatttaagctggccaaaaagcaattatgcattagtatgtgttaggtaattttccatttaaaaacatgaccaaagttacattagtaaagttcagtttggtggggttttgctaatgtgtaacatggtgggaagtatttcagatatgaaatactgagagaagaaatcaataatatttcaaatcatagatattaccttaatctcattttctgttcagatcttacaaacaaaacccttttgtggtagggtttggtgtgcaaagcatttttgtttttaggtcggaccatttgaaagtctgcatgtgagaaaatgtgggttcccgctggcagagtcagtgacttccctccttcactcgggaggaaaagaagccgcttgatccagagtggaaaaacactgaagaaaaatcccccccaaataacacccacagattttagaaaaacagaaattgctttgactgatgtgacacacttaaaaatatatccagaagcacggctccagcgttgatgcagcaaggcaaccggtcttgaaaaggtgctttgtgcgccaccgggcatgtaacccactgtgcggtgtccccatgagcatgctcagtagctgccttgtgggacaggtatcccatttacctcgtgtttaaatttgggggaagatttttattaaacaacaagacaataatttctgtaaaatgactccccaaagccactcctcctttgtagagtgactatcaggtctcttacatttaaatctaggaaaaatatttccctggcctaagagcatgtttgtttccttttgacgggatccatgcaaccgtcatatttttaggtgatcttggttaatggttcgttgctgggtttgatttctttagacggattcttaacaagatttctatcttgccagcatgactttgaattgattgcagctgacgtgggctttcttggatttgttgttgttattgttctgagttctttgatttctttcgtagaaataagtatacgagcaataagagaatatgtaaaagatcaggaattttctagcagtgaaacttaaggcccccgtttagactagtattgatacatgacctttgagggtcttggatgaaagccatgcggttgatgtctgaaaaataggaaggtttggaagggtcttttcaactcatgcatagaagtccttaaaacccatggggcagcagtcaggacactaaacagcatccagggtccattaagctctcctgccccattgctgctgccgcagagggagactcagctgagttaggaagaagttttcctttgggaagatgttgggaagtacgaaaatgataattacaaccatgttgtagctgaagtttgttctaggagcagtcccattagcagcatccccttgtgtggatagagatatgttacaggatggttaagtaactgcctgaggccatagcactaaagcgtggcaggactgaggtttaaatccaagagagaaacatagaagcagctcggggcttggttattctgttgatggagtcatcattcagtgagtctttaaaaactcctgctgcatgtcaggcatggcaccagcaatgcagtggacagtaagcagagagcatggctcttgccatcgcggggtttcggctgagagagtcaggagagagacagagaggagagagagacagaggcagaaagagacagggtcttactatgtagctctgatagttctgatcagtctgtgttctaactccagagatccacctgtctctctctgcctcttgagtgctgggatcaaaggagtgtgctaccacgcccagctcaaacaatagatttctaagggctgacctttgctataaaagaagtctctgatgatagtttaacaggtttaaatgtaacagggcatcaaacatgcttcaggaccagcattagtgatctgggaacagccctgctatatttctgaggtcattgatacacatatagtttgatacacattgatacacatgaagttctgtgactcctgatgagcccagagcttccatgagctgcaggaattacatctcctacagagccataatcaccccctgaatgcagcaagtctctgtgacatacgtgtgttcacaagattcccttcaaaccactagctgtcagcttccatgtatagaagcacctaagcagggagctagtgagaggaagaagtccaggttggtcttataacggggtctgatgcacatcaaactgggtaattttctgttaatggtgagcatctccttcagttgttgaaaaccagttgctgagtgccctgattgcatagaaaagccttcaagcaaacgtgttgcagtttatggcttgcctttttgcacatggatctaaccagtaataggtcacgtggccaatgcaaaagttggtagattctttttctttttaaatctttctctcatctgtagtcaggacccatggttttaggtgatgacccaagtgtttccctcgtccatccttcctgcccctcctcccgtatcatcttatgccacttgtgccttgcccatggtgtgacagagtgcttcctcagcctgagtggtcctgctgtgtgccacacctcagagctccgtgtataactcttcctgtttcttgcttcctcttttttttttttttttttataatcagatttaaaaagagaaagatggaggctagggctatagctcagtgcctatacaaagccttagattcaacccccagtacccacgtgggagggaaataactagtttggtgattattgtgggtataagtcaaggtcttcgtggtgaacagatctgggactgtcacggtagtcaacgggacaaccctgtgccccttgaagtctcattttgccctcgtagggaatgggttacaaattttgttacgtgaatgactggcgattgatattataagtttagagcaattaaatatttttgtcttaacaaaaattgtattttctttgagtcattttgtattctgaagtcaagacggggagtgggggaagaaatccgtttttcttttctttcttttcctcctttcttttcttttccttggactttaaatcttaaattttaaatattatcactagtgtgcatatgtgggggtggggaagggtttgagggtccacatgcaccgtggcacgtggcagcttgcagcacctgcttctctccttccacagagtgtcccggggattgaccccaagtcatcaggcctgtggggtagacacctcctgacacgactgcagccagagaatctgtcagttatgttagcttcttatctcttaagtgaaagctgcaggctctgtccccttccacctctgcgtcctttaagttaggagaacaggagtgtgtgtgccctcctttgagtgggaaatggaccaaagcttggctgagctggagctgagctaaccagagtcctcagagggctggggcctgacctgttgtccctttcagcctgcactcccagaatgcattcagagaacggggaattttactctaactctgtgtgcggtttaatttgaagtcttcccactataactcttaggaatactttggagtagttatagctgtggagcaccacaaggattctttcttatcttaaaggctttactacacattctaaaaggccaccgagagaacatttttcaactgggtgggggggtggggaagtacttttcatttattcatttctccctccctggaggaatttacgcctctaatactacatgaaatttgaaaagtgattttacatgtaacccttactttagcagcaggtcaaacctgtgagggactgagagagactgtgggaagcattttaggacatggctggaggctggaggcttgtggtagagcacttgcctagcagatgctaagtctagggtttgatccctagtagagcacaaacagcatgtagctccacccaactcccagcgggccgagctcctctcacttccctattgtagggcttaccctatattcatattttctgctccaccatgaagctgcacccctaaagccctaggggctcctcttggtgttagccagtgtggaatactaacctctctgtcccctattctctgagatctccacacaccctattgtagggcttaccctatattcatattttctgctccaccatgaagctgcacccctaaagccctaggggctcctcttggtgttagccagtgtggaatactaacctctctgtcccctattctctgagatctcctgtgtggacacttataagcagtagacttccgcacaggtagaagagccacagggccttactagcttggcgctttcccaaccctgagaacgtgggctcgcagtgaagctctgccctttgtttccttttgaacatttcaaagctcagtttgaacacaggaaattcttcaacatggttgcacccgctatttcaacacaacagtatacaaatatgcactggcttccagcccgacaaattgacatttgacttcttggaagatggtcggtattgtcaggaggatggcttgggttctgatattcaagcggagggtgaaaggcaccctgataaggctgagcccaaagacgtgggctcacttccatcaagtaatctgtgcttcaggcttaaggctttcccctatcagaaataaacttgggattctaactaagtctcattgttggaaacccaagtggggactgtggtctgagggccccttcaagagtttaatggccatacattccccagctctatccccaggggccttagaaccaatgaatagtaatttaagatggcacgaatattagctcatgttgtgtactggccagaggctctggggcccagggccttccaggtgtttcttctctttgagctttatttctgcatcatatcctggtatttgtgacattcctcctcccagagctcaataagagccaggctatgctgttggctgagaaaacatcctggacccccctttttcgctgactccggcatcctctggtgcatagcgggatagagtaggccctacagtgccccaagtcccacagtctgtgggagtttgtccctcttcacagttgacggcattgcagaattccctgtggcacagtaacacaaacccttattagccaatggtgtcgttgcaataaaaaccaaccccactgcagtgtcctggtcccaggctataatgttacttcttaattcccactgcatctttaccatttttattacagctgaacacacgtttctcattagtaccctgggcgatatggggaatcagaatactggggattgtgcagaatcggtaccagatgtttgcgtcagctttctgttcattagggtggaagatgtttgcagctcacatcgagtagatatgaaaacaccttcctgtgcttccaaacaatgtccttccctccagatttgactcgatattatgtgaggtgtgacagcaatggcttctttcaggggcgggtagattaaacatagcatatgcagcgaatacaaatctgtccccaaaggtttcatctgcatcctgtccgaggcggggccctggcccacagccagcatggttctgtaacccagcggggaggctggatgcagtctatttgcatttttctctgtgggtagaactgggaatttagatagtgatgtcacgcacagtttcccatttgtccagataatcaatcagtcattaattgaatggaccaagcagagatttggtcaatgagacaggaaccagtggcctttcttcagtgagggcatggagtctttgaagttggcattgggcagttccgacctcactgatttttatcacgctgtcctgttagatgtgaatgcaggtttgtgtgtctgtctgcagagtcctccatgaagacctgtgatgtgcaaagcagaagtaggtgttgtgttgttatgagagagtctggaaaatggttttctcagtcccttgttatttggctggtggggcatgactttgggtcagcaaaggacccttctgtgacccggtttccatcactctcaaatcagaattttagctgcatcatctccgttgaattacaaggatcagaaacaatacacacaggatgtgtggcccagagctggtacatgctagccttccacaggagagcttgttgtggggcctgttataccttgtagacagccctgggcagtgcaaacctcacagtgttgctttggaggatgttgctctgtgagggaagctggtttggtgatggcttcatcagtgtggctgtggaaggcactgtgtgtgtttgcactggggaggagggtgatgcatgataacaagccaacctcagggcaggagagaggtccattctaataggacatgatgcccagtaagatttggggaggctggggttcctaaagagccaacagagaaggatcaactcagattatacctggagaccacaggaaatttagatatgagccggggaggggcaggagggatgacacagggcagaacatgtagcagatggccagaattcctgttgaggaatgaccagtcgggaaagctcaagcgtggaatggccccagaggggatctctgagtgcgtgattgccaaggacttggcatcttgcaacaatttagttatagtggaataaataagatttattctactcacttataaaagtttctgtgaggatccagataaagcgtctgtgacatgactgtagctctgcaatgtttagtgacggaggagcctggtttcacgtttgtttacttatctacctgaggctggcctacgacttgctgtatagccaaagatgatcttgagtttctcatcctcctgcctctttttcctaaggctgagtgcaggggttacagacacgagccaccaagcctaatttatgcagtgttttgagactgagcgcagaatttatgtgctaggctagctacctaccaagccaaataaatccccagcctttttctaaaacaaaaacaaaaacaaaaacaaatcacaaaacccaaaacaaaacaaaatgcaaacagaaacccaaccaaccaaccaaccaccaccaccaccaccataacagtacatatgttgatgaatttagagaaagcagtctctgtccaggtttcctctcaaggtggtgagggagccctgaggctgctcactggtctctggattacagggtcaggattgcataggaacaggaggactataggtttttagctgtgtccacaagagaaacctctagttggtgaagatgccccccagttcacagagcattgcagagcaagccagtcaggcaggtgtcagagcacactttcctggtatctttcccttgatggctggaggtgttgcattcattccagttagtgcggcaagaaaagaaaccatcactgtgccccctcagacatggggtgggggtccgtggtgtgagccatataaaaggcttagctaaatgcagccaggtcccacaatgtgtgggcaggccttaggtgagctctaacactgtgtattgcatctgcattctataggtcaggaaggagtttaagacagaggacacgcccccttcctcctgtaaccacaccccttggaagactctatgcgcgcagccattggttccatctcagaacttggtcactgtagccttgtatagatgcaaacggggctgggagatgcagccttcatttggtgtgatcctgtgcggaatagttggggaaagaacagttgatgtcaagaagctgataggaagtctgtgccttagccagaacagctagcacacagttaagcattcggggtgaggcccaaccaggtttaggcgggctctcttagccttgggttgtttagggcttcacctggagagcgaaagttcagaaagtcctttttagaaaggacaccaccacatttatggtttttgaaatctttattttctttttatcccctctctgggttttggttttggcctctggtacatgctgtactctcagcataacccagctatgccacatgcgatttctctatggtgagttcctggaggaaagtcgctgggtcagaggataggccttttgctctctcacccagtttgtggtttctggaggttgctctgaccttacatataaaatttttataggcgtaccctccctcttgacattttaaaaaatgaaacatttcaacataggaagatgttgaaactgcattcactacacatccaagttcctcgcagttaacattctgcaatagttgctttatcagatgtgtgtctgtccatccagacggctccattttggatgcatttcagagtacgttacaaacctcaggatgcttcagcacctatgctatgatagctttctttgtttgtttggctggttggttcccacagactgtgtgaatactgctcagtcttgctcatcagactgctgtctaccaagggagaaggccagaggcctcaggtgaccttagaatagtcgcctaagtgtgcagagctattgtccttttgtttaagatgcggaggacgccacctcctcctgctgtacaggactcagcattgcccagcagagtgggagctgtgtgaaggggaatgatcttgttattatatttactatatcagcctgacggtatatcaaactgttgaagacattgttttatataacatttaaaatttgttagatgtgtttatttatttatttagtgtgtctgtgtgtagttgcacatgtgtgtgaatgtgtgcttgtggtggctagagcttgatgtcaggagtcttcgttactctccaccttagcttttgagacagggtctctcactgagcctggatctcattgattagctggttggtaagctctgaggatctgctggtcttgccttcccatagccagggctacttgctgtgtgtgttttggggataaggacttcacgccctcaggagcaggcactttatcttctgagctgctgcctcaccttttatacttttgaatggataatttctcacatacacatcattattttttgtttgtttgtttgtttgtttttagtgtatgcttggtaatacgttgtgggctttttttttccaaacttgtagggaaaacaaaacataatgagcaaacacaaaaatgctggggtgccaggagcactctgtattattaaatgctgtaagtgccaggagcactctgtattattaagctttctgttgccgtaacaaaaaccctgggatataattaagtggaagaaaggtttgtgtctgaggcattatatcatggcttttgggtcatggttgcttgcttctatcattttgggtctgtagggacatagtgtgtcctggtaggagcacgtggtagagggaactactcatctcaggatagccctggaggcagaaagaaaggtaaggggctggaagtccattgcccgcttcaccacaggtgatctaacttctttacctcatgctccatttcctgaaaatgctgtcaccgctctagagcagccagagatagccacactgccacatcgaggtctcgagagagcctttcgacccagagcatggcactgagtatgtttagacactagactgcagaaggatcttagacaggcagctgtcctgccgctcggttggtagactgtgtgcatcttcagcctgactttgggctggagctgtaccttcctcctgccccccctccccccctcccccgccccctgcctcctgccaagcaaagggcaagagcaggctgctcttctggaagcacctgaggagtgctggtgaccttggagagaagaggcaccttgagcgggctgcaggccccttgggagatgaatttggtcaaatgacagagactgaattgttcttgtgtttaatttgtgatcattgtaaatcatggcaggaggttctgaaaccaacttggtgtttccaagcccagtagctagtctatggaatatcatatcatctgtgcccccagattccggagggacagcctttctctgaggctcaccccctgccattgctgtcagccccttccttcactgccttctgccttctcagaaagcagctgggcactgtccagcaacagagtggcagggattatttgaaaaggcacatacttcatttcagaccagatttctattatcaacctagataatttctgtgagtcctgaaatagacatggcccagcaggccaggtaccagtttatgacatagcaataaggtacacaatggctaggccagaattacagatggccatttgagactggggctgtaattctaaagagtacctttgttatttagaagccaggaggaactcaccagaatgcgggaggactttgatctgggttccctcagaaaagcctgcagcttagtggtgccttgggctcacattcctggagactcattggaatgaagtgagcaaatagcagcgctcacagggatgtgtgagggggaagagttctaggaaccctcccctctaccttctgacaaacacagattaaataggagaaatagaatagaataggaattcattgcaaaagaggaaagttcaaccataagccaaaaatccagaaacatctgctccgtttcactagggagggggactgcagatatgggaaatctgagggtttgaaagtgtttttaggagaacccagtgagcttggagagtgtgaacggcagaagacagttacacaaaggtttgccgatggttccctgtgaagtactgaatgggaccaacatggaagaccatggactgtgataagtgtccaggtgtgtggacacactgcaggctctcagcctgccatgagttcacccaatgccttgggatggaaccagaggtgattacatgcttccttggggtccagactttaaacagtcagaaaggcaccagagggaagtctcctctagcttctgctgctgtctgaattcctttataaagttaaaagttcaactaacatcccaagatgccgtgttttggggtgacagccccagaacctctttagtgtcccctttcctctttctgggcacctgtttatcaatatgggatgtggctggggaggagtggaattatagcttataccactgtagctacccattgctcgcccattagttcccgtgaccagtccctgcaggaaagagggaagggtggggggagacagagggagagggagagagagagagggagagagagagaatacataaatgaatatatgaatatgaaccatcttcatgccaggtaccatatggagttatgagaacctagcaggcgtatgagaaaatatgaagatgtagctgtcaggaagcttacactgtaagctgtactggttacactggctgtaacaggtgtacacacctgtagccctgtggtaaatgagccagaggcgctaggtaaatacattatgggggatgaagagatggggaacagaggaatacctccttcagctggggaggggggcatttattgtgggggtggggctagagttgaagagtttgggtgaccaagacaagctttattaaagacatgaggttgaggattttcatgcttcctctggtgatccttaagcaacttggtgcagctgggggtgggatggaggcaggaagggtaggaggctagatggggcaaggcctgatatgtgccctattaaggggctaaggctatacttagcagttctcagaggtcagagcatagtcgtgggtagggagggcagacatttgcatgtggagcaactgtagagttgtattcctcctggttagaaaccaccctgctgtagagatggctcagagaatgtgaggggtgaagccttcttaattgtgtggggacagctggaaacagaggtggagagggatggtgggtttagacttgaaaaaagcttggttggttagaggaacaggaaaagagacctctgccctacttgacttctgccctaaactttgccatgcaggtctggctccaaattcctcttcttcttttttttttaaatagttcttaaatttgttttattttccctaataaaagaaaactcagggctggagagatggctcagcggttaagagcactgactgttcttccaaaggtcctgagttcaattcccagcaactacatggtggctcacaaccatctataatgggatctgatgccctcttctggtgtgtctgaagacagtgacaatatactcatataaataaaataaatcttaaaaaaaaaaaggaaaaactcttaaaaggtattttagactattcagggaatatatgtacaattagatatttaatattatttatgtgtatggtattctttggacttaaataatttattccagctatctcagattttctcccaagagaagaaataacaactcaaatgtccattgggaggtttccttcacccagagggatatgccggtgacacataaacctaaagagaaatcaaacacacatcaaaattatgcaaaaaaaaaaaagtaaaaggttgggatttcagatgatgagaccagctttttaatctttttggagttctagaaacttagttgtaaatgcttatctgataggttagcagtgaatttatcatccaaagtgtttctactcatgctgaacagctcgtgtctgcaattgtgttcataggtccagagcccagcacccggtgtgaactgtcaccgatcagtgcctctcatccagtccaggccctgatggagagcttcaccgttctgtctggctgtgccagcagaggcaccactgggctgccaagggaggttcacatcctaaacctccgcagtacagaccaaggactaggccagccgcagagagaggtgagtgtgggcattgccctctgagtctgagacattagagtaaacttctgtgagtggactctttcttccatgttggattctgggagtctgaactcacgctgtcagccttgtgtagaaagcacttctccgtgctctcctcatgggccctttcttttctaagatcacatttcccttctttcctcctgccttgctgtgtcttaagaacacattgctcctggaggaggaatcagggaaacctctaggacagaggtcagtaccctgagggtagttccttattgagttaccatatcttctccaagatggcagtcttggtggtcatggagaagtcttggaggagaagggaacggaacaagctcatgaatattcagtttgttctgggctccaccattgataagaaggacatcaccgctccaggtccctccatcatgtccagtctacaggttaggatgcaggtgtgaagacatgaggttcagagatgaacagcccattcctcccgtgactcagcagtggcttagatggcgccttagcggtctccttgtaacttgtaaagaggacagatttttttcccccacaaaataacacagggttgtcttcttttttctgtttttttgtttggttttggtagcaacccctccccctccccccccccccccccatggtggtggagttgggaaaaatgactgggaaaaaaaaaagaattaacctttcagctttctcttggtcagagaagtgaattcccagagctacctgtctatgtgccacaggaatctccttgcctttcggggtacacaggggaaacgctggcctggagcctccaccaggaaaaacagaactgactttaatctgatgaaagtgtgcagtgttggctcatttcaaagtcagggcatcaaacccttcccagctccattggaaattattgtcagtcctcttggtggcctgccattgtggctgcaacacattcctcaggtcagatttccttatcccagtaatatgtctttaattcttgtagtacttgggagagtttgtggcgggagggggagggggggtaggaaatacagcccctgtgaggcactgctgactccagcaattcctcagccttgcaatcactcatcttatatatggttctctcagagggactgagggggaaggaaagtccgagctgttgcgggaataccaacaaccgaaaaaattcttaaatcatgttaatcgctgttcaatcatgtggtaccactgtggactctgagaaatgaacagattggatgagaccagcacggcagaagaaaaaaacttcagggaggggcatctcagaacagggcagcacagagggtgtgtggttagctaggggtttctgcagggaggccccaacaccacactccttccgtgtctctgtagccagtgtgtaagctctctggccagtgatgtaaaggcatgtctgctggtaggcctctgagggaaactgcattgttgtggtccttggagacctttaaggattagatgctgtagttcagggctgcctgcaagtctccatagctgtcatgtagtagaccttggagtcttctacttgtatccaggagtattgaaaagaatcccagacagaggaggagggagtttgttgattggcaggtggacgtggagaagtgttaaactcttaacccttttcatagatggctggagacacatcctggctattgtgctaactgttttgagatagcttacccagtccacgagttagcagttctactcagaaatgacaactgaagtgcctacttaaagcttagaaataccttgaatagccatcaactgatgaatggctgtgatatatctatatattggaaggttatcagacaatttaaaaggcacagttacagaaatactgcatagtacagatgaaatttaaaaatactgtgctaagtaattgggatagtcacacaactatgcattatataattacatttaaatgaagagtgcagcgtacatacggagaggtaaagagttaagttaagcaagtgcttgcttagggctagataggaaagaaggaggtagggtcgactattacgggtagtgggggccttcaggatggaggtgaacatattctagaactatcttctgattcttacacagccctacaactatagcaaaattgctgagttataatttaaatttgattgtacgtgaattgtatctaatttcttttaaagccctttgacttggcagggtctagttagctcataaagtcagctttggccagttccaccccactttttctttttttgttctttaagaactgaaactgctttgccaacctagactccgttctttttgttactctcactggacgacttggtttccgtagctatggcattgcatgggctatgctaactgtaatggcagatgtttggggggtatttgtagaaaggccagagttaaagactttgtaaagtctataccaaacttaaggaaagtatttttcaaaattaagaaaagaaaaaaaaaaaaaaaaaagaatgccttggcttacagaccaacccgtctgagcatgcctggctatcaacaggagatcttccgtaatgccattcttgaatatggggaattgtgaaaccagcccggtttgtccttagcctttagggatacaggacaagcacccaagctatgttagaccaccccttctctaatatttgaccaagcccctacctcccaggtgccattcatctgcggcgaggtttcccattttccttggcagaaggggaggcaagggtctctgctcatggacatggtcactggcagcttgacaggatctgaggaaagggttctgctgggctgggtaaacagcacacagccaggggaacagggcttgttgcggcctgttgggnnnnnnnnnnnnnnnnnnnnnnnnnnnnnnnnnnnnnnnnnnnnnnnnnnnnnnnnnnnnnnnnnnnnnnnnnnnnnnnnnnnnnnnnnnnnnnnnnnnnnnnnnnnnnnnnnnnnnnnnnnnnnnnnnnnnnnnnnnnnnnnnnnnnnnnnnnnnnnnnnnnnnnnnnnnnnnntgagatggggttgggtggggtggggaattgagggtagggggtaaagagtcacaatcatggaaagcaaaggataactgtgtagtcagctctctccttccatcttcacaaggattcagaactgggggctgcaagaatttctgcctctggggcatcccgctggccggggtatttgcttctttcattgctcttcctggtgcctgctggctagagcaacacccctctgcttgcatctgttctgtgagccctggggttcagtgcctcagtgctctgcctgactgtgagagggtcatagcaccttcccaagcttgttacagaacactttcccatcaggcattgggatggtgacagtttgtctcctgtcttctcttgcttcccctacggtctgtttcctgtagtggtacgcctttcctcttcccacctgccgagggtcagccacctgcaccactgcacacatataggagacacggacacttattcacatttgctctgtattgaaggaaaggctgttctttgggagatggggtaggggtggggctgattcccgggagcgctgtgattatacgcatgcgctgccacattcagtttatgtggcgctgggatttgagccctgggctccacacattcccagcagacacactgactcagcccatgaaggatagactgtcggtgggtgtgccagtgcctggctgcaggtctggagtgaggaggcttcactcctgtggggaagggactgggcttaataactccacttgtccatgatctctcaaattttgatatatttatttctcagcctctttctgagagaggatttggggtgtgcgcccaacaacatgcacagcagcggtgtaggcagaagtgcagagagaggcatgaagcagatgactgcactttgtcggccatgtggatctgtgtgcaagggaagaccgcagtgtattgctgtgcaggtctctgagcttgccatgattgagcctgacactcagatcctagattcttggcggttgtaccaggtggttgtgttactcacacatgtggctccaaaccgttctgtctttatacctgcctcttccttggcttttcctgagggcagggaagaccagaacaggagaaagagaaggaagggaacaccccgaggtgttctgctgccctttaaacagcttccctatccccagataacagcaatggtggctctgatggtgcaggtcatggtgggccatccctttgccaggcactcacagagactcaggtggccctctgcagcctgaaaggggaggcttggctgtctctattttagtggaagggcaagtctgggctttgggaggccatgctaccagtaggctctctcccactgaggagtgtctagctctgtccccactttgagatggcctctcttgccttaagctcttgctttatctcaggccaagtgaactgtgccagttaactaagggaggcggctctcccaaggaaggttcaggtttgtgtatcagcttgtcacaggaggttcctgctcttgggttagcatccttactgttttaattcccccagggcttccctgtagtattggagttggtctcagtgtggtagggcgtcttctttggtgtggtttaggattagcatagcaaatgccagcaattataaaacacagtgctctcaaccccaggagctattgctgggctcacacaaaacacccctccctgccaggggcttgttttcaggcaaccaccccaaagctttctgtggctttcataaaagtcactccgtgccacctgagaggtgacacctaccttagctatgtggagggagctggcaagttaagagcctcccactcacagtgaagaaccttgcttgatctcaaatctgcttggtagtcccacctgctgcctggatgtcttctccctccatattcacgtctaccagcctctgatcttctatttctgtgatattaacataggaacaacttctttcttctcctcctttaccctttgaaagtcagtcatagcgatactcagagaagcaggaaaggtgtatgtcttgcccagacccatctcgaaagaacaggtatgccacttcaaggttggatgtttggaaaacacagagcagagcagaacaccatggaactagctacatttcttccctatgggaggcatgttcgttctgacagtagtcattaatgtcttcccaatatgagtcctacgtatatacagaaggaaatgaaccctcaaccctgaggggttatttgcatttgtagtgtcttatatgcatagagttttcactaagcacatgtagaagtcaatgcctcacacacagacatagacacttgtttcttaaaaaaaaaaaaaaaggaaggaaaacttattgtatgtgtttgttccagtgctggggattaaacttggggcctcataaatgatagacatgctccttgccagtaagctaccttctcttatccttccttgagttcataaatagataggtaggtagatagatgatagatagatagatagatagatagatagatagatagatggatagatggatgatagatgataaatcgatgatagatggtagatagatgatagacagatagataatagatagatgataggcagacatatgatagatagatgataatagatgatacagatgatagataatagatgatcgatagatagacagacagatgatagataatagatgatagatgatcgatagatagacagacagaaagatgatagatgatagatgacagatagatagataatagtgatagatgatagatggagagatagagataggtaggcagatgatagatgatagatagacaaatgatatagctagatgatagataatagatgatagatagatagatagatagatagacagacagacagacattctggggtatgtgtgtactcccatgtacgccatgttgagtgtgtgtggaggtgagggggccagcttgggggagtctgttctttccttccaccatgcagattctacgatgtaactcaggtggacaggcttgactgtgaatttctctgcctgccgagcaatcttgctggccttcacattcagtttttaaacaagcccctccatacataagcacagcctgctgtttgattggaaggggtcatcatgggagtcactcctgtgaaggaggaaggattgcttcaacgctcagcattgtatcactagcctacagcagggttattaaattccccgctttctccctccctgctcttactctctcacctcaagtcctgtgttatggtagaatgattgccctaccttcaaaggcagctggctctgacacgtgggaccagagaacctaacctaataagtcattcacatcactacaaaagtgtcatcgcttctcttgaagacacccagtgcaatctaaatgatgtctgctgggcagtgtgacagtgttgggccaggcctaggtagaggagaggggatgggggcacagctaagcagggatatcttaacagatctgtgcagctggagctgaaactgcctgctttagtcaagggtggtttctaacaagttggggcaagatgtgtaatctgaaactacagctaactgtcagctaagaactctctgaaaccaaccttggagctctgaacgccaaaatcagaggtgctatgaactccagtcttggcaaacaaatcagcacacagaccgagggaagaagttacggcattcatactgggacttggacaggttacatagtttaaaccctgtcgtttaccaaaggattgcccacagggtgtaaaattgcccgacaaagcttaggttgcaccccagcaggagaatcgagccacatggactgtgctacttcagtatgagggagtgctgggttatgttctacacggcctggaagctggtagattggacgaaaccccaaacaaacattctcttcttgctgccttgtaatcctcaggatggggaagagaccatccttgacccttcttcatctgtccggcaacggtacttcccaactagtgtagtgtttgatcttcctggaggttagggtcacagccttggtctgcgctgttgctgctgtgcttttgactcttaaaatttcctggactctttttagaacatgtttctacgcgagtgcccgccacatttgaaaatgtgattggctttccttctaagcatgtctaatagcatataaaagccacaggacaatgcacagagcagatctatcgatgagtcttaacccccaacgttgccagttgggcagatgccctgtgtgtgtgtgctgagtgtgtgcagatacccagagtctgtgcctagtgtgtacaagcccagcgtgtgcagatacccactgtgagcagataaccagtatgtatgtactcagtgtgtgtgtgctgagtatgtgcagatacccagtgtgtgcatacccatgtgtacccagtgtgtgcagatgccaagtgtgtgtgtgtattcagtgtgtgcagatacccagcatgtatgtactcagtgtgtgcagatacccagtgtgtgcagatacccagtgtgtgtgtattcagtatgtgcagatacccagcatgtgtgtactcagtgtaggcaaatacccattgtgtgcatacccagtgtatgtgtgcccagtgtgtacagatgcccagtgtgtacagatgcccagtgtgtgcagatgcccactgtatgcagatacccagtgtgtgtgcactcagtgtgtgtgcccagtgtgtgcatacccagtgtatgtgtacccagtgtgtgcagatacccagtgtgtgcatgcccagtatccagttatccaccttatctgccatcttgacattttgtttgctaataaagggaaatttactactaacattttttatttgaagactcacattccatagcagtgtttatcatactaccttccacccttcccttgactgtgattttgaagtgtgtctgtataaatcagacacagttattttaccttttcgttccctgctttgaagaggactcatgtgaacttggcccctctgcctcaaggctgtgtttcgttcctcatgcccccctccttcccctcctttatgaactcctgactgagtgaacatcaggacatccttccccaccccgcacccccattgcctgatttctgttcttctgtgcttgcctgtgtgtcatgtatggtgctgtcagaccaactcaaggactcctgggactggggaggggccagaccagcactcccgtccttggaagtgaagatgatggtggcccttggttgagagatactctatgcactttgggctggcatgtatgcctgtcaattgtcaaatagcattaccttttaaaaagtgtctctgaaatggaatttatatgaatacactgtcttcagacacaccagaagagggcatcggatctcattacagatggttgtgagccaccatgtgggtgctgggaattgaactcaggacctctggaagagcagtaaatactcttaacccctgagccatctctccagccgaaatggaatttaagagtcttctaagtcagttctcccctaccccagggctgacttcccaggccagcttcctggcaccatcggtatcaccatggcatctaaaatctgtaccatcgtagatctacccaaaccctgcatttggccagtcgtcattaagttttatctccattttctctgcagtggctgtggaatttatctgtcctatctccttaccatgtggcctccttagtctcctggggaggtcagcttcagcttcagtctctcattgttaccatcttgcttgggaactccttcataaatccaacctcccataaacaatgttctcacccctcatccgtttacttattcgcagacccattgcttgagttatttactaagagcgcattggataaacaccactgctccttactccgctatgtgtcagtagcacctgcaggaggttaaaggataaatttaatccaacacaaataacgtaaccttaagacattaacaaaactttgcaggaacacacggagagaagggctggttctagctggagatgagaagaaatgtccaaacagtgtgtatcttgtggaagactgggatgtcagcagatgttgtctggcagagtctggggatgtgtcagagtgaagatcagagactatacatgagagacagatctttgctgtgggtgatgtggctatacagtgtcaccttcagaccaaatcctgcttgttgccttatttgctcataaataacccatctacatgcatacgcttcacctgtctaaaatgaacaagtcagtggcttttgtttattcatagagtatacaaacaagcagttgaatttatgtattgatcgtgattgtccattgatgggatctggcatcaacaacaacaggaatctctgggcatgtctgtgaggggtgacgtagactaggttacctgagtggcaagggtcacataaacatgagtggcaccgaccattccggggtctggcttcctggattgagtgaaaaggaggatgggagctgggtacattcattccctgactgtggattccatgcagtgagctgctgcagggttctgcagccatgcctgccccaccattaaggacagtgccctcaaactgtgagccccactgtaaaccctcttccttaagttgctttggccaagtattcagtcacaagtaccaaatacgaacccataatctaattttacattttcactattcatactcaaagaaaattcatcactgcccaattttggtgttctccctgctcagccacccactggtctgtctgttctgggcattcatgtaaatagaatcatgtaacaggtggtttttgtggctggcttcttccacttagcataaagcacttgagattcgtggcatgtcttaatatgtatctgcacttgagatttatgtgtatttttaatatatgctctcttttattcctgagtggcattccatcacatggttgtaacacaactcactcatccactaatcagtctgatgtcttgtttttgtaaataaagttttattaggacacacccatactcatttgttgatatattgtctatggctgtcttcttgtgatgccagagttgaatattgtgtaacagacccatgtggcctttgaggccttaagtatttattctttggccctttgtagcaatagcttgccaaccctgggatagaagattgggataattgtggggttagattggggctaaaaagtgggagactagattagaatggccatatacataaggattaggatttagtgccatggatcaatgtgtgtggtttgtgaaactccagatacctgagaactcaggtttaatgtctcccccaggcttggtggcatgtacctgtagtcccaactacttggtggagatagggaagtcactggagcccaggagtttagagccaggctggtcaatataattagatactgtttgtttaaaaatataaaagacactgggaagagcctgagttttgactcaactgctgaatccattggtccataccttccttcttcttttttaaatgtgagttttaaagatttatttttaatcgtgtgtatgtgtatgcatttacatctctctttttctcttctctctctctctctctctctctctctctgtgtatgtgtgtgtgtgtatacacgtgtgtatgtacatgagttcaggtgccaggtgagggctctggattttttaaaactggagttacagatggatgtgatccaccatgtgggtgcagggaacagaacctgagttatcatctcaagagctcttaaccacggagccatctctacagcccctctctcactctctacttctgaatcttgtatattaatcctgagtacctggctagtacgtgggcttcctaagaatgggaactgggtctcgggatgtttgcagcatgccagttggcccgcacacgacaagagaacagtatctgcaagttccatgcatgccgttttaagtcactgcatcccgcagtgcatgcttgctggggttgttccatgcatgtggttttaagtcactgcatcccgcagtgcatgcttgctggggttgcttactgactctgtgatgtgatcagtggacttgagttggtgcccacatgctcactcttgtattgctgttcccctaattaaacttcattttattcatctccccatctactctgaagtctgcaggtttctgtttcagtccttctgcagaccaattctaaattcttgttacattcctctttcctctttggagttcagtcatctgctagtaaactagttagtctttccctcagctggatagaaagctataaatagttttttgtctactccgtgcttctcccttgggtaactcatttgatctgagcccggtttgaagttgggccatgcggaatgatctgtccctgtggtggtggtagggactcccagccagttcttaacattactgcacttaattaattttgattcctccagtagaaagagtacgttttactctactgtgtcttcttagataactaataactcgtttttttttttttttaagttttgttttcttgcttggtgactacttaaaatatccctgcctatatagtaatttgttccttgtttaatgtggctctttcctgtgtttactctggactccagtctttgtagcttgttttctaaggcagctcagaagttggatttggcagtgtcttcaagctttacccaccagaaccctacaggaagttgtgtgtcggccagaagagcctgtttacttagagcatggtgtccagcagaagcaagccgtttatgagggtctggtcttaaagacacaggagcctgactctgtgtttggaagacagtgagtctgacctccactgcactcgtgtgccctgccttttccttccagcttagtggggggctaaagctggatctcaaggctaactcgtccttcccagggatggcttcattctgtctgaaaggcttggatactaggtagtccagcttgaagccgaaagagtagggcttgctctttcttatggaaataaagctggcttctgtaaggattcattgtgggtgaggatattatggaactgtgttgaaatgcctctagctttcaggacctagctgagtccctgcctgctaccatcacagcgacagcaatactggaaagacattgtcagtccaaatgtgatgttccttcagctgcatctagaacatttccaaatgtgacagtcctctagccgagtctggaacatttccaagcacaatggtccttcagctgcacctagaacatttctatctactggaggtgaaggatggggtggagaagggaaggggaggtcttctttaatagatagcttcagctcccgttgacgagagagactagagaagatgcttatgcatctgagatccaagaccaaagccagcatcaggctcccggatcactgggtagcctcttccctggagcccaaacatccctctgtgtacattaactttgaatttctatttggtgacaggtgtgtacataccccagaccctttgtgggtttcatttgcctagccttgggcctgccacagggtcaatatccgtgtgctggtttaagtgatcactatcttaaagagatgagcctttgatttctgtgagcgcgcacacacacaggttctttgggggagaggagcaaagagatccagctgagagctgaaaatgaaaggcagagtgggggaggagcatcgagggggagggacattgagggggtggggcatcgagtgccctgtatgcatccattcccattgtcattttaatggttggcagttgtttagtttttttttggtgaagttcgagttgagatgtcttgcttattataagttttaacagagcagtgactttattaaagccttatataagtttagtacttcactaagtccaaaacaatactttgtaattctctttcctgttatgcctctcggcctgtttctgtatttctgtgtagcaacagtgttgtcttggagatccagatgtgtttgaaggtgcggatgaggcagagtaaggaaggcaggttgtcaggaggcctgcgtgtctgtgcttctgagtgaggcctttgggttgcctccttctcttaagtattattttaattcccttttaaaaaaaaaaaagtgtgtgtgtgtgtgtgtgtgtgtgtcagatggacggacagacagacatgtgggtgtgagtgtggaggtaagaggacaatttgggagacagttctctacttttgctgtgggttctagtctttggtcccagattgctggactttaggaagaagcacttctaatcactgagcaatcatgaccgccatagttactcttcttgttgctgtgacaaaatacctgtgtgatgcctcttagggaagaaggctcgcctgtgcgcccatgtgctcacaagggaaaccacagcagtaggagctgcttctggcttttgtatccggtgcctaaggtcgattgctcacatcctggctgactggggcccagtatgcaacctgaaggcccatccttaatgctccacttctggggctgcagcttggccccacctcccgaagattccgcaactcttggagcagcgtcaccagctggactccaaatgcaaaccttttggggtcagcatcctggagaaacctcagagccggccctttcctgtttagtgcacgtgttgctgtttgtttatgtttcctgctttcacaagcttgaagagctactcttccaccactggatattaggatagcgagactctaaatggcaagagcgccattctgaacgagtatttttctgaaagagtcttgttcattttaaatgctgttaaagatctaattctcagtgttttaactggaagctgttcaaatttgccaaatcataaaatctttcaaagcctgctccaagctacattttattgattcagctttcctcctatttgcattttaaaaagcccaacttgttttcttatgggggaagtgatttgtgtgtgttagagtacagagtgataaacgaacccgtgacttgccgtgagctttttaggtgacttgccgtgagcgttttaggtgtgttgtcggagcaacatacaagggtaatttcgagtccagttttgccacgtgtccttatgtatgtttcccaaacacgtttcctggcttggtaccgtgactgtgcatacggcctacatgtgtttcctattttttatgactcatacttacagtactcataaagatttcttctttatcttggctctgagtaatgagccagcttgtacacttccagcatagatgtgggctgagggttctgcatgtaatcctgagggaggccccttgtaggcacagtgcaggagtctatacttgcactgtatagtctctgtaagtgcagctgtttataggactgcgcactactcccggtaccattcagaaactatgctttttgttgatttgctgcacctttgttttccagatttcccccctgtcttggtcaggcagttttctgctaatgtgtgaggctgccccaggggtggacaggagaggccagtgctctctttctgttgcttgctggtaactgtggtaaaggggtcagtggaaggaaggaatggaagtaattaactaaaatgacatttataacttgtggccacagacacaagggagggtctccttggctttagagaactgttcagacctgagacacaataggacaaggatgacaactgatgtcaggacagcagattcctctttctttctctctctacccccctccccatttgtctctctgtctctctcctctgtatctctgtctttctctgtctctcctctgtctccatctctgtgtatgtgtgtgtacctgtgcctgtgcacccgcagctctgtatgtatgttaccgtaatgtaaaagtcctatgtcttcgtaggagctttgcccataggtaccaatggttccttcttggccagtgcttccaggaagtcctctcatattggtgcctgacagctatttaatattttttctagcaagtacatgagttgctgtgtattgtgattggcacaccaggattgcagattaatagaatttgcagaagatcaaatccccacgtagaagagaagactgtcttgttcactctattcacactgtggatttatctgtttctaacagtggtacacctccagagacatgcctgtatcccaactcaccaaacatgtgaatgttactttacacagagtctgcagatgtgatgaagaccctttcagtggggagattatctgggaggcccaagtactctcaccagtttccttgtgagatgctatgaaatagccagaagtggggaagctggtgtgacccagtagacagggagtagagggatggggtcacaaaccaaagaaggcaccctcaccaaggtactggacgagacaccagaaatgtttctccaagagcccatggaggggcatctctgaagacaccttggctttggcccagcaatgctgactggggaattccagccttaaacacatcaagagaataaatttctgttgttttatgtcattaggtttttggttagttggcatggcagccacttgagctgaatattatattttatctagtttggagaattatcctgagttccactcagctccgttttctcaagtttgttccctccacgtgtctcccatttctgaaaagaacactcccaaccactcgtgacaaccccaacccctggtgttacctatgacttccaggtttcctcaaatccagtcccatttcttctatcatgggactctattgtgaatctgactgcctttggcctttacctgtggtttgaaccaccatgtttatatttgaaatatggccatttctgacccagtcttttgagcattcaaggtctgggatagagtgctcacattggaaactaagtttcttgctttggcccaagttacttttctctgcattgtttcctgggataatgttacaatctgcttcctgggtcgctatggcaaagaagtatttaaaaaaaaaaaaaaaaaaaaaaagacagaacagtagctggaatcaaaccagcacccaataaatgccagtcactatctttataggctaatacgatctattctctgaacaacagccaacacgattttttaaaagcttcggccctatcacaaaacccatccgttcagctttctaagatggttcctcatcatttctagagtggcatctgcctagaagtgtgggaagccacatgtgccgttgcagagtgacgctgactactgctggccaccacgcataagtttggacaaacaaccaatgtgtacatatgcagtaaagctttttgccaagacactgcctgacccgggcatgataatgaagctttgagaatataaccaatcagatgtgagacatgcaaatgaggtatgataatgaggctctgtgaggaacagagagagagagagagagagagagagtagccaatcagatgaggaacatgcaaatgaggcatagtgcataaccaatccgggtgtgaggcatgcctctcctaggcctatataagcagcaccagttctgggctcagggtctcttcgcctctgcaatcaagctctcccaataaacgtgtgcagaaggattctgttgcagcgttgttactgctggccagtccggcgcacgcaagatagaaggacacttgcagggacttggggtgtcttccctgcactgaggcctttgctcctcactcatttacaataccagcctccccgactcccccacacctgactcccaccacagcatccaaccctgttttatctctaaaataattcatatcatctgggactaatctttgaacatgtgtattttctctcttcaagtagaatacccagaatggtagacatttttttgcctgctgatattcccagcagctaaagccatgcttagcacagagtgagcactcgaatatttatggaataaatgttttgaatgaacaaatacatatgcggatacacagtttaaccttggcaaataacattaaatctggtgattaaaatttacttatcaaatatttgtttggttagttttcgagacagtggcttactgtagagctcaggctagccacaaacattccatctgcctaactcagggtcctgagtcctgggatgacaggcatggtctaccatattcacaatttgtatttgggaaattctcattagttatgttttctggaaaatctggttactgacgtctcactattgtagaggtataaaacaatgtttcttaagaaattattacactcactatttgtgtgtgagtgtgagtgctatcatctcaacagagcagaggatagcttgtgggagactccagggtcaaactcagcttgataagctcggtggcaagcacctttacccaacatgccaactcactggctccaagagttctaaaacaagacttcatggtatctacccatggtgctacctatggtagtcacagagtctacctataatgatatttctattgctgtgctggtgttaggacccatccctgggttcttgtgtgtgttaggtaagtgtgtcatggagctacatgagcccagtgtcacccctcccactccccaccccaccccacacccccgccaccaacttcttgtttaaattttggtatgtgcctagagccatgtgaaactggttcctttgtgcctgtaggaagagactggtgaggttccactcctaaggtttcctccagtgctactgttttccaagtctacactggacattaagattatatttttaatggaactagcccaggcctccagtatgaaaaatggaataatttgcatctagtgagaaagcccaagagggcattaggatagaaagtgtctctggaattggtaaactagaaaaatagtctttaaagaaaccctcacagaagtggttggagccacctcacagctgactgacgacttatttaaaacagaagacatagatgacacaggtttacagacaagggaaagtctcctttcaacacttggaaaaacactgttaagtgcaaggcttaggtcttcctcactggtgagcttttgatggctctccaaagcgccttactgctccatcaggacagaatgccctcactgcgctctctctctctctctctccctctctctctctctctctcctttcttttgtttatcgaaatttgtaaggttagaggaattaatcgtttcagtttgctgagcagaagtccctctctacagaaattagaagcaggcgttggacagtgatccatgcatgcagccttcatggactgttcgcagagcattatggggatgatgagggaagcaggctgggagctcaggattcactcctggggactggggtgggggtgggaggcgatgtgggatcgagaggacacaggccgaaaaaacgtaacattgccttaaacacacacaacagaaacaacgtaaccacatccttaatcaactccagctggtccgaggtaaacaatcactaagtcactgagcacgttggaagggcccaggctgcagtaattggagccaggtgtgttaacctggcactgctttttggaggtgagaatttggagaagtttgaaatagggatgtggtttggctaagggttggagacagaattttccaagaccagagtagagactagtaaacaaaacagagctgtgttggagacaaaatgtgttgagaacagcaagtacctctacagcctgacagcttgtgcctgctggccttgctggagcgtgcccgagagatgggccctccagctgtacctcgggtcattaaagccagctgagttaatatcactaacactgggcaggataatgtaggtaatttaggatctaaagggaggggcattgttaagcctttgaacataaacacttgtccctaagcctcccgtttgcagatctggagcaagctgtgggctgggctgtccctcaccactaccaggtgaactgagccatcagggaagcaggccattgctgcttatgtttccgttaatgtttcccatgttcctgctctccagaaggggtaccccagagctcagcagagggcagaggtgactgagtttctgctcagaacttttgaacggatgaggcaatgggggttggggggtggggaactgctggataaaggcaacctttctcggttggattcggaacttctgaaaacttcagtgttaactgcagaacgagacccagccctgtgcatgctaacaggggctaattaaagagtaaaatgagccagccaggaaggaatcaccccacgtgccctggccaggttctatctcctgattctccaataagctccaaatcccaaaggagaaggacaggtccacaaatagcagaaaccattccttctctgttagcaagcaaagatggctgccatctgacctgtaggtgagaggacattcgtcagagccacgggcaacttaggaactataaaaacacggttcttcttggcactaggcctgttgtagaggcatggaagtagagactacccatggtcactagaatttggtgtctcctaagatgcagttggcttccccaaggtgtagatggctcttcagctgttaacccattacttgctgagcacctgcagacatagagctaggcagtgacaatcctgacgcccatgctttaaggattttgccaaacatagcaggcacacagcggaccagcttggtccctcttctccctgatccacttgagtggagctgccttgctttgtgtgtgtgtgtgtgtgtgtgtgtgtgtgtatttcagtgttgctttggattttgtttgttgacttaatgatactggaattaaatctctggtctgcttcgaaacagccatctggtaggaatggttcagttgtcgtcaatacgtgatgaggttaagaggcttacaatgggggacggagatcatggctcacgttctatctatgcagccctctttacctggttatttgtgccaaaatattactaagtagcatggaagcggggaagagaccgtagagttgaatttggaaaggaacactggaaaatgtttcaataaaacagtgttcttcacctccctgtagattcagcagtgcggggctctgctggcacgtcctggtgagctaggagtgaacgcatcgtggcaccgtggcttggtcttgagttcctgactcatttgaaaacattcatgactttgattatcagaggtgcccggggatgtgctctagagggggaactgttagatcggctgtctgttttctcttccctttgattttataaatacatatatgaaacaatgccttggtgtcagggtgaggcttagccccacatgctgagagatccacctgctatgtttatggattagctcatgtcatccctctaagagtgtgtgtttcccgtgaaggagctaagttggagacaagctaataaaacactgtgtctgtttctccatctccatttctctctcccttcgtccatcatccatccttcattcatccatctcttgggtttttgttgttgttgtttgttgttgtggtggttttttgttttttttttttttttaagacaaggtctcaacagtgtagctcaggctggcttcgaactcatgacccagcctactgctgtgtttaccaccacatccacacctagctggctgttttttgtgtttcttagtgaaacttggacacctcagcaacctttcgggttcgttttcccagcacttggagtgggatctcacaccctcttctctcactgagattttaatacacatttgattctgggtttctttttcttctagtatattttttaccactgttctcacggtgaccaaggttctgatttcactctctttatcctttgctcccgggacagccaatgaactacctggaggatatgtatgtgctccaggaagatataaacagtgtgggaaacagggaccttcccaactttacacatattcctaaaccaggacttctccccccccccccccccggccttaagacagatttatgccatcaaaattatacctttagaccctggcactgcaagtgtgccattttcacttactcttgacttttaagaaacattttttgacaaaattagaagctataccttttgatataaaatatacaaataattatcaatcttcctgaaatccagtcttaaccatgtgcccctcttgtctaaaagcatctctaaaggaaattaagcaagaccgaatacccgagcttgtcctgaggccaccgccctatctgcactacctactttgggggatgccacagagggcggtcactctcaggagatgctgcagttcaccgtttgttttgcttctgcccagcacaagaagctgcagggcacagagagccccaaagcgagataagaaaaagaaagagttgagaaacagtcggagaaactagataaagacatttgtggatcttttcagttgttgaaaggagacgggccacttctgctctcttgtgaaaacttggacaagttcaactttttaaaatcagccgtcccttatacacttgtgcaaacaaattagtgtggcctagcatttgtgacagtgatgacttagccacacaggcccctgtccacattgacatccatccttaaggactcatgtgttgaagagttactgctttgactttgtaggtggccacagacagggcttgcagtgtgggatccgatccagttataatctgacgatggaactcaggtggtcaggcttggtgggcaagatccttacccaccaagttaccttcctacctcaggaagttttttgttttgttttcttaaatctgcaagaatcagtacatttaagttcagcttgggataaagtccatctatcgttttatcagaaaatcactcacccttattctttaacccaggttgggaccaacagctgttgtactatgcctgggtaacttgatctaatgacatacatcttcccccaggcttactcttagaccaaatttgaaatggttgttttggaaaatgtgctgtgagttcctatgtagaccttcagactagggcaggaggttctgcctggcaagtccttgggccctgatatgcatctttcatagcagaacactgatgcttgaccggaggccttggaatcagcacaacacagcgcttcggtacagccctgactttgatcgtctttcagttccggtgccctggccctttcaccgagtccggattgctttaccagagctacaggctgaagcccatggactattttttttgtagtctggttgctatggtgatttgtagccttccatggaacttttgtctccagggaaactgaaggccttgcagctaccccaacctttctggtgtcatacctgaggtagtcttcaccaagctggtagcaagcccagcagtggtcagtttgtgtcaacaaatacttggaaatgaagcatctcgccggggatatgcagtatttcaaaactagcagctccctgttgctgttccccatcctatggggcctctgaagcatctccaagtctggctggaggcacagtggagtgagtcctagagagactggcattgaaaagatccttagtaagagctgtgaggaaggcagaggcggttaatggagttacaagttacagagagagagagagagagagagagagagagaaggaggaaggttgctgggcctctagtatggccagtgagaggaagctggcataaggaaagaatgcagtgggcttgaatttggaggatccttaaggcaagcccagcttctttccataggaaccaaaggaacagggaacagctgttggtgatcgtagtaggggagatataagacttgagcacttacctcaggcctctcagtatcctgattgacacaaatcacatctttactcctctgacacctgatgtagcaggtttagtgcttgcctccatgttaaaactgatgaaagtatcacaggcagactcttaactgatggccataagggaagagctgagactccgagtcactgttcttcaccacccgcctatactttagaaagagaggcgaagtgacctggaggatttgattatgggagataccggcccatcgtggaagtgattagaatttgttttagaacgagagtgtgaactcatgtatacatgcatcccatgctcaggtgtttgtttccctctttcggtactgaaccaggacctaagatgataaaacggtcctaaacccctccggtgtcagtcagccgtgtctctacaatgcagcatctgagataactaattttcaaaggggaagacttatttcagcttccagctttggaagttgattgagccctttgatttgggtctgtagtagggtagcacaacttggggtctcttcacagtgtttctctgtgtgtagcctttactgacccggaacttgctgtgtagaccagactggcctcgaacttacagagatatgtctgcctctgcctccaaagcgctgggactaaaggcgtacaccaccacaacctggctttgtttcctcttctaatgacttcccattaactacataaggctctagttacaccaggaataaataccaagactattcaccttgtcagcctgggggcagagaggtagagaaccgggcctgtgtcccccactgatggctggcatctctgagtcctctcactagcccctcattcattacaaccataagaactcaaaaaagtagttgcaactatctagtggggttttgtttttgtttttaaagagtggcatagaaaaataatgtggctaacggaaatactgagtcatacacgccgtcgctccctgtgcacacagggaggtatgttctctaagagtatgcgagtatccgaaggccagtctattagatgctgaggggtagtatccactgagtagtagattgtataactccattcctcagttaaaacatttagtgcccccccaagaggaatccattttgtccattcatactttatccctggggtatccagagccttctgtagttagtgggaagttattggaagaggaaataaaactgggcagtggtggcagacacctttaatctcagcaccctggaggcagaggcaggcagttctttataaactccagaccaacctggtctacacaacaagttccaaggcagccaagtctacacagaggaaccctgtctcaaataacaacaaccaaaaaaaaaaaaaaaaaagaagaagaagaaaaaaaaagaaagaaagtaaagaaatgaaaatcatacaagtttgctacttgttaactctggttagaaagctttttggcttaaaggctccgttgtgtgggtagtaatctgactttattgggtttttggctcagatctgatggtgtcatagaatactgttcatctgtgatggtctacaaagtataacttttgtctttgagataataaaatgttccttataccttaaattaacaaagaactatacttgaatcaaatataaattattttatcacagcattctcatgtcattagtctacttgaaaattaggtgaggttggaggctagcctctgctgctgttccagaggaccagagttcagttcccggcacccacactgggggtgcctctagaggagcttagcatttagcagaaagcagtaagaactaccaccacattggtggatactgttcaaccttcccagaacccaagtagcacaaaagcagagaacaggcgagttcacattttcttttgaggacatgcagtttcctctgcctgtggacatcagaactccaagttcttggggaccctgggacttacattagtggcttcaaggttctcaggacttggactggaagttgcatgacagcctttgcctgttttccagctgtagatcccagaacttctcagttttcatggcttcatgagccaatttcatggcagatttccttttatgtagatggtctccatgtaagaggcccatcacaagttgaaaacatatttaacacccgaatgtcacagcttaaccacacagaaacccaggaatgccaactgtttgctcttgcgatcttgcttactacccctcagcattgggaaagactttctaccacaaatcgctagcttgcaaaaagatcaacatttaggactctaaatatgaacgagatgtggtgatgtatctttgcaatcccagccactcaggagaccgaggcataagaatgctaagtctgggactatcctgagtgggcacaatttttttgtttgtttgtttgtttttcaagacagggtttctctgtgtagtcctggctgtcctggaactcactttgtagaccaggctagcctcgaactcagaaatccgcctggctctgcctcccaagtgctgggattaaaggcgtgcgccaccatgcccgtcaagtggacacaaatttgaggccagtctgggcgatatagtaagactccatctcaaacaaagcaaaatacacacacacacatacacacacacacacacacacacacacacacacaccccaaaagccaacaaacaaaacaaaacaaaaagaaggaaggaagtgatggagagagaggagaggagagaggggaggggagacaggagagaggagagaggaggagagaggaggagagaggaggagagaggagaaaggaggagagaggagagaggagagaggagagaggagagaggagagaggaggagagaggagagaggagagaggaggagagaggagagaggagagaagcagcttctccaagtgaggtttccctcacagtctgtgactgaggtcttatctatgagatgtttatgtttctcaggagaagcatgattaatacagccattttggccattttgaagtgtgcagttcagtgatgtttgtatatttaaagtgttgtgcaactagggtgatcatcaaaaagagccccatgccagtaaaccctcgctgctctattcccagcgtctacaactcccagtctgttttctgtgttcctggactcgttggttagaatgtaaacataccgctttgcagcagtgtctgtctggcgtgtttacttcacacgatgtttctggggcctgtccatgtagtatcaaatgtctatacaccgtctctttttatgactaaataatcgcgcattgcatgggcgataccatatttaattatctcaaaccacattttactagggaaatttttatattatgaatctaaccttttttctgtctgaagatcacataaagagaattttgagttgcttctataaaatcctgttaactgtggcatttaaatttataatcaaggtctaaatgtttgtaatgcaacttttatccttatttattcttttcctgtctgggctctgattctgcttattagtggtatttccaaaggattaattagagggagaatcacatattagtttggttgacaatgagaagaagacaaacagctatcaccgtaaacgcttgggtcctgaccgaatgataaaacagctcaaggcgtcttgacaacagatcttggcatttctaggactattcagattttggtaaaattagaaaacccattgtgaaagagtagcatgggccttatctctgtgtatgaaaaacccttcgaaatagtttcaaaatctgtacataggcacataactttaacctgtcagttaaaagtacctccgatgtttatcacactgagaagatgaaagatatcagctcattttataaaacacattttgcttaaaatgccacagtggtgtctagtatcttgtatgcaaatttaaaaattatttaaaagttgaagtacttacaaaaaatttttttagttaggagaatagcaaaaaatgaagcttattttaaatatgaaaatttaacatatataaaaataaaagtttgacatagcattgcaaaatgttaagtaggaccttacattctctgtcagctatgggagaaagtattttcattatttgcttggaagataattgacatttttatttcactgccaccttcgcagatcctaatgatatgaactacacactacggtttaaattggccaaccatatgcatggattagtcaggcctactgtatttttgttgcttggaaatgagtatcatattttagtcatataacttgaaaatcaaatggtttgtgtttaatttacacatttaattctgaaattaaggcctttgctagtccctgccacagcctttgcttctgatttgcctgtaaagaaacggccattctgtcagcttcccttggggaaagccttttgcttgttcttttctttacttcttccttcttttaagttattaacaagcactgagattgtggggtatgcatgtgtgtgtgtgtgtgtgtgtgtgtctgtgtgtaagtatgttcatatgtgtgtgtgtatgtttgtgtgtatgttcatatgtgtgcgagtgtgtgactgtgtgtgagtgtgtttgtctgtaagcatgagtgtatgtttgcgtatgtgtctgtgtaagtatgtgagtgtgtgtgtatgtatgtgtgtgtgtgtgtctgtgtatatgtgaatatgtgtgtctgtctgtgagtgtgtctgtgtgtaagtatgtgagtatatgtgtctctgtgtgtgtgtgtgtgtgtatacacatgccagaagaggcattcttgtctatcgatctccacttgtttgaggcagggtcttttcccaaactcaaggcccatgctttcccagttacactgggactcagtgaccacagaaccctccctggaactgggtccagatgtatttaggacttacctaggaaacagttaaaagtaataagctctggtgttttctgcatattaaatttgctctggccaggcgttggtggtgcacacctttaatcccaacacttgggaggcagaggcaggcggatttctgagttcgaggccagcctggtttacaaagtgagttccaggacagccaggactacacagagaaaccctgtcttgaaaaacaaaaaaacaaacaaacaaaaaaaatttgctctgtcacgtgtcaggctgtttttattagtaaactttatagttgctctgaacaaatcctggataagaagcaatataagggaagaaactggctcacagtttgggtgtgaacagttcatactggcagaagtgttcggtggttggaacaaagaacagacaggaagtggggccaggctgtgaactctctaagcccatgcccagttgtctaccccagcaaggctccctttacctctcaaagtttctataacattctgaaactttactactacctgggggtgactgttcaaacacatgagcctgtggggaatacttcacatttgcgcttgacacaaaccctagtcatctgaggagaaaaccttgactgagaaactgcctcaaggtcaggcagtgaacaaacacgaggggcattctctctctctctctctctctctctctctcctccctccctccctccctcccccctctctttctcttcttccttcctttcttattttatctatctatctatctatctatctatctatctatctatttaatgtatatgaatacaccatagctgtcttcagatacagctgaagagagcattggatcccattacagatggttgtgagcagccatgtggttgctgagatttgaactcaggacctctggaagagcagtcagtgctcataaccgacgagccatctctccagctccagcattttcttaattagtgattgatggggcagggcccattccctgggctagtggtcctgggctctataagaaagcgggctgagcaagccatggggagcaagcaccctccatggcctctgcatccgctcctcttgccctgttggagttcctgtccttgcttctgtcagtgatgaactaccaatgtgcaagtgtaagccctaataagccctttcttccccaactggacttggttgtggtgtttcatctaagccgtagaaaccctaagacagcattcagaccacaatagcccttcagaatgaaagcacttaagatttcgctcttctgcaaggaaatcgagatgtttggaagatgttgtgtgttaggaagatgctgcccaaaagatgaacaaatttcccactttgaatctaagttacttgttctccctgtctcaagaaagggcatgtgacaggaaactcaagttcctctaagacagcttctgaaacccataatatggagcgacaagattgccctcccagaccaggaattgcttttgttacattttcaagggaaaccagaacctggagtcctcaaggttttcctttgaccagaatgagtttccttagggagtacttgagtctactcctgtatcagttgggggccctgcagcttggtggttgctctctgttacccctgcgctcattctccttgggttttcgattctaagtgcggaaggtctgagacacacctgattgacttggatttgaagtgctcctcccagcatcccatggggccaaccgtgagggctaggaaagattttcagtgtcagtggaggaggattctctgccaagacctctcgctgccttggtgggggctgtggcccaccctgtccaggatcccttttaacgcctcttagtcctcttgggacttcttagaatttgatgctcccccccccacccacttcattcttttccagcagtaaaacagtttgacttggtcaccaaaacttccatgtcctcctccaacccgaggagaagggacgtgtgaatggtttgtggggacagagactgaggcatccaccactgccacttgctagccacaggatgggataaatcaccgcttagcatcaatccccccattaaagtaagattgggcagtgtccatggtgacatcagtatcttcatgtcctttaagattcctggacctccgtgtctgccatgtcccccgagccctaggtgcaggaattgtgccgtagttgtatcacttgggctgggtaaccatggacatttgtcttggaagttgaccagtgcatagcctggcagtccctggtacttgttttggtggctgagggatctgtttgtttttcttgaccctgctttaatgttcaagttgtacttggtaggggatgttctctagacgaggagcctcccttcttttggctggaaaatcaagacaatatgacctcatgaccatcattggactcacatttcattaattttattgatgaaatttatttatggttccttgtattcattttttaaaaacgtgttgatctcttcctggatgtctggccttgcactaggcacaaggctgcggagctaaacgtggttccatttttgcccttgaatgatgtgctctgaggatttcacaatctgacaaaggagacaaacatctgtagtgtcctgtggaactttccagctctgcccaaggacagtgaagcctgtggctggaaaccgtctatctgaggacatggctgtcctgtactttgagccagaaaccttggcttaaatacataaccttggtgtattaatggcatagtacactgtctacacagcctatgcttcagactgaaggacaatggaaaagtagttttgaatttgctgtgactggtggcctgctggtggtcctagatgtgttcttacagcagaacatacctacaccaagaatctccgcttttctgcccctttctctgcagcagctgagggcttctccgggaagggaggtccagggtccctggaatccctgtgtgaagctcccaggacccttccagagggtcatgacttacagcttcataaatactggtctgtttatattcgctcttgctcctcacccccaccccaaatttagttcctagtatttttccagggcattcaaaacatgcggtggagaaaacagacttatttctgcatcagattgtagacttttagggttttttttccttttgtgtcactatattaaattattttaagacgctcccagggaatccagaatcttgtcgttgttgggggcagggcgtgagtttgggaactcactgactatgttcctctcagctctgcaaatggcttcaacatgaaaccactgcgaggaagtttgatgtcatctgccatgcagtgtgaactttgacttcagtgcttcccctgacggagaagatggtcctatactctctgggatagggtagggacacttggtggtttgggactttgaattcaggaccaactaactgctcctaagaaattcagaatagtataaaagtttctaagggactttttttttaaacagaactctgactctactcttccaagaatgctttaagggaatctttttataccaattctcacgtggcggaagacgagtatgtcaattgcagtgtcagctgtcagggctcctccgaccagcagacccttgaaaactctgtagtgtttgttgattagctaagtacagttcccttccccagcaatcaggagcacatttcagaaccatttgggggtcccatttgagttcctaagaatatttatgctcaaacacaagtaaaaatatgaggccagccaaggaaccctggtgtcttgaaacaattatgtcccccaatctctgtgtgtaacacccgggtgctgggaacagaagattcaaggtgttccaattaccgacactgttgggtgacatctcccctccgcagaggagatggagaagggtctaaaaaacagcccctgcttttatggacctgggatgcaggcacatgctgaagttctttctcttatttgtagtgtaaactgattactgaatcatctatttcggaacattacttggtttggttttagataacagaagtctcccgggatgggttttagatgacttcactgcttcacgggtccacgctgttagactcacatggcagtccctgtgcggactgttgctttgtcttaacaaactctaggagtggggtgtggggtctcactaataagaaaccttttgaaatctctatcataggaatgtcctgtatgtagactacaaattccagtaaatccaaaacaatttttatggcatatttccataaaagtgggtttctttttctacctgtaaatatatagttcattttcatactacttggagattttgagaaaaatgtacagcgtttttttgtttgtttgtttgtttcatttgtttatttggttttggttttttgagacagggtttctctgtgtagccctggctgtcctggaactcactctgtagaccaggctggcctcaaactcagaaatctgcctgcctctgcctcccaagtgctaggattaaaggcgtgtgccaccaatgcccggctaaaagcgttttttttcttatcaagtgtaatatttaggaagtggagaagccagctgggtgtggtatcacaaatcagaaatctcagtactcagggtgttgaagcagtaggaggattgttgagcgtgagttcaaggccaggctggattacatagtttgatcctaaccccactcaagtgaaagaaggcaagaagcaaagaggagaaaaggagaaagaatagagaagttctccaccatgaggttcagaggacagtgttttcgtccttgtctggtagtgggtcagggcacctctcccaaaccggaagcaagaagatggtctctctgcccagaggctccttgaagttgtgagcattctgcaagggaggatgcaggtctgttttgagtgtccttataagtttgtgcacagataacctcagtgcaggcaggtgttacagaactgattagaccagctatcgtccttccttgtagctgaccagggagacgtgacacagggctgcactttctcatgtcaccaggatccttagtggacccttagtgaagtctgacacacataagattagagcaggagttcagctggcttcatgaagagtgagcctgaagtgaggagaacaggaaacctagacactaatcccagttgtcatctgctaaggtttcccctggaaagatgacctcttaagggcagacttgtgcatctcgttggatgaagccatcttgtttccctttctgccagtcccttggggttttcctgctcttgtccagtggtttcctccctatgggatgcatttcgagtacattgttgcaagattttagtgcctgggtttttggtttgtgtgtgtgtgtgtgtgtgtcgcgcatatgaagagggggtttatctttcagttccgttatcaaatgttgggtgactcccaaagattatccagccccatcattagagcatcacctgtgtttgggaaactttccaactcacatcacgcctgcattgggttccctgttacttttgaagctcataagactttgagtatttttgtgtgtgaattggataaaggatggagggtgaactcttcagactactgtgtggttttcttagagactgtcccatcctgcctgtcacgtgtccatgggggacatttctttgttgcattctgtctcagctcttcgctctagactactaccaaggacaatctaactataaaaccttgtgcaggattgttttcatttttttattagatattttcttcatttacatttcaaatgctagtccctttcctagtttctcctccgaaaaccccctatatccttccccctccccctgcttcccaacctacccactcctgcttcctggccctggcattcccctatactggggcatagaatcttcacaataccaagagcctctcctcccattgatggccaactaggccatcctctgctacatatgcaactagagacacagctctgggggtgtactggttagttcatattgttgttcctcttatagggttgcagacccctttagctccttgggtactttctctagctccttcattggggaccctgtgtttcatccaatagatgactgtgagcatccacttctgtatttgccaggctctggcatagcctcacaggagacagctatatcagggttctgtcagcaaaaccttgttggcatatgcaatagtgcctgggtttggtggttgtttatgggatggatccccaggtggggcagtctctggatggtccttccttctgtctcagctccgaactttgtctctgtaactccttccatgggtattttgttcccccttctaagaaggaacgaagtatccacactttggtcttccttcttcttgagtttcatgagttttgaggattatttttatataggggtatcttgaactcttgatccctctatcttagcctcctgaatactaggttacaagtgtgtatctggtttgtaactattgtcatttctaagctataactgatcctaaagtaggttttcctttatctgcctttcttcttcttcttcttcttcttcttcttcttcttcttcttcttcttcttcttcttcttcttcttctttttcttctcctccttcctcctcctcctcttcttctttttcttcttcttcttccttcttccttcttccttctttcttctgattttcagactagaagaaattaggcaattcatcccagagttctttaagatgtttgggttgttctcctcacattctgaggggctctgataccatcctgcttttgctgggttttggttgtctgtgtggtcccttctgccatgtttgcttaggtggagacagggagagaaaggcctctggggattgggttagcctgagctcacaggactctgtgcctgccaatttttctttttaagttctttaccatggtgtgaatcctcctttgccaaatggctctggggctttgcctgggacctctgtgccagaggcagagatgcatcttggccagacatggccacatactgaagaaggagccgtttccacgaaaagtgcacgctaagcttcttagaaatcatcccttggttgtctgagccaggcctcgacactcagaccatctgggaaactctggacccaagcatcagtatctgtttcatacatcttctcatttcataagcttaaaaatattctggttcatctgagacttgtatttattgatttttatacatattgagcaaagcttttgcatatttgggagctttaagaagtctgtgtcttaggactaactacaaaacaggcagagtcaacagctctggggaggacagctgctggtctttgggccctgatgtggtgctctgggatagggacagcctctgctgccgcttgctttagagggagtctgtgacactgtggtttgcaggtgctgtgcctcctgtcctccctgtcacctaccgctgtgtccagggagtgctgcagtctggacgcactctgctccctttagattgtgtcttgtttccagtagttatcaatctgtttacttctagatgaagacagtgactccagagtgtgctatgtgtctaaacaaccaagggacacattgtttcgctgttgctgtggttgacatcacagttcatctagtgctttgatttggggccatgctgattccaagtctaaaagtggtccggtatgcaggaatagctcctaacagtcagcatagctgatgtttttgtattttgctgcaaattagctggcttaaactcctttgcacatagcaacttcttcagcctctttttaatctttggggttatatattcatttattgattggctacagtgaatcaatagtgtggctgcctgcaacatactgacaacaatattcagctccagatgtttctttttgtctgtttcagaaactaagacaggcacactcaatagttaacaagtgctatgattatatgcacatgtgaaaactatatgtagaaaaatatgccttgtggcatcaagaaatggagaatatatcctattaacatttagagggtgtttgtcataagctaaagcatgggttttgaaagataagaaaactcagtactttctttatccataacttggttactgtaataaatgatactggttctagactggccctagaataagacagtaattcctcacgatcaaagtggaccagcagccatggggagatgtagtcagcttttgtgctatggctcaggtgattgcatagactcagatgtgtgtgggagtcatcggaggccagcgaggcactgggacctctggagctgcagctacagggagttgagaactgtgggtgctggcaaccaaactcaggtcctctacaagagcagtaagtgctcctcaccacggagcagttcctctagagccctggagcctctgttttcttttgatagaggcgttatactgtcagtttattctgtctgatctctgggcttcctttctttggaaatttcctttgtgctagtagctggaaggagaaaggcagcttgctccccttggcagcccctctcttgactttcagcactattttttttttttttttttttttttttggcagagctgacctaactttgtagagattggaagctacctgggagagaagaaagtcctttctgtgaagccccccccccccaatgaaaaaactcacccataaatatcctgttatgtcatgtcagcttaggtttctgacttaaaggataaggaatccctgaggaaaggtagttttattcctgtgtttggtgtaaaagaaagtgttctgtttacttctgttctattcttagtgggcgagccatgttttagttgtgattactggaactgatcatagcccgcagccgctgggtagtgaaacagtgactggttatcagcagcatttagctcaaccttgcatgacttgtcgtcttggtttgggcagtgagttgtgaagaagtgtcctatgctcctcggaatgaatggcctggggaaaccagcactgaactcttctactttgtgtggtctcctaggttaccctgcatctgaaccccattgcctccgtgcacactcaccacaagcctgttgtgttcctgctcaactccccacagcccctggtgtggcatgtgaagacagagagactggctgctggtgtccccagactcttcctggtaagtgttcaacacccctccctaaaaatggtcctggtgcagggttataatgactctggtttggttttgttttgttttgttttgcgagacattgcgtttcttgaggcaatatcttgctatctagatgagactggcttcacttagttctcctgtctcagtgccctgaatgctaggattacaattgtgtatagcatgcccagattgcaaagggtttgaaaaaagacttcttttcattaaaatgataccaaagtgtgttgcatttttatttgcacgtggggcgggggaggatgtttgcatggtgtagaaaagaattcacaggaagcagatgccacccacatgtcttctgtggaggcagagttgggtctcacttgcacagaggtgcaggacctgctgtcatactcttgtggcctgcccactggtgctccctcctacctcatggtattaagagtgctgtcaaagctgtaaataggttctgggtgtgtggtctctgaccacagaataaatacacatgagcccattgctatttgtatataacaaacctaatttctgagggactgtctgctgtcagtgacacagtgagctccaagcatgaaatcatttgtattttatttaaaataaaaaaagaaagaaagaaaagaaaaaaaaaagctggagacgagctcttgcagaatggtccaaatattacctactatttgtaaatcatatccttcggtgtttgccagagcctttgggtttgctagctgtggagaaacagatgggttgtttggatgaaatgtttggggtgtgatatcatgtctgatgagcagcagctcgcagctcgcagctgacctcttagtcagttgtgatggctttgtgaaggctgcctgctgtccttgctgcagagcctcaggctcctgagatgtggcctgtaagcagccccctcatccctccagggagtcacttttgacactctagggacttctcatttgcatttgaaaaacacttttaaccaattgaaggtatctatcaactaaagtaaggatccatataactggtagtagaaaaactgtaaactagaagagatagggaggttttatttgtagtaaaatgctagttattaaatacacatggaagaaatgatggagtcagaatattgttttgcaattataacagtgaaagttgatcagacatgaatcttcaacagatgttaggaagaggagagatttggagggacaatacattcatatattctctagatatgtttccacaagttacttattaatcagggaagaaaagagcgaccatagatagtaaagaaccctcagcagggctttaagcaagtgatcagacttaatgacaccgtcctggggcagatagatgtcgtatgtctgtaaatgagaaagaacgaagcatccctcatgtctcagtcagggtcacttgctgtgatgaagcaccatgaccaaagcagtgtggggaggacagggtttatttcactcacagctctctaaagcagttcaccacccaagccaacaaggaacctggaggcaggagctgatgcagaggccatggagggtactgcttactggcttgctccccatggcttgctcaatctgctttttttttttttttttccaaaaaggtatttctttttatttatttattttttattagatattttctttatatacatttcaaatgttatcccaaaagttccctataccctccctccaccctgctcccctacccgcccactcccgcttcttggccctggcattcccctgtactggggcatataaagtttgcaataccaagggtcctctcttcctagtgatggccgactaggccatcttctgatacatatgcagctagagatacagctctgggggtattggttagttcatattgttgttctacctatagggttgcagaccccttcagctccttgggtactttctctagcttctccattgggggccctgtgttccatcttatagatgactgtgagcatccacctctgtatttgccaggcactggtatagcgagacagctataacagggtcccttaagcaaaatcatgttggcatatgcaatagtgtctgggtttggtggcttcaatctgctttcttatagagcccaggaccacagcccagagataacatcaaccacaatgggctggtccttcccccatcgatcactaattaagaaaatgaccaacagctggatctgatggaggcattgtctcaattgaggttcccttctctcagatgtctctagctcgagtcaagttgacataaaactagccagcacaccttatgtagcaatccttctagaaatgaatgtagcctggttctaattgtgaggaaacattgggctgaaccaaatggagcaacatcctatagaactatccaattctctaaaaagtgaatcatactgggttggagagatggctccaaggttaagaacactggttgctgttcattcccagcgcccatgtggtggctcacaaccatctttaactccagtaccaggggtcctggtgccttcttctggcctccatgtgtatggcaatcatacctataaaataactcattaaaaaatagttacacaaaagcacatatacataatctagccaatagtatatatatatgtgatactatatatatatatatagtatatgtatatatgtgatacagtataacatagaaaagagaagaggagggaagagaaagaagaggaaggagaagaggaagaggaggaagaaagaggaagaggaagaagaaggaagagaaggaggaggagaaggagaaaaaggaagaagaagaagaagaagaagaagaagaagaagaagaagaagaagaagaaaagaagaagaagaagaagaagaagaagaagaagaagaagaagaagaagaagaagaagaagaagaagaagaagaagaaaatagtagttgtattatctgggggtgaggaagactaaaggcaggcaatggacaggagttatgaaaaaagacacagagttgatcgtttctttagttccactggagtattttgttttgatggtgtgtgagtacatcaaaatagactctatagtgaaagcataaggtcctgtatgaagccgtgtgaggctccacagctttagaactgctacccaaaccctttggaagttattccacctgtgtagactttgtgtttagttaatttcactgtgcattttttttaacttgcaaggtttttccttataataaagtatataaatttttaaaaaactatgcttttaaagtgaattatgaaaggccaagaaaggctggggaccaccctagcctgaagatgactaaaaaccatgtgacctcactgcaccatgggtcagggaacagcaggtgtaattagaactcagcctgctgactcaagtaccaacactggcttcttgcttttgaaatctgcactgttgtctaggagactggctttcttccaaagcaggcttagtggtaaggggtaaacaatttagaaaaaaaaaaagaccatgtttagacagaaagtagatgttaaaaagctgtggctctagttagagaatactagagtcttttgtagaatatttaccattctgctgtaaaatttttaactttaaaatgaagcatttaacatctttatcatctattttatatatatgtatacgtacatatatatattacatatgtaaggtgagagttattaagagtttaaactgcaaatacaattgagatattaaaaatgtctttattttattttccatgttacataggggcacacatgtcatgggaagcatgtggtgataggcaggtactttgtgggagtccttccagtttgctccttccactgtgtggtcatggggattgtcttagttagggttttactgctgtgaagagataccatgaccaagacagctcttgtaaggacaacatttactaggggttagcttacaggttcacaggttcagtccattatcaagtcaggaatatggcatcatccaggcagacatgatgcaggaggagctgagagttctacatcttcatctgaaggctgctagaagaatactggcttccaggcagctagggtaaggatcttaaagcctacacccacagtgacacacccaccccaacaaggccacaccttctaatatagtgctactctctgggctgatcataggaatctactcgggtcatcaggtgtggtggcatgtgctcactgagccagctcaccagccttagttgtgcctttttgtggagacaagctctcactgaatgtactgtgtagaccaggatggccttgaatttacagagatctgacgttctcttccttctgagtactgagactgaaggcgggtcccactgtgactgactactcttttttttttttttttttttttttttttacatttaaaggacagaacagtgataattaggggccactaatcttattcatttgactgtgtcctcagtacctaatctctttgtttttcctcctggtaactgttttctgtagaatctactctgtagcacatctgctaaggtgccatgttagtcacaccagctataattggtgatggtaagatcaagactcttataaagttgaagtgggtgtgtgtactgcagcccagtgctctaggaactacctagggatgaatgtcttgtaaatacacacacacacacacacacacacacacacacacgctgagtttggtggcacaaacctgtattctcagctattgcagaggctaaggcaggagaattccaagttgaaggcctcccgaggctatttagtaaagacagaggtgttttttggcaatttaggctctttctcaaaatttttaaaatgtgaaagggggcctttgattgggtagagcatttacctagcatgcatgaagccctgtgttctattgccagaaccaaaacaaacaaaccaacaaacagacaaacaaaaatatttaaatctaattgttgtgattagcacctttcggccccgggggaagtctggaaagaagtgaccaccccagtagtcaggataaccgcaggtgtcttgagcggatcctctttctagacagctgtggtccaggcagtaattaggcagactcatctccgtaaacctgactttccccagctgtaatgtgtgaataacaaagtcccacagcacggcagggaaagaagaatcttgatgtgaggaaagtgctcataaaatgttgagtgcggcacccaccgctaagttcccctgcatttgctatttctgctgtcactatgagaacaatgagtacttgtgaaggatattaaattaacatttgtaattgtgagtaactgttggctggctgcagatttaaagtccccacttctctgggctgtgggttccacgaagagcgctggccacacacactgtgctttgcttattgctgttggagtttttctcaccgctctgtgggatttaggggaagttatctttgttattatttatttacttgatgagctgtaagaactgcatcttgaccattagttgaaaatacactaatgaagaagacaaattttatatacaacttagcatcaaccttatttggagttaatcccatataaggacattgcagggcaagtgatgggcccagaatgtgaggtgtagggaggcaactgtgggagagattccgggacacccaagctccgcctccttcaggctttgtctgtctgtctacactctctctatggcctgggtagtcagcggatacctgttgctccatcaactcactacgccacaggtggtttgagatgtctcaaaagcctggcaactccccctcctccccaagacctgaaaagcattcatgtcttgttgcgagctgctggcagccgcaggtttcaggctgggggaggggagactacaatgtcatccacagcacagtctttgtgatgactgaagaccaggtattctatttgtccatccgtggagtttgttcatccatggagtgattctccaaacacttcagtaggcctgtagactcctgtgaagccgagccctaagattatccaacgagccaactgcttcagaccaaggatggtcccttgaccctcagtccaggatgcatgcctcatgcccttctgacacgtaatggtgaaggagtcacatgactatctccaagctgtcttttgtgggagtgatactttagtggttgctaatatttcttaagtaggatgataagaaaagcttgtgggctggtgagatggctcagcgggtaagagcactgactgctcttccgaaagtcctgagttcaaatcccagcaaccacatggtggctcacaaccatctgtaatgagatcttctggtgtgtctgaagacagctacaatgtacttatgtataataataaatacatctttaaaaaaaagagaaaagtttggataatgccatctacctgtaaatgtaaatcatggttttaactgcctgaagcttgcatagttagaaattattactcaaaaatgtcttagctgctgatacttaaaatataaaatatatttattttatcattacactatctttagaggcatctgcctttagtcagctcatcattcctaagtctacagcacaaacaagaatgccaggcacagaggggcaggggaatttactttcctttgcaaatgcagttgctttgtctaatttttctggtcacctagcaacggggaatgggtaaagtgtttcaagatgcatctcaagtcacacatgtgcacatgcatgatggccttacaatatttcctgggtggaccagagaatattcattagatgaagattgtccctgggtacaatcagaaagaaaaatcaccctgccttcagcgatggagatgcagcttagtgtagagcacttgctttgtacagatgaagctctgagtttgatccccaacactgaatgtcactggatgtggtggcatatactgttgtcccaggcctcaaagaggtagaagaggagggatcagaagttaaggtcacctgggacacatgagaccttatctcaaagtgtgtttgtatgtgtgcttgaatgtgttcacactataatttgaataaacatttttccaaggacaagacacagatgaccagaaaggggagggggggggggggagatgctgaacattacagagcatgagggaaaatccaccaatcacagcactgaccacctatgtgacaaaacagagagaatataacaagattgacaggatatagagaaatcaaaagattcatactttgctggtgggaatataacagtccttcatacccaaggttcctgcccacaaatgtccaaaacaaagttacttgtaacagcaaacagccacagaaacaacccagacgtccatcacctgataggtaaaagcaatgcaagagccatactatcttttgactgtgaagtttcatgtgatacaaaaggctgcatattatatggttctgtttgcctgaaattcccaggttacgatctatagagactagaagccatggccaggggcatgtgggggatgggagggtgtggactcactactgaccactgtgtgaggtttcatagaagacaactgtagaggaagtgtgtagtggtgagcatagaacatgctgataatatattaaaagcattgaactgaaaaaaatgtgataactctggtatattacttaaagcctatatcgctggtacgtcatccctaaaactgctaggaaacaaatctgctgcagtcttctttgctgggatcagtgcaagagctgggggtgttgctctgtggtagaggggtgatttggtgtatgcacagccctgggttccgagcacatctggactgacagtgtcactcagtgaacaggactcaggcagtgctgggagctgagccaggacctcgtgtaccctgagcatggactcaggtgctaaataaactacagtctccgctccaaactagatttcctaaaatctagcatatttttactttactccttgtccctaactgtggtggggtttttttgtttgttttcatcttgtgggcaacaaggtggctcagggggttaaagacacctgatgtacaaggatctgcacggaatttgatccctaaaactcacagaaggtgagtggcaagagctaaggccacagagttgtcctctgactttcatacatgtgtcttgccctactaatgattattattctgttgttgtaagtgattattgtgctattaaatgtcacttataaatattctacatatcattataattactattagtagggtcatttaaaacctcacttttatattatatataaatattatatatgatacatacatattatacacacacatgcatacatatatacatatatataaaacataattattaatgttagggtcatttcaagccttgctttgtatgccaaacccaagttcttttcccccttcaagctcataatctacataagaaattttcaagatgagagcctggcagcctcatgttgtgatatgttcctgaaatcccagcactttggaggcagaagtaaaaagatccagaattcctggccaggctgcctcatagtgagatcttgtctttaaaagtaaaataataaaataacaacaacaataataaatttaaatgagaaagagagagacagacaggtacagacagacaggccctagtgactgattcttaacagcataaagtgtctggtctggcctatccatttgagagttagctgttttgtagtctacttaaagcggggaaatgaggatgcctaagactaggaaagtctccgggaagaagcggctgcttccagtgttatactctatgggtttctgtcctgtgatttcttttttcccagccattttatcattaaatcaggaaagaaatgtggatatctttggcagccagatggggataggacagggcagatgttggtctcacagcacagtgaccagggtttgacatataaaaatgcaggtttctagttcaagttgagtttcagataaataaatttgcttaagtatgcctgtgcaatattttagacataattacactaacaaaatccatacattctttagctacagttcaagtttaatttggtgtcctgtatttttttctggtaacccaggtttttgtttttggcttaatctccccagcatgggttctagttctggctccagcactaaggagttgtgcatcagggcgcatggttgtgctaccccgggctcagttcccccatcacagataaagactttggattatttggattaagctgatcttccgagttccctcaagtttttttttttttttttttttaactcttatgctttgataatgcggctgctagataactatatcctaatttaattggaaacagaagatagcaatatgaaccctgccctcctcagcaaatctgagtaaataccaaggcatggcagttggaataagtgaggaaaaccgaactttattctttggctttggcttaaaaacaaatcaaaacttaatcctaatgaaaaatgtaaattaataccaggaacacactgaatatttaaaaaacagctctgcgtgtccaaagaagggggaagggtgactgaaaaatccttattgccaaaatctggcttactccttttccttaaactggagggggcggggaggccaagtattttggacctctgccaccaaaccacaggcagttctctgatttgcactgcattttggatgcctgacaagactcggtgaaaacaagtgctatttgttttcctgtgcctagtatttaactggaaatcaaaaggctaaatttccaatcagttgttaagcagccccagatgtgagctcagggccgcactggggggagtcagcctaataaggcgcatgcgccacctaacaggacacatgcgcagctgttacctttccaagccaagcaatgtgtaaccgagggttagtgtgtccaaaaatgctctgggaataactcagtcaagcttgcatgtggaggagggaacttaaaaataaacaaattgaaaaaactcctgggttctatggttttgcattaaaaaacaaaatctttctaacatcctttggcagctctgccccatacttgagagcccacaaagttagcaaaccttctatgatgtccttcgtatgaactgttcaccgattcagcatccgttttttctgcccgagtgcttgaggaaaatgacccagggattgacagggaagggtgagtcacctacgttcagagagctttctaccgctcgctcgcagagctagctagaaaattgggagttgaggttcagtgtaaaaatgtaccgttgtttagatcccagaagttggagaaaatgagacttgccctcttgcctgtgcagacgaggtagcagcttccgggaggtggactctgaggagcatgtaggcagatggcttagggaactgtaaacaaacggagcttcccaccaggctagaggtgtcacccctgtgtcctagggacctgactgcaccattcagtgaagtctttccccaaataaattctctcttgaaggcagattaaataaacacttccagattcgtggtggttcttttcagtatctctggccgaatgactcactgtgtcccgaggagattccaagtggttgtgtaccatgcgtttcttctcaagaggccgcttatctgttggttttgtggcttgtccctcagagatgtaattatatggggattgagcctttcaggagctggggtcagtcaactaccatatttcctagaattgagtttctgcccctttgtggtaagagagcctctcctaaatgtcactgtggcacttagaacgttggagagagtccagtttcagctggtaaacctggtccagagagggcttgtagaagcttttgtcctgacaggttggggagggtggtgactgcagcgtagatgagtggcccagagccctggtttgccctcttgtagtttcctaagcgagacatcctgtccaggaggactcacccagtgtggacttttcctggctctacttggtgtgttgtgtcatgtctgtgtgtaggcacggccccagccctgtgaaggcctcgctttcattcaacaaattgaggttaaacaaacttgagtacactgaacagaagattggttttccttgcatagtccaaggaggttctttagagctctggaataaagctaatctggtgacgtaatgcatctgcccttcccaggcaccggcattgatgtcaaaggttaatctctggggctgtgggtaacatagtggacaacctccggagagctatttggtaagaaaaaatgagtgttttgttaagggaagttacagaatgttttattttcatataatgagaggagaggaaaaactctcccaggaggctctgggatgctgatgtgaaacttttaggctgtgcctgggtgcagatggtgatgttgtgggacagctcccaaagctacctcacaacccgtttcagggaatggctgcagcatggctcagctcctttctgggtacacacaaactgtccactttgcttgagacaatgtaggttttgcatctccgatccttgtcatctagttttctggcttagaaatcatcttatcgtgggatagaatctgtatcttaatctctgcttttgccattactcctgggtggtttggagtccctggtgcagatcagggttagggttagggttagggttagggttagggttatgaactgtgagtgatcccgtggtggacgtggtcagcagggtaccctttggattgtgagtgatagcccaagccggagctcatgcacctgccacctacagcccacagaaatgatagctcacttgctatctcttgcccctttatctttatcttttgagaaaggttggcattgctttgatctgtgaacacaggcagaagaaatccctttctagacgtttgcataagaaggctcagcttctgctccactgagcaacaaactgtgggtgatgaacgttaaggtctgtcttgaagccctcatgatgtgtttggaggccatgcatgcatgagtgtagttaataaaaatgaaagagtgtgtatcgggggctggatgcttcaaagtacttacatacattactccgtttgtaatctctgtaacaagtctgttatgtaggtgccattgctattattatcataaaactatttggctgtatgatgcagttcttaaagataaatttcacgtaggtatcatttatcattactttagatgaggaaatgagacagggaggttgacaagtgtgtggaccaactgttgctggatggtggttataacacataaaggggcaggaaattgactgagtatgtgcaacagcactcccccgaatactgaactgggggccttgttggggaaagctacgctgccggacctgaaggcaaaacaatgctgtcattggtaactcccttgtctagcatggggccacaaatggctatcccaagattagggcctcagaatggaacttcagagcaaactgggacaccaggtaagcaaaggcctcattttaacaatgcctgttgtaaatgacttgggaactgaggtataggccctgtggcattccactcagccgagggtttgtcaattgtttcgttgaccccttccccaagtacacttttcctctgggctcctggttggactgtttttggatcagctccatggcctgccttgcttaattagtacacatatacccttagcacctcagggaccatttcatcaccaagcttaaatgtgcttagttcaactttcttagctttggcagaggacaccgtcctggttgtctgctgagacttgattataaactgaaaactgggggaaaggggcataaaactccaacttggaagttcccaaaggacaccagccagtgtgcctggcttacggccccttctccaatgcttctccccaaggagatgtcctttaggctctctattccttagccattcttgggtttggttgcccagtgggccagaacgtacagcccatttctcccagggcttgcatcagcaattcaccgaaactgtatcagccagagtttcggagacgtagacctggcaggggatttacagaaggagagctattgcaaggaactagcttgcaccgtggtggagacaggcaaggattgtgctctcccctttttgcatctctcaaaccttgtataaatatccgacccaaccttggcagacctgtgggcagactccctcacccgaggaagatggcctttgcaggatcccatgtggaaggggcatggtttcggggagcccagcagttttgatctgtgcttattcttcgctacactgtatgatacatttcatttaatggctcagagctcctttcttcagttgtcaaccataaagacacagactccacgtaggatctatttagcaagaattcatgtccaggctgtgtgactgttttcctcccagtgttgagctgctatggggcctggggttggaggagcttggccctaccacacagggacagcctgttcagtgcctgacaggggctctcggttctgtcctcagccttgctgcctaccctggggcctggggaggtcctccagtttcttggaactgttatttcctgtcatgtaatagatgactagcatgaacaggaagatctctataaagggcattcgaagaccctatctgctgtctggcttttgtaaaattcatttcacgtccttgaacttggcttgacacattggatgtaaaggaaaaaatagccatccatagtgagaggttcctagaagtataaatggagggcctgtacagcttgaggggtgtggtaggtaatagtaacaaggtcaacagccaacagtgcctcctcaagattcccccaggtgaccctcctcctcctcgccctcttcctcctcctgctcttctatctcctcttccactatcaccttcccccctccactcctctttctcctcctctctttgctaatgttttttgtttttttttttttttttttctgaagagcaccctttaggagatcaatgtgctttgaaatgacactcaaatgactcttgttgttgtttgtgacagggtcttactgagtagtcctggctagcccagaacttactatatagatcaggccggtcccaaattcatggagatctacttgtgtctgccttccatgtgctgggattaaaggcaccagtcaccaagcctggcaagttccttttaatatcatgggacaatagaagatgggggaaggagctcagaaatccaggctgttgtaaggcccaggtacatctcctgctagcctggggtggggtgggaggatgctgggctgagcctgatcttcaaactggggttgagaggttttgcttctccttgtagccagccatgcttcctcatgtccacctccattcttgtgctgttcctgtgagttagcacatcactctctcaatggcttaagtccaggtttgtgcatgccagtgtccagtgtgctatgcacagcatgtgggatatgaagaacacagagcagtctccatcctccaacatcttacatgtccggaaaaattaaaacatcccaagatgggcatgacgaatgctttgagaaaaattaatagtcaagtgtgttctaagtcattttattggaataaagtaacctggtttgggttagaaaataaaaacacccaagaatcgaaaaaaaaaaaaatccagttatatgaatttgcatttcctgaacccatgattggcacgtgctgtaatcatatggctcacaaatgttgtacatggacatggaagttattatttctttagaataatccctttcaaaacagcatcaaatcatgacatatgttaatataaaacatgtttcagattgaatttcacatcacgggactttgagggaaatagtcgaatacagtcctcttggggattgggtagaacccgtgactttcttatttcagaaggaagggttcagtcagtcctcactcgaggtaaatctttcaggacctgaaaggttttgcctttcctgggctctgcacatcccagtgtaatctccctgatacctttctgtggaggcatgagatacctgggccaatttgcagatcctgctttggcacagagctgattccaggggggggggtctcctttttcatatctgcccactaccccctgggactgagctagccaattctggcatggcaggcatttctgaaatatctgtttccctctttctgtttccttgagggtgctgtttccttgggggcgctgaaagtgaagaggcatagagaaaggaaaggggtagcggggcagggtagaggccaagaagctcatctctactgtgcggattctccaccatgagtcatgcaaacaggcaaaggtggctgtgtgaggtgagcagccccgagggcctgtaatccaaatagctgatagcccaggctctagtgcatcaggattgagctggaggggatttggggggggggggtgcacaagtgtgatgattcctggaacagcttttcctgtgaggtctcagctggcttttcttcatctctgtggagctgtggtttcacttattttgcaagaaccacttctttctaaacgtgcaagatgatggtcccatccacgatgtggctgttctttctcctttttgggctttttttttttcttcttcaccaatgtaagacgagattcctacttggtcaaagagcagtcttgttcaaacttctgatctccacatgcccactatttttaagaatacacacacacacacacacacacacacacacacatcatgcacactcacaaaaaacaaaaccatggggacatgggaggtagatacagtttaattcatgtgcaaaattattgaagaatgtgtaataaataaaaccaataccaaagatgatttgcaggcctggtgatgtaacttagtggcagagtgctagtctagtctacaaaaatccctggcttcaatctccagcaccatgaaaacaaattagtaaataagatttgtatctctggcctagaccaatgttcctggggatgcattagagttgtgaaatctatattttggcttatttctgcctgacatacattggtctgaagattatacttggggagttcctatcttggagtgtccttttatcactgatttgtgttctgagtctaagaatcagatgggtgattgtacatcaccagcctgtaagtgcattctttccctagggtcatattggaagaagatgatctgctagaaatcaaacttgaactatgtataattttaagtataaataaataaaaatataactaattcacccaaccaaatatttaaacatgtaatgcttaataaaaaaattcacagggtatttttctgtaaaaatcaaaaacataaaacccccaaaccttcaaactctggtatgtatcttttatcttcaatgtgggttgatttagcaacattcagattctcattagtgatgtccagtcagtggttgtcctattgaataatttatgaatgggagtcaagatagccttcccagactccctgacattcacagtacattgaaacattggctcctgtttctctgctcctaaatatgtcctcagaattttccttagcacaaaacttgtggcaggcacagccagccaattgaattccaaggtgcattctatcagacacttactgtcttattggtcctcttcacatcccaactgcttgggatgtgtcccggcaccacatgggtgagcattccaggctccagaggaagagatgagagatgggcagagtaaatggatacatcttgtggggtttagaatgtaatggatacaatagaaaagatacacaaagaacagagtaaattgatacatcctatggggtttggaaagtgatggatacaatagaaatgatacacagaaatggcacacaaggaaatatggaggacccagaactgccagtgtggcatgctgttggttgtgtggcaggtttaagtgagactgcattctgagggtgatatgtgaatgaacttgaaaaaggggatgtgagagggaagggcaagacctgatggtctccggtggtctgctgagacctgaatgtgtatctggggtgctcacctgaaggtgggtggggatggggtggaatcaagaaacggaaggatgggactagaagaggcattgagcagctgcagcactggccacagcagagctcccctcctcttcccccactgaagactgaatggatttggggagtgtatgttgacctgctgagatcaatgcaaacatgaagcagcacatttccaggaagactctgtagagtctcccaaggatcggccttcgctccgacctgtgagctcacttcaaggcatatgtgagtccgcttaggatttgaagagttaagctggaacacaggtgtggaaacaaaaggctggatgccttctctgctttttcttttttcatgtacttttggatgaggttattgaatcttatccagaaaaaataataaacttggctcttgtagccttgccgtaagttcttgtaataaaactcccaacattggcagatagagtaatgttctgctcttaaaaaaaaaaaaaaaaaaaaaaaaaagtctggtagcataacttgaatttaaaaataccaatgttgtgcacagttcaagcaggaaagaacattctggtgaggaagggactcaggtgcaccccagcttccctgggttggttagaccacaaaacacttagtgattgtcccttcaacagacccttgctaagagtcgagatccttggagctcagtgtttggtgcattcccacaggaagacatctgtcatgtcagggaatgtcaggggttgggttttaattagaaagtaggaggaaagttcagtgggtggagacacagagctgctaagtatgccttagtaattggtttttagctagagttattaggtgagaaatcaaatcattagtttgaaagcctagttgagagtcattttctgggagagaaggcagggaagcaagaagcactggccactggggtgaaagtggtctttcctgtaagtgacatcaagaagggtcccatcaaccagcaatcatgaaccctgccttgcaccacgcagtgagccagctagcaaaattcacaatggacacttgcttccttggccctccggctttctgtgtcaagggaagatggcaggtgtgtcagtgtgtaggagctgttattgaggcaaggaatgggcaggaggtcctgaggagagcagggagcctggaaggcctcacagagaaaggcatgggaggtaaggagcctgctggccaggtgaggcggccacagcagagtgatccaggcagggaagaaggagagaaggcccaggatggagtcgtttgttctgcagcagtgattggttctttaggctgaattcagggcatgtgggagagtggtgtgaaatggaggtggagggtcagagatgcctcttccccagctatgtgccacattaagatgcttacctgatctgtattattgcacggttgcactttaggaagggaacacgggtgaaggaacgggattgggtactttatttttctctttttaattacaaagagaaggagcaggacaaaggaccctgaacagagatggagtaaaaaggaagtctctgttattccatccaactgtaaattcctgtgctcaaccattcattcttttgaaacaatttcacattatttattgtagaataccaagaaacatgattaatctctgctctttatgtctgtcacacatctcctaaaagctttggtgtccccaaagtgatatcttgctgtgttaatgtgatagctggtaactgggtggcctcaagttgggagctggttgccgtgggaaccagctgctagctcagaggctgggccatccagcatctctcccacagctgagaaaggaaatagacttagacctcatctccattgaccatggatttgattcagtctgacccacccattcaaagaacccttgagtcttgcctcagtgttcagagtcagtactggtagtgatttgacaaccgtgctgtctgggggtgccgaggacgtcaagaatattgtcctgaagtatgagcatgtgacaaaagttaagtaaaggtttgcattaccaaagaacaaggaatgaactctctgacttggtaggcatgactcagatcagcaaaccaaaggggaattttaggggaagaaagagagccgggagggaggggcgggtaggaggggggagactggagagatagctcagcagttaacagcactgactgttctcccagaggtcctgagttcaattcccagcaaccacatagtggctcacaaccatctgtaatgggatccgatgccctcttctggtgtgtctgaagacagctacagtgtactcataaataaaataaatctgaaagagagagagagagagagagagagagaggaagagcaagcgcgcagggctcgagagatggcttgtcaagtaagggcaccgggatccactcagtggaggatgataactggcttctacaagttgtcttctgacctccggatgtgtttcatgccacatgtgcctacacacacacacacacacacacacacacacacacacacacacaaacacacaagcatgaacgtcatcattttggaatgaaggaagaaagggaggaaggagaagggaagagaagggggaagaaggtaaaggaaagggaagggaagggaaagggggaaaaggaaagggaaaggggaaaaagggaaagnnnnnnnnnnnnnnnnnnnnnnnnnnnnnnnnnnnnnnnnnnnnnnnnnnnnnnnnnnnnnnnnnnnnnnnnnnnnnnnnnnnnnnnnnnnnnnnnnnnnnnnnnnnnnnnnnnnnnnnnnnnnnnnnnnnnnnnnnnnnnnnnnnnnnnnnnnnnnnnnnnnnnnnnnnnnnnaggaaaggaaaggaaaggaaaggaaaggaaaggaaaggaaaggaaaggaaaggaaaggaaaggaaaatttatcatggctgtgcgtgcagggctctttctggaggagttggaacagaagcccactgtgactggcgacacaagcctcgtgcataggtgccaagggagactattattctctctggggattctttctctatggaaatcatagtcatttttagtcctgaggattatgggggccacccgtgagcaacatctcctacaactccatcatggctgggagggcctttgcagggcctgtgaagctagtggttgaggggagagcgctgactaaccactttcgaaagcagaaaatttccattgacctgtagtcagggacacctccctgcccctggcagctccccttcctccttattggaatgtgcctgaggagtggcggtaactgcgtttcgtttccaaattcctcagctctgagtttatgaaccttggggctgcctggagagaagactgcactggggcagggttgctggtgtgtggcagggactaacccctgagtgagcctcnnnnnnnnnnnnnnnnnnnnnnnnnnnnnnnnnnnnnnnnnnnnnnnnnnnnnnnnnnnnnccccctcccccccacccccggtcacatcacatggctctttaatggcttcaggctgcatcccgtactacgactgactcctatttacactcttctaaccctcggaatgtaccaatatgatgcgtctcttcattcactttgctttgcataatgtatttaaaacccaaagttaaactgtacagctataacatgcaaaaggacacaagcaacaaacacggagggatccttgcctccacagcagaacgatgctggcggtgggtcaaggcctgctctgcactgccgtgggttttgttcttttggtgacaagctgaataaaaatatttaagttcttttcagaagcgagaagattttactgcagggcaaaagtcacaaaacctggtgaggctggtttggggttctgtgttgaggcatggctgcacccccaacagtgatgcctaggggtggcatggttactgtgaggctggaaggtggctttgacatgaatacacaacatcaaaaccaggtcagagctagggcttccacactggcttctcttaagcagcccgaggaccattacgagccaccattacctgtgatgtgaaaggcacgaggttgtgcctgacacatagtggatggacagccgatgtccatttaggacatggtttttacccagtttattaatgattagtttcgtgcttcccaaaccagtacagaccataaaggcttccttaaatgttaagaacccacagggccctctgagatggctcaagagggtaggtgcctgttactaagcctgacaacctctcaagttgtcctctgacctcaatacacacccagggacatacatgcacaaagtatataaatattgaaacaaaaaaagagtgaaacctgatatatatcataaaatggggtagttaggggttcatactggggaatggagcagatatttgggtactaatgacacttggtaatgtcgagtaatgacagttggtcattactccattatcactgccacaggcttcccagtgtcttcagcaagtttgctaagattcagtgtcatggcaacttggataattctttgttggagcagctccatacatcgtaggatggctaggagagatgccagtatcacctccccctcctggttatgagaataaatattatttcttgacagtcattgcttaatgcccccttggggaatagaatgatccctggctgagagtcactggtagagagccatctgcaaggtactcacaatgggtctatgcttgccttccacgctatggaacactcagcgaggtgtttcctaacaagaccaagcagggtcacccagagatgctgggcccactggaaagtctagtaagtctgggtgtttggatagttagcagctccttaggcactttctgcttcagtcatgacaaagatgatggcacatgcctgtaattctagcccttggcaggctaaagtggggagatcaagagttcagagctagcaagatcagtctcaaaaacaaacaacttttatgtgggtatatatatatatatatatatatatatatatacacacatatatatgtatgtatatatatatacccacatacacacacatatgtatgtatgtgtgtgtgtgtgtgtgtgtgtatatatatatatatatatatatatatgattgtgtaaaatattgtatagaaagtgttagtgcatatcacagcagctgagtgagcaccaggctactcacgtgaagaggagaaatgcagttatatgtgagggaaccacttaacaaagtcccagccctcatctagccttttgttctgaggttcattgttactgtgtggctatttagagcctcttgagtaataacttgttttttgctaagaacaaatagttaatatgaagtttaatgtatggtgtgtatagttttgagactcatgagcattgttaactactttgggttttcacattggcattgataaaaactaatcagtttacaaatactagccggctcctcctttttatgtgttactacttacacaccatgctgtgcaaggccagggatggcctgaatataccacaacactgtgacatttgcacagacatccttgcaagttttcttgggattcgtttgacaggctcttgacctcacggttcctgtggggatctggaagttaactaaatgagctgttatccacattcttcctcctgctgagaaacctgaaattgagagacctgtagaaaattggacaccttggccgttctttatcttaatgctcaggaaaacacaaaccagttgcgaatagttctcactcgatctgttgtggtgactgttggcagaatttacagcttatggaagccatgttcagttgctcatcagactttgagatcattgctctgaccctgaagccaatttgcacacttagtaacacttcctctgtgacatccaactcagcacagtactgtcttctgacacaatttattcacgtgacattggttccaggactacctccctgtaccaaaatctacagatatttgtgtctctcacaaaatggtgtagtgtttgcatgtaagctacacacacattcccctgaagactttaaattattcctgggttacagatagcacccaatctagaatacatactgtgcaaagagtacttactgattaggaaatgacatagctaaaaacttttaaagtccatgtttgtcaagagaggtgctgtgtttcccttaaatgtccagttctagacacggctctggtatccatatgtgttgaagagaggtactgtgttcctggtcagtccacagacatggcaacatataaacagagactatccagtactcagaagtttgatctttaatggaagtcttcttggggttacctggaagaagtgggcttgggattgcttgattcagctcttagggagcttgcctctgccacatctgcctgcatgtcagagagaagaaacaaattaggtatgatggtgaagtctagctagggctccctctaagtctggtttgactctgggtaactgtgtcatattaactataagttctatttgttccaggtttcggagggttctgtggtccagttttcatcaggaaacttctccttgacagcagaaacagaggaaaggagtttccctcaagaaaatgagcatctgctacactgggcccaaaaggaatatggagcagtgacttcattcaccgaacttaagatagcaagaaatatctatattaaagtgggagaaggtaaatgttgcatggcttctgttaatgatgttaatgtttataactgttggttgtttacctttctgagtccaggtgctcagagccaggcatggtaggattccagagtcctggaactggcggagacctaggagatggcatgagaactcttctcctacaccacctccttgtttttccttctgcaggagtggggctggttataaccagctgagaggtagggagcagtgtagctgagaggaaaggagttgttgtgtaggatttagaacgcagtcaaccacagaattcagagtaagcaagtggctaagtgtcggagagggaacagcagtgccaagggatgcactgaaggaggcaggatgggttagacagtgggggcagcttcttacctgtgatcctgcaaatgttttaggccagtgtcccttcctgacattcagagatcagttaaattttagtcattaacagaggggaaagtattcaagtacatttttagtgctaatgcttgctacaaggacaagttcctgataaaaggaactacatgctttgggtaagagacagaccattttaagttctgtgccttgcagaaaggtaaaatttccaacaactcaattttgaaagcctgtttgctaaaagcattttaaaatcagttttagttgggaatatttgggactccacccaccttcaaaagtcaacgggacctgctgacatcagctgtgtaaatagtactgctcttctgctgctcccttgaatctgacagtcggctgtcacttcttccctagatgtcatgcgggggttaggggcttttgaatgcttggtcccccatcttgggtctgggctggttgaaagtaaaaatgggccatcattggtgtgtaaaggtgagtcactattgatgtgtaaaggtaagccaccattggtgtgtaaagtaagccaccattggtgtgtaaatggtgagtcaccattggtgtgttgactacatgcagatacatatcaggagttgtcacatgtccaagaagggggcattgtttctgttattctatacagagtttaggggaggggtaagtgggtgtactctgatccacattactagaaagtgggagagccggttctcaactgtagacttcctcactcctgtgtctaacgctgtgacctgatgttgtgcttaaagtcttagcctcgtaagcacatgcccagaatgaaagtgagctgctgatcagaacgtgcccactgacctgaggagggttttagaggagaatggggtttgaacagcctaagtttgttcctagattcttgtggtagtcaggcctcatcgtgccaaagagatttttaaacatatcttaataaaggctgtaagccaagcaccctgtctttctgaagcagaatctagtagcatgaagggatggagggataacagttcttggattgttagaacaaggaaatttggggtggaagcatgtggaatgttggaccctgtttccttgacagtgtgtatagcacagatgtcacctgcccctaggatctgcaacactcaagtaaccgagctccaccgagaagaagcacaagtaaaacatctgatgcccagtcaagtaaaaactggtcggctccttgagtatccctagcatcccctaaaacttgactccagccatcagttgggtccaagtcactggtccatgtcacagaagggaacagtctcggggagagaggaacactactgttctgttcaacttgtagaccccgaacaacgttaacaacgatcaccttgcatcagggtgactgattagctttccaaatagggaccctagccacgagtgtctccttgctcaaaccgcactggttctgagagtgtgacgaccgaccgtgtcaggaacatcactgttactgagcaccttgttggaaataccatctgtggctcagtcctggccagctaaattagaaacggggatggggtcagcaaagtgtgtttccatgagccatccaggtgctggtacttactatcgacagagtgaaggagcggagtgaaagctgctggctctaatctgagcaccatgtcttagagcataggccttcacggcaggaaatggagcctttgcatgacttccaaggctcattgctgctctcaccatccctaccaagcttaagaggtttctacctgcagatcacctgcctgtggttccctttctacttggcacttggtataagtttttacaccaaccatgtggaaaggcacttgagctgagagactccgtgccataaaatgtgatcagctccttcagcttggttgcagtggcatgtgggactggaacccttaataatcacagcttttagacagttaaactttcccgagcagctcaccaacctggggaaatctttgtctatttgtctcaaattttacatcgtcgttagtggactcaagaagcctatacggtgtgtctattatgtgccagctgcatgctgggtgcacctgggtaggaactgcaagccacagtcccaggagggtcctagtctcttgagtcttctggcccatatacatctcctgattctcaattagatttcagccctgcagcctgatatcattttctgtcttgtgaactgggtgggggttgggggaggcatcacagggctgcagctgtgaagtacacattcttcatctgcacatctggaaaagcccttagcagatgtggaggagggccgctccaaagcctgaattgttaagctgtgggctgtttccttggaggaggtttgcaaaaaagaatgcagggtgcttgagccaatgctctcttgcagcaatcacacaagcaggggccatattaactactgtagtgccgcctgctctgaggtgctctggggatattgcagtggttggagctgcggtgccagagtgtgagttgtgcagggttggggagggcagtgtcagcccagccttagaatcttaaaagctcatcccctgtttttaggtgaggcttccatgtggaggtgaacccccagcaccccgtcgttaaaatttaaaagacacaagcctgtctcaccaaaatgccaggtctggttcattccccttctgaaaatctggcttcccctaaaacttcctggacaccggtcccagttgtcactgtgccagcaacttcactcgggttctgcttaaacatttaagccacaagatggaaatcccatcaggtgtagtgctctgtaaacagcatgtgtcacgggggagtgtcttcagagtcttggggctgggatatcttttcccttgtggaagtggtgagcagtcctcaggcagtggtatttataaaagcaccgtgaaagtgggaaaaagatctgcgggccagagaaccaatagctacttgtatcaaagctgcaagtgcccaaggagaagcctataggattaaaaatggattcaatgttgccagtgctcatgaaaatactggctaggtcgggaccttctggtagacagatgacagtcttaagtctgcagcccaggggaggagctgtggtctaggcgcacaggagtgagtgaggttatctatagaaaatagacaaagggaggattgagattctgagtcttgattatttagcctaacataggtttccagctgcatacatttccctgtatatgccatgatgtcatttttttttctcatagctgtatatctttgttgctgttttgttttttgagataaggtctgtagtccaggctgccctcagacttgctatgtagctaaggatgcttgtaaatttctaattttcctcgcttccacctcctgagtgctgagattacaggtgtacgctgcagaaccttttacacgatactgaatatggaccccagggcatattgcacgctaggcaaacatgttaccaacggatctacactccccagctcagggctgggagtcttgggcttggctgacattaactacagagcctcagaaaggaaagatgtccgtgtcccacatgatcccctgaatcagattctgagggacagagtcctaagaggtggttctgtcctggatcaaagacagaggaccactctagtgaaaaagagtaggacacagcaggggtcagaggagatgaacaggggcaagaaaggagtgggtgtaggcaaagaagaagccactagcactggccagcagaaggcccctggtagccaaggtagaaggcatggctgagcagtagccgaggccacagatgaggaccctttgggctcgtggcttctggttcagacttagcctcggtcacactaccacctctttccttccctcctggtcccataaactccccgatttgaccccagtgccctgtctttactttcagatcaagtgttccctcccacgtgtaacatagggaaaaattttctctcgctcaattaccttgcggagtaccttcaacccaaagccgccgaaggttgtgtcctggccagtcagccccacgagaaggaagtgcatatcattgagttaatctcccccaactccaatccttacaggtgagcacgcctgtgcactcaagtgcacccatgtctgcatgtatgtacatgtgtgtgtgcgtatgtgtgtgttataacctgagaagagatgaaagtaaagatctgttctcccctgatatgagggtgagagcggggagcagctcactttatttggagagagggaagcagccatgcttcaggcaggcgtggatcacagaagaggaggacggcactcagcatggtgacgtggtttgcattatcacctggttgtaaagatatatatgccagagagttcttgaagccccttcttaacttctgggtttaatttttaagataatggttctcctttgctatctcctttgacggacatcatcactgttgaaacagtgatgtaattagagttacagagtagccttattatctaccacagttaccattttaatatgcctcttttgattcggttatatgtataatatcctcagagtacgtatgcaccgtgtgtctgtgtgtctgtgtgtctatgtgtctgtgtgtgtctgtgtctatgtctatgtgcgtgtgtactgcatcttcatggtatgaatcaaggatccattaaatagatatcacaatctgacacttgtggaagtttgattctccctatgaaaataattagattttgttgttgtttttaaggaggggaaaaataataattttctaccctgacctgtatttcatatgggccagtgactcaaactttaccagtttttctgtagagagatttttgaaatgagacgtgtaatagagttttcatttcaaaattgaatagaccacagatcgtttgggtgagaatctgttccatgccatgtacagaactctgtggagggacctggagagtgcgcagaccttcagccaggctttctgatcattgtgtctcacacttgaaaccacgacagacccttccctcaaattcggaacgtttagtaaagcgttcatttagtaaaaaccattttctctcatgctcagttcttagaagtttgtattgtgctcatcaattttgtatcaattgcttgcttgaccactaatttaaataactttatatacagaagcttgggaaagtaagtgcagatatgattatttaactgttactgatgccgtaatcaaaacttacgtaagtcaagaggcctttggccttttatttattctgacatttcctggagcatgtgctagcatgcctcctaccccttccctcctccagcctcagccacccacatcaggctttgaagggcttcagcatatagggacttagaagttccacaacaaagggcgaaggcacagaaccttgaacacagacaattctgcttcagaaggaaactcccttggtgttcaaatccctttaactgaggaagcattgaggagccttcctccctccccctctctagaggagaaacacagctaattagcatcaggcctgcgatcctattgttatgtaaacccgttttgttcagcgtgcaacagcaatctgttttgcacatgtcatttgcctgggatccacgccagcattttaatcaactggccagacactggaaacacgaggcttggagcagtggcagccttctggctccggtcttgactttgcctttggttttcacacacagcaccttccaggtggatataataattgacatacgacctgctcgagaggatcctgaggtggtcaaaaacctcgtcctgatcttgaagtgcaaaaaatctgtcaactgggtgatcaagtcttttgacgtcaagggaaacttgaaagttattgtaagttggttgctcatttcttggtcttgttaaacagcaataacttaaactgtggttgtgtgtgttatttttgcaaaggttctgcctctttgaactttctaagctctctgttagttttcactctgcagcctatacttggtttcttctgctggacagtcaatgtcatggctaaaacatggccctagggaacattgtggacttgggtttgagtcttggctctattacttaaaaattatggccttggacaagttcttaaagctctctgaactccagttacctcattatgaaagttctgacatgagttagtgtactttctagtcttagtaaacatgaagcaatgaacattttcatgtctgcatattctttagggggtcagtgtcacagtctggaaccaggtgcatagggaggaaggaaaaccaagctgaccccagcccatgctgtagacttccctgttgagataaatatgtgatgttgggtgaatctggcttgcatccaacttccaggagtaatactctgacagaaaagtaactctgggctctgtgtgtatatggagggggtggggagtgagggtggcatgggatgggatgggatgggatgggatgggatgggatgggatgggatgggggttggtactcactcagtaaatgactttatcctgcaagctgtaatcccagggctggagtgtggaagacaaaagaaccctgtgagctcagttgctgtccattcagcctagctggcttggtgagctcctggttcagtgagagaagcagataaagattcaagaaaacacctgatgttgacttcccacctccacaaacacatatgtgcaccctgctcacacacatgtatatgcactacacatgatcctttcatggtaaccagcttacctctaacatagcttcccaaagcttctgtgaggggccttgcaggctgacaggctaaggcaaaggttcatgttgaaaagttgatgaaagtttggtaaaaccaagctcatctcagatataattagggggaaaaaacaacccgatttggcataatattggagcaaagtgtggtgtgtgtgtgtgtgtgtgtgtgtgagagagagagagagagagagagagagagatctccttggcatctcttttgtaagagtcaaatttttaatgtgtgttaattgaccatctttgttaacagctaaaatggattgtagatgtttggaatttaggagagtcgagttgtgttggttcagcattcctctgcccactgcaccttccatgtgatctctgtccttttgctcacagcaccttccatgtgatcagcagtgagcaaaaccaacagttccctacaagtccagtcacttaggtgagctcccagaggagcagacaaagccaggagcacatcttaatttaaaatgctttttccttgttcctagggatttttatattattattattattaatttacttcgactttgaaacagtccaaataatccatcaaatgtagtagtgatgcatgaggctggtactgagtgcaaagccttgccgtgattttccaaggtcacagatattttgattgccttcccttggcatggcgtaaggggtggtggcgacctggagtgtctgctgcctttgctgcctggcacgccggccaactgtttttagtttcagaataacaaaaacaggaaagggaatcatgccttgaaaggcagaaaacatgcggtgcactttaactccctgctggagtttgtatgtacttagctctgactggcggctctgctgtccctgcatgcacgtgcctggaccacagtggtcctgggctttgcttgaatgtccctgtctgtcagaggaatcagagagactaagaaagacgaggaataagatcggccatcatcccaaacaagatctgtttatattcctctctctggctgcactcctgttccaggccagtcctggacaatacatgacaacattgctaaacaattaggtaatgtttcatgatgatcttttattccccagtcagtttcaggctctttgacttctaactccctgtcccagatgtgagctgtgctatgaggaacaggtacatgctaagacaaaagtttaggttgcagcttaggaagagagaaatggtcttccctttacagacaatatggttacatgtgaagagtaaaggactctgactcaaccacacaaagctagattcaggtaccatctccagctgccagttcatggcggacagtacgactgaacatggtgtaactgtgaaatgggacagtgacagcactcactcattgtggggtttagctaagctcattcaaccacccagcaagtacttgttaagggcatatggggtctttttaaagcacacaggtacatggagcattctcagctccgtgtgttacccagtctgtgcatcacagcttctttctcactagtggagcaatggtagaacctagctcctgtattaaaggaagactaacttaggaaaatacatgtgaaggtctatcacagacctgttgtacaaagactcacctttcttccataagcactcccttgaagaatttgtccacaggaaactcaaagggcttcattaaccaaggtgaaaacaggagagctaccaaagttcataagaccctgaaagagtaatgccagcagcacacccgcatggctgtgtgtgggtttgttagaggcacagcataggcggcagtgggaagtgatcagagagataggaaggctatgcaacaagatcagcagcaacactgcagtgtggctctggccccttccgcaggtcctccctgtggacgtggcccagtcacttctacagcagggagaacctcagaacagaaaagaggaggaggcttcttagaggcttcctcttatgggccagagagatggctaagtgggtaaaggcacctgctgcctaatctaaggaccagagctttgtccctggtatgcacttggtggaaggagagggccagctcctgcaaatggtccttcaagctccacatgtgcacacacacacacacacaaggatgaaatcataataaacttaaaagctaagttttctcttgtattctttgatggagcctactcttagaaacgatgctagtttaaaggcccagtgtgcagatcctcagcacactattctccgttaagcccttctcttcaccattgtttcaaaggcatgggggtgggggggggggaggaagagcccctttccccaccaacccagctactagttcacaaaatggggctgaagataatggtggtggtattaggggaaacgtcctttgagcacccccttagctgcactacgttgggaaagtctggagagtcctaggaacacagaaatgagggatttactcaatgctgagaaccagcttgcctcccgtcatcctgctgctctcctagtgcagagtgatgtctgatcttttcagttccaagccacaattaacgtgaatcacacagacagctcctgtgtttaatgtggaaaggcgtgaagagattattctgtcctggtgcagcagaacaggtggccattgcgatgatgagattctggaaatacggtattttctcagctgtctgacaacatgaaagtctagggcagatgaggccaggcagtattgtttaggccaaggttgcggttccagccagtcaaaacacatgctgctttgaagggctgggagatgctgcacctcagcaggctggctgagtgaagctctgagagctgctggctcttactacttcagccccgattcctctttatctcattccattttcaatcccatttccctctctctccctcccccttctccctatctctttctttctcttcttttctttcgctctctccctttctctctccctttccttcgcctacagccctctctttccttctctcccttcctctctccctctctcttcccttctctctctcttcttcttctccttcttcctttaggagtttcctctgaatgtgagtaagagctaatgcctgtcggtctataacctggcttacagatggtggcaggattcagttctcactcccttttctttgcatgcatatgcaaagtcgtgactggccagtcatggcaggttggtccctagatcagctctttgggtaacaggagaagattttgggtgacacattgaagttttgacttggagtaaaagtgtccgcagccaatctcccacaacacggaggccaagagaactgagagcccgtgaatcttttacgactctacagtgggaaaggattaatatttggtcatgtttggggtaaatagaatgggaaacaaatgaggaatttaggaaaaatgctacagacacgcaggagaaaatcagtgggcatggaaattaaagggacgttgatgtggcgtgacagtggtataatctgtgctctggacatgccccagccctgttggagcagttgtgggcactgtgccttcccatcgggtctctctgcagtgaccagcctcctcactcatcaacaggatccctgacacaggagtcagcaggggacatagacatttgctgcctgtatctcggctagtcagaggccagtcatatacttccttgaaagaatcctttcattttagtgttgtaacagattattaatgaaaactaacctttaatatggctttaacaatttccatattgttatagaggggccatatcaatcgttacatcctttcagttttaatatgcatgttgcctgtgtaagcatataagggcttcctcctttattactaaatacaatgctactacctgggtgatatcttaatagtactccacagcataaaatatagtatattaacaaaattggcaagtgaatacaatttcagaacacctaatcagtcagatgacatgtaaaggtttgaggtttactatgtggaagctaatagttcatacagcattgggagagtcatgtgatcatgccatcttccctgtagatctaggccacaagatgcaaagccacaggcatgtttgtaaacacggtgtgcacacctgtgtactctacagacagttttacataaaaaaagcggaagggaacatttgaaatgtgtacttgttgtcctagtaacggacataaagtaagtactcagtgagaatgggcctctcttcgtgtgcagtgttttatcttagtgtcttcttatccgaggaagacagaggttacagggtaaagcctccttgtgcagtccagaatctgttggtttcagataattcctcattcaaagtatctttttagaatatcctttattctttgacaactttatacaatgtatcttgatagtgaccacccccaattcccccttccctcatggacacctgtaaaatatccttttccaccttccaaggtccccctttcatttttgtaactctctgagtctgatcttgctgaggtctgctgcgatccttcctcatcgtggtttgaccttgtgcagatcttggaccggcacttttaattttagactcatgggtaaaatgttgctgtctttaggctcctgacagtattggctttggaaaagagagtgaacgatccatgacagtgaccaaattggtaagaaatgacatcccttccacccaagagaatctgatgaagtgggcattggacaatggctacagcccagtgacgtcatacaccatagctcctgtggccaatagatttcatcttcggcttgagaacaacggtaagtgtgatgtttcccacctgttggcttctgtcttccagaggaagctgctcagtgagggactctcatttccatgtatatgttgctggcttcctgctatccgtctttataatctgtcggtttcaccgtgaagcttaaactaatgtattggaggcaacggtaacacacattctcagggatggagagctgcttgtgtgtcagacatttttgctctctgtgtccactgtgataacatcaggacgctaagtgaccgctcacagctgacaacaccaaggggtaggtccatagcaaagaagcctgacaagaggctgaagcttacaggaaagtgaccacggggctcagactgggtaggtttcattcagcctgtggaggcagaattgtctctcggtttctagagtcttaaagcgggtatgatttgaacctcaagttttctgagaccttggtgtgttcctcaccccatggtacacgggctgagctgcagctgtaggttcacttcccacttagtatttctttactattaggggagacgttgcttaatctccaaacccgagcctcagattccctgtcaataaatcaagggaaggaaaagatctgtcttgctggcaaactgctatgaaggattggagggggggccggggatgtttttgtttaaatcaatgtctatgttaaaagcagtccaaaactgtgacttcatgtggacccagatagccatagcatccttttcaaagggatcctgtggaaggagagtccccgtctacagatcatctctatctcacactgaggggggtgtgatcctaagcataggtcagctgggctcagataatagtggaggcggagaacactgggagaacaactagttctgtaagttattgaaaatgtgacagcaatatgcattgcttttacagaattctgtcttccttctgaagcgctctgctccccagagacagtgttcagagagaccagggtacctgcacagcgcccagatttttatcagtcagaaaggaggtgacaaataacagagcagcgtcactgtcatagaggaaccacccagtatgctgaggaacctgggcctgatcctctgaactacaagataaaatttaaaaatagcaatatagtttctagaaatcttctggaaaaaaaaagatttttaaaaccctagattcaaagaaagtattttaagggcctttgactaagttgttactgcccctcatcgcacagatacatagtttgtagggacttagaaactatctagcagaatgagtctctttggtgatggagcgtcctgatcacactagaagcttaaaacattaagaactggagttccacgtgtacccaaagttgaggatcactgatatactccaaactcttaattttaaaacttgggaaactgagtcacagagaagtaagtcacctgtctggggccattcagctagttagaacagcgggatcagaattcagggttccatgtttcttagttagttctatacattgctcatttactgtaactttgattttcacccattctgtgctaattcctgttctgtctctaacaatgaccatgactgacatcagtcactcatgatgttctcacaatgaccgtgaccgacaccagtcactcatgatggcttgccctgtctttcccagaggagatgagagatgaggaagtccacaccattcctcctgagcttcggatcctgctgggccctgaccacctgcctgccctggacagcccatccttccaaggggaaatcccaaatggaggtttccccttcccattcccggatatccccaggagaggctggaaggagggagaagataggatcccccggccaaaggaacccatcattcccagagttcaattgcttccagaccacagagagccagaagaagtgcaagggggcgtgaatatcgccctgtcagtcaaatgtgacaatgaaaagatggtggtagctgtagacaaagattctttccaggtcagtgcagtctcttaaaggaaagacgtgaagctttccccagctagctgcaactctgcatttattatttccctgtagttattttacttttgaatctccgtatggtgatgttttcccagttggataggccactttcccttggcaagggccttcattcacttcctgttgttctcaaaagaggaggggagttcagatccttgtatgtcaatattttgctattaaaatttcagtgccaataaacacaatctgttgttgacaggtgcaaggtgaagaaaaggcttgatattcccaggagaggctgcccagatgaaaaggggaggggggcgatgaaaaggcgagagggggaggggcgagatgcctgcctgcctgaggcctcagcctttgagacaggcactgcttgtaaccccaatacagtgaacagtggttaagccctcaggtaacctttggtgctttccatttcagaccaatggctactcggggatggagctcaccctgttggatccttcctgcaaagccaagatgaatggtacccactttgtactggagtctccgctgaatggctgtggtactagacataggaggtcagccccagatggtgtggtttactataactctgtgagtattctctagaacaaagccttacctttgtcacggcattgctgggtattatcgagggttagccgctgaaaatgactgggatggagataaagccagatgtcagttctcaacaaaaggagatggactgtaaccctgaactcttgtcttgttatgatttatcagtgtatgcttgggatttgaaggtcctgttttctcagctggagttgtgataatctcacacacttccttcttccatataatgatggttcaacagcagggtggttacaccagagggtccttatggggttaaagccccaaagccctagggtacatgaacatcccccagtggatagtctcttgcttgtccaagagtaagaagagacttctttcctcatgagcctaagatcaaaaaggaatcctgataaaattatccagtctctctaataaagaccccagatttaagaaaatttattttttaaatctaactggaagaaggttcaattttccccaaaaaataattggttgcagtcaccgactcttccctccgggaaattactcctgccagttcacctgaatcttatcaagtgaggcctgtcctcttcagggagggagactgaagcacaaaaccccacagatgtttcaaagtgtccgttttgcagatcgatttttaaatacttctcagcacgccacccacaatcaccgcgtgaaccttgggcagcgtgtgtttccgtgagctcttagctcgattccaccactgacatgggccagctctctaagctgctggttcatatgacctcccatcaccacatttgacccaacccagaagagcagccggagaggcgtttgcccagtgtgtcacagggctctcctgtcagcttgctgtattgttcctgagacccttagacagttggcccaggaaagaggggcaacatgatttcactcagtcgcctcatttcaaaggcaaagaaactgagccctggagagttctgaggcttggtcaaaattgaggggctggttataccggagagccaggaccaactcttcccagccccacacccaccgacgtttcctcaacaccagactggcttatgttccttgactcatctcttaacttttgcatcctactcatcacgacactaattttcttgtgattatccagtttctctaaatagacaagtgccatgcaatagcaatgcacttgatatggacgttttaaactgattccaaattagcactggcaagaaggtgatctagtgagttaaatcttcaattgccccaagagaaaggatatctggtccaaaaagtcacttctttcttgtttgcttttcttttcttgtcctttttttttcggggggggggagggggttcgagacagggtttctctgtatagccctggctgtcctggaactcactttgtagaccaggctggcctcgaactcagaaatccgcctgcctctgcctcccgagtgctgggattaaaggcatgcaccatcacacccggcttcttcttgtcctttttttttaaaaaaaaaagatttatttattgttatatgtaagtacactgtagctgccttcagacacatcagaagagggcatcagatctcattgtggatggttgtgagccaccatgtggttgttgggaattgaactcaggacctttggaaaagcagtcagtgctcttacccgctgagccatctcaccagcccttgtcttttttaaggacaaggcattcagtcctccagcacccatgagtgcatcaggtgccttcctagttactcccccacccttaccccattctgctcccagtggtgagtgcttcaactgcctgctccagttgtgacagtttgtaggaatcttcggactccctatgtatttctgttttccattatgctcataattcaagcatacgaaatggaaataaactaggttgtgatttgcagaattgttgtattcaggtcaccctctccatcctatttacatgcaacccagtacagtaattccagccaatgtgaagacagattgctgtgaagagaacgtcttctttttttgcacccatacacacaggaaagatattgggaaggattgatcaaagagctgtgtgtcccctgtcttctagattgtggtgcaggctccatcccctggggatagcagtggctggccagacggctacgaagatttggagtcgggtgataatggatttcctggagacacagatgaaggagaaactgcccccctgagccgtgctggagtggtagtggtatgtgttagtctcccgtagatggttctgtggatacattgttgctcaagctggtgtggtggtggtggtggtcctacatgttggtctcccttagatggttctgtggatacattgttgctcaagctgggctggtggtaggtattggtctcccttagaccactctgtggataacattgttgtccatttggtttgtttcactgggaagtatcaaacctaaaattgcagtggctacgcctttaattccagcacttgggaggcagaggcaggcgaatctcttagttcaaggccagcctggtctacagtgtgagttccagcacagctagggctatacagagaaaccctgtctcaaacaacaacaacaaacaacaaaacaaaacaaaataaaacctaaaattacatgttaaaggctcttcatgtgactgatgtgtccttatctgttggctgttttccagtttaactgcagcttgcggcagctgaggagtcccagtggcttccaggaccagctcgatggaaatgctaccttcaacatggagctgtataacacagacctctttctggtgccctccccaggggtcttctctgtggcagagaatgagcatgtatatgttgaggtgaggttggtgtgttatcctcgggtgtctggcccactaccctacgcagcagtgccctggcggctagtgccctatgcaggtcatgtgacattagcatgagcacctggcacaggtctcaccttgtttactttgacatctaagtaacagtttggctcagaaaaggcttccaggtcattttctaactaaaaaagattttatgaattatgctaaatggatgtagtggtttttagtaaatgtcaaaaagaaaataatgagcaaagtgtgaactgtatcagtaaagagtggtgcttgttctgacatcaacactttggggatagttgtttagccatatccatggactcttctaaaacaccttacatattatcttggacttccaagttaaaaggtgtgctctcctgaaaatcacttctgccaagtcattttcttaatagacgcatgaatttgtcaaaataattttccacctggaatggtggtcttcgtgcatagcttaaacctagaatgcctatgaaaataatagacagtggtggtaataatgaaataacaacagctaacatttattaccattttaccatgcagtggatctgtcatgactataatcacaatgaactgacttgctagagggactctgtaaaaatggattaattaagatccaacttttgtatgagaaaatcagacacaaggcggtccaacatgacacctgtgcctggtatattacttccttctggggtcctttctctagagtctgtgctgttgacagccaggtgctgctgttgtcattgccaccccctctcaaattgccacttgaaagagaataagacataacttcatgtctaagttctcagactccattctggaaaagacaaacctatgtttcaggttgtttgctgcccgtgtgccctgagcatcatctgtagggtgacaaaactggtctgctggtctcactgtaaggcatcatgactgctttgcacctcacagggggagagtgagaagggatagaaatggcagactcccagaagtgaaaatcaccacagagcacctatgtctgttttgcaaagacagtgcgccatgtgcattggcactgggttggagtggagccaggcagccctccctgttttcttcagtcatatcagtcagtccctctgcactcagctccctgttgttagcgccctggaggaagccatgttttgtgtgtgctattcctaagcctgcatctctcctgatccaagcttcctattttcttctgccttttccatattcacagtccacaagggtcttagtcagcaactcccactgatgagaggacactgcttaactgcattttgctgttttttagacagatgcctacatctgctctttggtggctttatgatttatgctagccagtggctaatctgcctgtgtgccccaccctaaatattttcatttcttttttcacccctggaatgctggcttactccatgaagccagtagattccctctcctcccttccatttttttgtttgtttttttttctttttgttcttgatttcttttttacattatttcatatcgcacatgtttttgtagttaaatttgattttaaaagtagaccaatttttttttttcttactgctatcttaaatatcaagttaagaaagatctggggctgggtgagttgttataaactattttaaacttgattgaaactaccaaaaataagaaaaagaatctgtaaatgttttgttaaataggataccagttgaccatgccttgtctttctttcctggtttggactctgctgctggtaggaaaattttttacttaagtaaaataaaacttcataaatcttggcttaacctgaagagccatttcttggtttattctccagctgccctctgtagcttttcctggaaccttccgttccctctggatcacagttccttccattaatccatgatcttctcccctttgcccctattctcgggtcactcctgggtgatggccggtgatatgatgacagctttcttttcagttcctttggcttagtgatgagcatctagagccagtcatgggagttcctactgctgaacctgagctgtttgcatgcaccttgatttcagtgtttcttacaccaactgtatcttttacactcattacggccatcatcctctaggagagagcactgcatccctggtatgcacaggagcagcagagcatgtgacttccttggtctggtcccattctaaagccaacactcttcctactgttcacttcaagtccactctacagcaagacttgctaatattttcctcctcaaaagcacccataaggaaatctagacagcggttctcaaccttcctaatctgcagccctttactacagtgcctcatgttgtggttaccccaaccataaaattatttcattgctatttcacaacttaattttgccactattatgaatcataaagcaaatgcctgatatgcaggatatctgatatgtaacccctataaaaaagggtcattcaaccccccaaagggtgtgcaacccaccggttaagagtcactgatctagacagccattctgtattgcatgtctttgaaagtaagacaagaatcaacatatgtgtgcactgtaagcttagtttatggtaaatggcactttttatttgcagcatgtatataatttaccaccttaacaggatagaacatcttgttcagcagaaataactcaaggatagtgaaagtgattatttacagagggtcgaacaagatggcaacattgtaattacctccaccttctgctcatgctcatgcgaataccccatagttaccaatgtgggatcttttgcgagcactatgaattaaaagttcctgcaatgtcaggagattctcctgggaagactccaaatgctaagtttattatctctctatcttttaaagcatttaggggctcttggtggatgggtaaggactaactttatttctaaagtgtctacgtttattgtttatgtttagcttagtcaaggaaagaggcatcggagttggaagagtagtccacatagcaagtcgtgccaccaaacagtggagccagttttgttccagggttttttagcagagttcaggatagctaaggtttgagttgtgcttacatttggctaagcactacttcttgtttctgaacaaaggaaccttagtgagatctggacatgatgcacagaagtgatttgtaaaaaggaagaataaatgacttggaaatgtgtctaggttagttttccatgaagcaacctcccccccacctacctcctccgcaaggctaggttggtcctatgaacagctgggacactttgccaggttggtgatagccactaaatcacactgtccctgatataagaaaccagaggcctgcttactgaccaagcaggatacatctgtggctttctgctcttctaagttcactctgctttcttgcacagtcatcctaggtcacatggattctcctctgtcctgaactatttggcagcatttaaaaattgagccttggtaataatctactatcgtgatattaggggctttatctgtgttttgcttattttgaaaaatccacttaggtgcaaggtttgcttttattttcctttatctctaaggacttgtggaagctcagagaaactctccccatcttgcaacttgtagggtagcatttgaattaagcaatttgctgtcattatgtcaagtttaaatggacggtacctttcatcaatcggtgtatgttactattagagttaggaagttctagatgttattaaatagaacgatgtctcatccaaagaactgtggcaggatattgtccgagtgactaatgtaaaataagaagccagcccatttctgacctgacctttatgctcctctgcaggtgtctgtcactaaggctgaccaagatctgggatttgccatccaaacctgctttatctctccatactcaaacccagacagaatgtctgattacaccatcatcgagaacatctgtccgaaggatgactctgtgaagttctacagctccaagagagtgcacttccccatcccacatgctgaagtggacaagaagcggttcagctttgtgttcaagtccgtgttcaacacctccctgctcttcctgcactgcgagctgacgctgtgctctaggaagaagggctcccagaagctgccaaaggtgcgtgggctctcatctgtccggactgtgattcgggcatgtctgggtaaagaggttgaggttttagttctgaggttctgaagacttccgtttgaagcatcagtgtgagcagggagccgtgtgctttagttagggttttggagaacaaattctgaaagtttgtctttccatgtgtgctgaattgtgccttatgagtgatcaatcaggactgtttttcaccaagggagaggcctggatctggctctgttggtcagataagcacgccgtgccagaaggacagccaactgaaaggacaagaccagtgtgaggattaatttttccaggtcccatggagaccgggattgcggttgtttttgtgaccttctctgtgtgagtgatggggttgctcctctcaggaggacgtgtaggggaaattagtaaatattttacttttgccggtttcttatcagttcatcttgtgtgcctcctgccattgcccatattaaacggctatgttctgttgccataacagaaatcagacccctttgacctcgctggagccaccgcaggggttctgtcaggcctgcctgtgtgggacaggtttctcctgctgtcacttcatttctgtggcctgagataattacatataatgtcctccagtgtgtttgttcagtagctgttatacacagtctaagctggagtcttctcttctcatcgtgggtccgctgatgtctgggaagcacagaatcaagctgtagcatttatatgtatggcgtcctcacattcagggaccggaagaaaaagcaggagtgaacatcactactgttaaatagatttctattgacctgaattccttgactcatttccctgagcagttactgatttgagcgctgtctacaaataaacgcacaccagatcacccatcaccaggaaacacttgcaaaggcccagactctgcttcttctggagccactgctgggcagaagagcaaaggagacaggagatacatgtagtaggcaggtagcgagagaaccattaatgcttccttctgctgaaaggcagaatttccctatctctagtaactcccaaagtacttctgtgacaatagaaaaggcccaagaaccttctaggaaaaggtgtcgatgatctccaaatctagctgctctttgctgtgaattacgtgtctggccgaggatcagactccaagttagcattatatgttcttatttaactagagggctatccagagagcaagaggaaaatacagtcgtgaaatgaactgcatatcttttcaacaacgtgccttgacacagaaaatacagatatagttttcctctacaagaaaactcttttcagggagtttcctccctctgttcgttttggggtaatgatagggctggaatgtcttcttgtgtgtggcccagaggtgatggctcctgtctagatttctgattagtttcaggacttaaaatatctagaaactgctggtctcagcttacacacctaggcgtcactccctccctaggacctaagttaagcacagtcaaccccaggctaagccatggatatggtgaactgataaaatattcactgagcatgtgtgagggactggattaaatctctagcaccaagaataaaaaataagccaaatcaaaataacaaaaagggaaagaaatgctgtgggaagcctaatgttgtagagtgaaaaaaaaatatccaacaaccatgacagtgtgcgtggttatattagaaatataaatcctatcattgtataacactttaagtgcagttccccacagctacagatcatgggtgttatcacaaaccacttatacaaagccactatggtacagagccaaaaaaccactcctgcagttctccaattgacagactaattcagaaatatctagctcttttgtggccaaggggcaaggaagatgtttgtaagctgtccattggtagttgcatcttccagtgtagctgaaaatacactgggcctgtcgtgatagctccctggttatttaaggttctttgaaaagcacaccgatggcctgtttttcccatggttcatagccgtgagctgtctgataaggggccagaggacaatcgtctgcaggcctggggagggtacttctttctgagccatgactgccttgctctgcctctccacagtgtgtgactcctgacgacgcctgcacctctctagatgccaccatgatctggaccatgatgcagaataagaagacattcaccaagcccctggccgtggtcctccaagtagattataaaggtaagcatggtggcctatggcgtgtcttgtaaagattccctagaacatacatggtgaggaagatgaataactcctgcaagcttcctctgaccttcactagcacgctgtgacacttgcatggtatgacacatatacactttcccaagttgtcctctgacatccatccacacgtgttctgtggcacacacacacatacacacacacactttatagtgaacaaataaatgtaaaaaaaaaaaaattaagctaagttaaacgccagttggtagctttagaaaagaattctttgccccaagagattttccttagctgattctgtccctgtggctactttgtaacttatttacagattgtttattccttagagaatagctcaagggaccagagaaagggcttagtggaggagtctaggtagcatgcagaagattctaatggccactaaagtatcaggtcaaggtaaaggttggctctgccctgttactctccgctacactcagatgtgcttctgtgagtccatggcgtgctggggcctgcacactattcacagtccagctttccacactcatgattctactggctccaagctgccatacccttgagaggggctgtgacctgtgagcattgtccatttagggatactggcagaaagaaagttgacatttataaatgacttttcagaaccttgtacaagagcaaatgctggtcctccttacacctccggtttctgtccctttatgtataagaacacccaccatgctgtgccgaatagaagaggaggtgaaatgtgtggtgtgagcaccctaaggaaaggtgggggcagacctctagcagggaaccctgaggactgcggggaggataccacagcaccaggggcaggagtatgctacaatgtatcaggcagctgtcaacagctttggggtgggaccaaacgcagcagggaagatctgagtagttacaatcttccctgtctggaagcagcctgtcactctccagatgccttgctgtctaagggtgtcaagctgagaaaaggctggcagggtgagaggggatgtcaggcctccagggtaaggtatttcaggattagaatcacagaccatgtcattccatcctgaagggcagagaattgccgagcaagagccagtgaggagctcggtcccagctgctaggcattagaagggagccatgctgactggtactgacaccagatctggggtttagggcacccctaggatggcactttagggctggggtttgacaggattaagcagtgggcggttctggagcaggcatgagctaccagaaaagaggcaggtgggtgctgccagtttctcaaatgcgattgggcctttgtcaaaagagctgtgcctttccgtgtgcacattcctacagaaaggcagggagcatggggtaggactggctcacagccttgaagttgaggactctcctcttgctccctccatacccaactggctgtgacaaaaacctcacaaaccctctttctcatgttcttgtctggaaagggagcattagaacagggggcgtggaggtcagctgacctgtaaggaggagccgatttccagttcatttccgccatcctaaacgcagaacgttcatctcagatgcttatggcttttgtcctgagtgtggtttcttttactttattggttggtttctaaaaggtctggtggtctctctctaactgggctgcccagatactgctgccattttgttgcatgtaggggaaaggaatgtgagtaaattaactgtattgcaaagaactcatagttggtcaacagctagctgtgttttgtgctataaaagccattaacagcagcagccacatgttccctgtccctgtccctgtcccttacctattttgagagcactcattcagatggtaattgaacacagcaactggctgtgccctgtgccagacagtacttaggccttaatattacaacactataacttccagcaattctttcattcttttttgttaaactctggtggtatttttctaagtaatttctcttgtaaagtaggtaattacttttattcaaactcagagccattatactgaacactcagtgttttctttacataaaactctaagaggaaaggtacttttttaaaccaaatatcaaagcaatttcatgagactcgctagttgaggtgagattttagttggagaagcaagtgggtgaaccgtttattgctcaggtttgtgaaacaaattgagaagttgaacttgagcttcccaaggggctgtgtgcaaatccgtcttccttggcaggaacaggtaggttttctgctgattctcatctttatgatgatcccctcaccctgtatgattagtttcttgggctctgaaatcatttctgttccatgtagagcactgaaacctgtttcagctacacagggcattggaataacactgggaaaaggcaggagatcactggcccaatagtcctggcttatttaaaataacaacagctaatgctctttctgagagtgggccatcaggggggacctgtgggttccccagctgctttactgacctgatgctattcctgttgatgtccttgccacagagccgactatccctgcccctttgctccatctttctttactgcagttgcatttttatggaccatagatacaggcaacgtgtcaaccaccactgccgagaacagggacgtctttcaggcagtgtttcttcctcaatgggcagggcaagtggccatcaaagctacatgaataatagtaggtttttattggaaccttcgtgaaggtatcacctttggtctttaagtcctttgggatcagtgttggctgatcatcttgctacttaaaccttcagcaataggtgaagatgcttagactattaatggtggtgagggtcccacattgaatttgttttgtgctaaatgcatagggtgttacagaatttaattcttgcagcagctctgtagagagcctctctatcaaacttggacacacacctgcatatagcagaccaggattcaaacccattcttttgattttacatcttttgcaaaccttcacgtgtaatctaattcctatttttaataaaacaaacatacatctgctggtactatggggagtcacctcctcatctccaccccttccccctccactcccccatcccctcctacctccacccctcnnnnnnnnnnnnnnnnnnnnnnnnnnnnnnnnnnnnnnnnnnnnnnnnnnnnnnnnnnnnnnnnnnnnnnnnnnnnnnnnnnnnnnnnnnnnnnnnnnnnnnnnnnnnnnnnnnnnnnnnnnnnnnnnnnnnnnnnnnnnnnnnnnnnnnnnnnnnnnnnnnnnnnnnnnnnnnnnnnnnnnnnnnnnnnnnnnnnnnnnnnnnnnnnnnnnnnnnnnnnnnnnnnncatccccatgttatcaatgtagcacccgagtattctaatgagtagcagctaaatagtagatgaaaaaaattaggggtcgaaaaccccacatgatagggttaaaatgctagagtgtgtttaaaagtgcaaacccagacactctgtgactttataacttaaacacacacaaaagcagaagatacaaatagctgatgcgtattatggtttctggcaaaacaattaaaatagctgagccgctgccggtttgccatcactgctgggacatgaaagcatgttggcaggcttcccaatttgccacgatttatacccggtttttaattcttagcaaattaaacttttgaaatgttggatcttctccacattggaaaataaaagcacctgcatatcacgggctgtcagtaaatgcggagttcctgctttgctttctgccaaaccagggctctttcaggggaggagagggttttggaaagcagaggtctgtgagttggaaattgatctaaaagaggcgtgactttatggaacacttttggatttttccagaaccaaaaatactcaaaaaaaaaaaaaaagtttgtcctcaggttaagggcaagatgaggagaggaacagggaaggggcgctcaggagctggcagagccaggactcatccatctctcttcacggagggagcaggggagagaactcagcttatgccagcctcttcacattttgaaaactgctctttggaagattttaaatgtatacaaaaatggaatgtcccgccccctccccaggaacacaccacttccagctttagcaactactcatggtgaatcttgtttgacgacttcccatggcccatttcatctgtcagtcatccaagagatacctctgaaatttaagaaacatcaaaagatcttgagaagaaggctgggtatggtagcatacatctctaatctcagcacctgggaggcagaagcagacagatttctgtgagttcaaggccagccagggctacataggaaggccctgtttcagaagaggaaataagatgttgaggagagctccagtacttcgatcacttaggaactcggctctgcaagccgtgtaaatgttacgctgcgagaaagaatctggtaatagaacatgaaatgatactttgggttgtttattataaaaacatgtttactgggttcctactaagcctgtaaggtctttctagcacagtgtttctcactctgaatagcatcctccccaggctggataactcgttcaggcgcactgtagaatatttagcatcatccttcatttctacccagtagatgcccgtgcccacccccaaccaggtcgtgacaacccagtaggattctagaagtctccaagtttcaaaagagcctcccaatcccccatctccactccccacccctcacccctactcccattgtcaagtggcagagtgcagataaggtgacagaccactgccagggactccatagatactgaaaagtgcccagaggaagggtcagaatcagggaggtaaggttggtaaaaatactcttgaacaactgcacaaagtctcctcctccctggctcccctctgccagatgccagcagatgtgtgtgtgtgtgtgtgtgtgtgtgtgtgtgtgtgtgtgtgtgtgccagtttgatgctttgtttctttgtgggccttttagggcttccagtgtttagaagaactgaattaaaacgggaggccaaaagccgtgtcagttactcatgcataacccaccccaggctcgcgcattcacgaaagccctgcccaacagccggaggggggaagttttggttctagaggtaaaccaaaagttgttcagagtatatgaaaagatttgctccagaatgttgattatagtgtattctttctgcaaagaaatctactgttaaaattatctttacagcaatatctaggattcctttttaacagtcttttcccctaagcccaaagtcaatattgttacggccgacgctattttagttatactcaggggttatggggaacaagaactgttagaggataaaccctggagcctctgccctgctgtgtaggcttgtctctgcacagatagtcaagaagggacttgactcaaggaaatgaggcaggggtgtttctgtttagctctctgggagagccccctgtttggggcaaagggagagtattagatcacaccctaagtccattaagaacttttaaacaataccatccatcaggaaggccttgtcataaaacctaaatgcttacatgtgaggtctcccccggggagaatcattcttttcaaaccacttggggattctgagtgagaaagtttaaccgcaggcggaagactccatggagctcttcccagaagtgagtgtgcacacacttcttgcgtgatgcacactgctgagaccgccaaatgcctttgcgcttacttcagtgaatcaaactgctaattcctgaaagtaggtgggttttgtggttagatgcttccacttcatggagttcttacggtggaggtaaaaggagcaggatttttgtttactttatcgtactgcacaaatctataaatgttagagtgagtgttgttcgtgctgccacgaagctgatacccaggcaagtgctctaccaagtgtgctacacccccagccagaaagtgcatcgctctaaagaatgtattttattattttatatgtgggggtgtcttgcctttgtgtgtatttgtgtgccactcacctgtctgatgggctcagaggccagaagagagcatctgacccccgaaattaaagttaccaataattgtaagccactatgtgggtgctgggtatcacacccaggtcctctagaacagccagtgctcttaaccactgagtcatccctccagcccctcctaaatgcattttatagttggtacaacgagtgcaagttctgtatactgaattgtattattttccccctaaggcagtgttctagtttcatgtcttgtgcagtgataaaatatccaaacaacaacaaaaaggccacatagaagaggggagtcgtttatttagtttgtggttctagcttacagtctattccttggaagaaatcaaagcaggaacttcaagaatctagtctcaccataccaggggccaagagtagaaagaaacctctgcgcacacacttgctccatctctcttgtgcaaatttaagacccttgtctaggaataacacctcccatactggaccgagtcttcccacatcaattaatttaagatagtcctcccctcccccagacatgcttccacacctccatgtggacagcccctcagtacaactctcctccgaggtatttctgccttgtgtcacatgagcaatcaaacaccacagagtctcactatgcagcccaaactgatccaaagccaccgtgtatccaacctgtcccttaacgaacagtaatcctgcttccgccttccagggattggggttataggacgatacactatgcctggccctctgaattgattttttttaaagcgctttaattttcttggtaattgtatcaaaatgtagcacaaacgtttcctcatcgggggccaccatgatcctcactttaagggatccatacagttattgatcatttaggaattggacttggtccaactgagcttgttagccccgagaacaagcaacgatctcttttcccgatgtcaaccttattatttgtttttaatttaataaggccagcttgcataattttggtctaaactccacaaattcttttttgtcggagttgttttgctatgaatgaaaagtgtgtctttattgaatgaaggagctgaaacggagagacactgagcacagaccatgtttaaactctgaagagaaaggtggagcctgaaccacaggttcttcaccctttttctaggaaaggcagagagataatacatttggtttgggacatatccagcccttgcctcaagtgctcagatcatagggcactgtgcttatggaacaaacttgaatttcatgtaattttcacctcatgcaatattcttcttcttttgctttctttaaataaatcatttcaaattgcaatttcccatcccaggccacagtgtcggcaccctggtttaagcccatctcactgtggagagcaacaagccctgtgtaacagcagttactaagtaacagtagttactaaggcaggacttccccagctgagggcaaggacttgcactcctctgtagcctggaggcaagagtcagaaattgtggctcagcccttggccctgatgcttcccagctgtgatcttgggcaggtcacaggatatcagagtctcagaccacactcatttgtaaagtagtaattgcaaattctttctctgcctgcctcaacagggtttagcatcatataaaacctctcggatctgtggccttctacgactgcgaagctacagaattattgacgcacctaaactttttgtcatcttatttcttgtttccaccattttccaaaagggtgtcagcattttaagcacctgtcaccaggcacctctagaagtccaagtcccagcttctcctgaaggctggacaaaaagaaacgctgggaacctccacactgcctggcactctagcgtgttaggatgcagcccatgtaacaggaaagggggatgagcaatgtggagagaccagggccagcacagcaggaattagtttataagtgtaattgaatgagcctgtgcaaaccttaaagaaggaggagccaccagcgtcaggacctgggaaaggagaggagatactatgtttcattggaagcagaccgcacttgtttttctatgtatacaaaggagagtccctgggggtctcgggagttcactgtgaggggacccagtaggagaaaacatttggaatatgctgagaagagaatgaatctggtaacaccaatagcgaagccaaacctaaccgtgtggttaagtagagaagttacaacagcagtagatggtggtggtggttgtttttatgagacagggtctcactatgtggtactggctgtcctgaaaccctggtctctatgtagaccaggcttagcctcgaacacacctgcctctacctcctgagtgctaggattaaagacacctgccgctatgcccagctgaaagctgtaaattattaagagaatgtttaaaagcgggaacagtgttgtgactgtattggagatgcacggtttttgtcggtattgaacccttgtatagataatgagatgaatacatgcgcgcagtcagactcagagcccttagattcgggtgcctttggctttccttctctgtaatctctcattagcaaactacagtgcctaacttttctgagatggacttttgatatgtaaagaggaatactggtagcggtttcacaaagtatttattaagatggggctggagagatggcgcagcagttaagagagctgggtgcccttctagagaaccagaggttagcacccagcacccaagtcaggtggcccacaacttataattctagctccagggaatccaatactagcctccagtagcacccccataggattacacacacacacacaaacaaatagaaaaacgtctgctctgctgagcccgatgatcccttacgtcagtggaatgcattgtgacttatgcttttgtttcagaaaatgttccaaacatgaaggagtccagtccggttcctcctcctccacgtaagtctttatgcaactatttccaggcaaagcctctggccttttctaagaatgtgctggttcgggaagaagtcgtgccaagctgagctgataaggagtactgggcagtcctgcccacttcctcttcctttcctctcatgcgttccttttcccttcccctgtccttccttcacccccctcccttcctattcctgcggtctctaccttcgctgcatgaaaaccttaatttgctgacccactgacacatgtagccagagtgggaaggctacagcctcactttaccaagttaattatttgtgggttttttgttttttccctgtcatccaatctggagtgtttgcttcaaattctgcctgtggtggttacctgctgagaggaactcagcaccacacattcaagactatttttaggtcaagggatggagagagctagggagagtaagagcataccggtgttcagcaccattggtacagggcaatgagttgggagtcatgtaggtggttatcattttgtatattattgaagtgagtttccatggttatcattggcacagaagcaggactccaccttggcgtcttgccatccacccagagttctagatgatatgtccctgtgaggatagtctgtattgttttcttcctggagactcccaggacttgttcccattgctgaccgcaagacatacatagtattcttttctttaactttcttttttttttcttttctttatttttttaatttttattttttggtttgttgtttttttgtttttttttcaagacagggtttctctgtgtggccctggctatcctggaactcactctgtagaccaggctggcctcaaactcagagattcgcccatctctgtctcaagagtgctttatacaaatcactctttatagtacttttatagaaagccctttttatgttcttctaagtgacttatttccaggagattatggaataatggagaaccacaaactcagtaacagacccactgggcttattttcataagtgacatctctgtctttggaatttcaggatgtttttactaaaagacttaggagcacgctatctttgcatttgtaggcataaccctaaccctgatggttcagcacctctttgtatctgtcccatggactagattaagcttcgtggcctgaagggttgacctgccattgtaacttccaccaggctcttcctggtttctcgttctgtgttccttcccaggactgcctctctgtcagactgactcatcttgtgtcacctcctgcctctggtgggtggagacaccctccttattccagaatgtaaatgaacacaccagcaggcatgtagctggaagagcttgggtccttcgggacgccttccatagggcaatactaaacaaaagccttcgaatggctttgggtactcaggggccacctttgcctatggctgaatcttttgtgttggtatgagttcaaaagcgcagaggtttcatttctagagctttccgttagggttgcttctgaatggagtaaaagaagaaattgtgacacggagaaaacttgtaccttcaatttaaaaaaattacacacacactaacgtgtctgtgtgtgtatgtgtgtgtatatattaagacagacttttatcttaccaaacacttctttacaaactagtcctaactcaaagatacttagtcttgaatgaaagaaaatatccaatttctgagagctgaagtcaatttcaaacaaacaaaaaaaaaaaaccaactttgccaagtagaggaacaattagttcttttacatgttttgctgactgtaaaactgacgtggcacccacgagaagtaattttcttcacagaaagagcagagttggaaaggcgtcaaagagcaggttgtttagagcgaggctgctcatgaggattaaggctggggcttactgtgaactctgaggtgtgttctaatgcacaagaataattcattctgttctgttctcttcccctctcatctttctgactctataagtgttctcaaaaacacttcagagtccgctaaggctacggtgagcctcattgcttacaaccacccaaggaagaagcaacaaggctgattttgatagtgggaagtttacttttttttaaaagatggggtctcactgtgtagcttcggttggcctggagctcactgtatagacggggctggtcgtgaactcatcttgatctgcctgctctgtatcccgagtgccgggactaaggccgtgcactcctggttctttaccgtctaaagtattgtaacttgtgacttttcacgttaccgaggttctcagaccacagatttaaagtatcacggcatttataaatcttattttttaaaatgacattttggggggctggggaggtggctcagtgattaagagcacttgttgctcttgcagatgaccccagttgggtcccgagcaccctcacggtggcccgtacccatgcagaaccccagttctaagataggagattcaaggggcacacccatggtccgtggagattcaaggggcacacccatggtccacttaagtgtatgcaggcaaaagaatcatacaaacaaagtaaattaaataagctggaaattttttatttaaaaaatcactttgctcagaataaattgcaaacagaatatgtaaaagcccaatcaatccatcttttcctttgtcagcagatttgccagtaacaaaatatagagtttactgtaattattatctctgatcttactgtgaccgtgcttgggaagtgagaatgaagctgaagtgtgaaacagacagcttgacatcatgtatgtatctcttcccctcttctagagattttccacggcctggacacgctcaccgtgatgggcattgcgtttgcagcatttgtgatcggagcactcctgacgggggccttgtggtatatctactcccacacaggttagtgactactcactggaaactagggtgcatctgggccacacagggcacccgccacacaatagacaccagagtttttgttggacaggtgatataataagcaaaaggaagagaatatccattttcactattcttatatttatgtattttgtgttttaggtcacgtaaaaatgtaacttggtctaagtgatgcctagagaaaaaaaaatgtttaccctgcttttgttagttgcagttacagtgctggtgatattcagcttctaagacagtctaatcttgtcatagaacctaaaggagtctgggtagcatgacgaactggaactagaaaccttcgctccaaaatgaaaggccgtggaataagctgctgtgatgaaggagaccagttgctcatgaccacagctgccagggcattggataatgcccgcccttgtcctgtcctcagtcagggactccaaaccacgacctcctggcctttaactcatgacatctttcataaacaaaattctcccattttacaaagtttatatttcaaaatatatttttatgactaaaaaaaatataaaaagtgaaacaaaaaaagttaaaggtgtgctctcccacctcaccttcctgttttgatgttcttttggtgaatacagagttgccccaataatcctggcttcgacccccaaagccctaagatacagttagccatcagccttccctgaactttacataagttctgggagattctatagcccagccatcatgcttgggcagcaggcgctcatccccagctcccatgttttctgctggttgctagacagagcctcaaactcttgagaaaagtacgtgacaccagcatgcttgctagctaaaggttctgactctcttttcacttcaaatgctacacctcgtaacagttttttagatcggggcacaaacagcagcagaccttctacaccaggcctaggaagtcttctaccttgtgaaagccaacgtagtagcaaaagcttaagagagtttgataatggagctctaagtcctcaagagtcattgttcccaaccagcaactccagtgaaatgtgtttcgtgtcagagagaacgaaggcctaagtggggtggttctgagcgtcatataaatgcctatgagtcatttgaagaagttttcctcatgcaaaagttcagaaaagaacccgaagggacagcttttagcagagtagaattttggagtacttttatcacagcaatactgacatgtttagatctcaaactaatagttctttgcaactttttccagcctcctgcatggaggaggttctagggcacttggcggcctacattgtctcctgggaataaacttgaaagtactccaggaagactgtagccctgaggattttatgtggggctggtcactcgcagatgttttccatgtgtgtactcagccactggctggcttgggtcttagaaccaatcctgaaacccacatggtccgtcttgggctaggaagccaggccaggcataatagagggttaccaaatgatactcactgtggaagcaaggccccactgagatccctctgggaaccccagatttgtccaaagccaagcatcaagctgatagaggacaaagcctgggtgttgtgtcctgctcctcactgaagtcggaggtggttgtacctcaccctctgtcatccaaacaaaagccccagagggaagctgaaagtaccgttaatacaaaaataaagtttgcacacagcttagagacaagcaaaaggcccttccagcacacagtttgtgtttgtgccgactcagaaaccaaaagacctatggatgctgtcgtttggcttaggctcttgacgttgctcatgattctgctccaaagtggctcttcagtcaaagttgtggcccccagctaatcttaggcacagctacaattaatcttagtaccaaataaacacaaagagggctcagtccagagcccagttagtctctgacgtggatcaaccagcagaaagtttagatgaacagggatggtcagaatgctgtggccagcaagcagagccgggcatccaaacaccgactcagtcctttaatttccacaataagctaactgtggaactcagaccttatatggtatatttgggggttcaggctgctctgcctctgtgtcgggaacaaccctttgtttggatgactccctctgctcacgttctccagcctttccacagcacaccccaagtcacagatttgaatcttgacacatgttcctggaataacttttagtctgaaaagatagggttcccactctgtcttattgcaactccgggtacaatgagataactgcctttgggctctattaattctgtttggagatccctattttaaaaccctgtctcactgtgaacagaggagagatggttgggggtaggtgtggttctggtccaaggtttctgtgacacaggtcccagagtcacaggtgtgttgacatctgtagtttcctggagcataagagctctgtgtttgctttgtagaaaaacctttttagcctcatcaataaagtgcgtgagagtgtgacacctgaacgaggtactgggacagccagacccacccccannnnnnnnnnnnnnnnnnnnnnnnnnnnnnnnnnnnnnnnnnnnnnnnnnnnnnnnnnnnnnnnnnnnnnnnnnnnnnnnnnnnnnnnnnnnnnnnnnnnnnnnnnnnnnnnnnnnnnnnnnnnnnnnnnnnnnnnnnnnnnnnnnnnnnnnnnnnnnnnnnnnnnnnnnnnnnnnnnnnnnnnnnnnnnnnnnnnnnnnnnnnnnnnnncacacacacacatacacacatacacatacacaccacacacatacacacacatacacacacacacacatatatatacatctctaagtaacacaagtatacggctgcctctttttgcttgggatcctctctgttaacatcctactgcagaaaacaactgtttatctctgctttacctaggtgtcccaattatccatttcccttcttagcccctagcagggtggttctcagccttcctgatgctgtgaccctttactacagctcctcatgctgtggtgacccccagccttaaaattattttcgttgctacttcataactgcaattttactactgttacaaatcatagtgtaaatatctgatatgcagggtatctggcctgcaaccctgggacagggtcattcgacccacaggttgagaactgctactgccctggtagaaccacaccgaaatcttagttggatacacattgtcttagttagagttttactgctgtgaacaaacaccatgaccaaggcaggtcttataaaaaacaacatttaattggggctggcttacaggttcagaggttcagtccattatcatcaaggtgggagcatggcagtatccaggcaggcatggtgtaggaggagctaagagttctacgtcttcatccaaaggctgctagtggaagactgacttccaggcaactagggtgaggattttatactcacacccacagtgacacacccattccaaccaggtcacacctattccaacaaggccacaccttcagatggtgccactccctagtccaaggatatacaaaccatcacacatattcactgtttctgcagtgatgaccacacacacacacacacacacacacacacacacacacgcgcgcgcgcgcgccgatcacaatttagccattcagtatgatagctctattacctctcccccaagtgtttaggtttttccaaagataagcagcatttctctgtatcccatctcccactagcttagttttctaggcatttatcgtcagtttgtctactgactgccagctgttatgacctcctctctcacacacacacacacacacacacacacacaccaatgccatccattttctttcacaagagtacttcacagagcccaggtacggctcccagcatctatgcccagcagctactcacacgcataggctcactctcctcctccactcttaaaaataaaacgatttttaagccagctggacctgtccaacttgtccccctgcaaactgtctcttttgcctccagtctggagttttccagcgcttttctttgggtcagggatgccttaggccatgcatcccacgccttccttcttcttggtttaaaggggacatgggagatacatgttccctttatgccatgagtctgaaatatccccgctttataaaaacacttgcttgacaaacatggtatcctctgttaggttataaacgatcccttggagttttgaaagtgcccctcgtgtttttctctggctcaaggcttgctgctgagggtttgaggctgcttagatttatctttctaattctctctacctgtgacctgtctttcctttctggaatcatctttataataataacagcccttgatttaggggcattttcatattttgtgctgggaattaattgggctttcagcctaaaaaacccatccattgttccttccgtccctctttcttaattggtgtgtgtgtgtggtgtgtatgtgtatgtgtgtatgtgtgtgtgtgtatgtgtgtatgtggtgtatatatatgtgtgtgtgtgtatgtgtgtgtatgtgnnnnnnnnnnnnnnnnnnnntgtgtggtgtgtgtgtgtggtgtgtgtgtgtgtgtagggtgatatagagtatctcagcacagcctatgttggctttgaactcactatgtggtccaaactggcctcaaacttgtggtcttcctgtcttagactcctaagtgctaaggtgacaggcatgtgtcagtcagtttttcttttctctgtcctttctcacccctgtttcctgtattctctcactatatgaattatttgaaagatgaacctaaccagccctctgcttcgtctctttcagttacctagaatcctgccttgattttttttaattctaagaactataattttcctttcctttgtttgtttgtttgtttttaaaagttctcctctccccttgtgcctgggttatctatctgaaaataatacaggagtagttatgaatgtggaggctgtggccatgcaaaattccgtagggtgtgttgaggggctgttttatggatggatgagttccagggtcacccctgcatctttcctctgagctcatcggatttttcctgaaacagaccttcctgtttcctacctgcacagtataggtcttgcctaaaaaaaaaaaaaaaaaaaaaagagtattaataaaaagtgctgacatagcaacatgggaaaagaaatactcaaacttccagggcagggcacagtactgacacttttcctacttttcctgagtgtggataatcaaatacgtgtcatgttccagaggaaacaaacatgtgggctgtcatgagaagaccgaggccactctgcttcagtaggtgtgaggctgagctcgtcatcagctaagcccaagtgtgtcatacctcctcagcagcaccttgaactcagctgtggtgtcttggactgagcgtttctagtaccctcaaggtcaccctcttcaaagaatgcatgacctctttttcctggataatgacaggcaggttccagtcttgcaagggacagaggaaactcaggggagccatattgcttctagtgcagcagtgggatctactccactagagtatgaagaccctaggcacctcctctttcttcgttgtctggcgtctgagtcgcctacgcctttgaaccctctatgacaggtttatacctttatactttatatattgaggcagggtctcttccttgcacgcagagctcacagattcatctagtccagatagccagcctgcagcctgctccagggtccatttacaaacaggttccctgatggattctcttgcacggaaccaaagtcagaaagagtaatagggtaataggttagtgtgactgtccacctcagggcacgccccgctattttgagtatgggcactctctctagcgctctctctctctctctctctctccctctctctctctctctctctctcccccccctccctccctccctctctgcctctctctctgtctctctttttctctgtgtctgtctgtctgtgtgtgtgtgtgtgtgtgtgtgtgtgtgtgtgtgtgtgtgtgtctctctgtgtctctgtctctctctctccagggttttacattagcaagacaagagcttccaagactctgaaagttatgagagctttttctaatgggcattaaaatcgctgacacagcaaagagacacttcccaggaagcaaatctccagacttcctgggcaggacacactgttgacatttttcctgagctttgactcatcaagcattgtcctgttctggaagagataaacatgagcgtgctgccccggaggagcagggccgtcctgcctcatccactagacccagagctcacaaggccagcagagcccaaagggatgggaggaacctccctttagaccagtgtgccagtgacttaaaaggggagaggttgttctttttagtgaggctcagagataaaggatttaactcagagtatttacctagccaagtccaaggcctctagctctggataaacaaacaaacaaataagcaagcttatgtatggccaccatagccttctaatgggctacaggaggattcaactgagaatgaattaacatgtgaatggtaaagtggtgtgtgtgtgtgtgtgtgtgtgtgtgtgtgtgtgtatgtatgtgtgtgtgagtgtgtgtccaagaggagttgggggaggggtgagtatgatcaaaaattgcctgaaattctcagagttaataaaaaatattctaaaatatcatcatatgaaaaagnnnnnnnnnnnnnnnnnnnntggtgtgtgtgtgtgtgtgtgtatgtgtgtgtgtgtgtatgtatgtgtgtgtgtgtgtgtgtgtgtgtgtgtgtgtatgtatgtgtgtgtgtgtgtgtgtgtgtgtgtttatgtatgtatgtatgtgtgtgtgtgtgtgtgtgtacatcagaatagttagttaagggctggaaatatatgggaatataaactcaggtagggcctatcatatccaaggccctgggttcaaacacagaagggacaggggaggtaaacagagggagagggggaaggaagaaaaaagactggattattttctagaaatgatctcccatttatgagtcagtgaatttttggcaggatgttacttctcccccgtggttacatacacatttgaagggggcggtgctgaggaagatccaaaatcctgcaggggagaagacactgtgacttgcctgctccttgggaatactgatgtcttcctttctccccctccaatcccagaagaaaaaataattagagccagccaaatgcatgcaatggccccaggtgctctgaggtgcatgcagaagcccgcggagctgtgtcagggaaagctgaaacctgacccggggagccggagccggtgctgccttttgcagaactgcatttggcagagatctttgaggggccccaggaaggcagtggaagtataggcctctggttcctgagctggttcagaggtcagagcctgtgctagctgctgcagtgttgtgttttaatgaagcagaagggagggttgcttatctctggctgatagatgtgtatttcagtatgacaggaaagagagggcctaactcataaacagacctggcctgctgggggcttcccacgtcggtgggggtgcggacagctaagggggcattggggcagcagctcccacctctctcctctacctagagtctttttttttttttaaaggccagtttcacagaagggactagctaaccatagggcctctcacacagttaaatgcaaaccatgtgtgacccgagctttcctcactctccagagcattgcacacttggcacaaagagcgggtggagctgtaatgcagcggggtgtgtaatgacaagtggggcatttaatgtgtcaggagatgctcacactgaactcaacagagagcctcaaatgcaaagaggtgctttgctggcaaccagtgcaggtcccatgtgtttgagttctttgccccaaagggttttcccttggcagtgaccccagccccctctcctctcagccccctcagcccccttcctagtagtacttctctggtgggtttcatgctgggcatacaaagctgttttgctgtggccagggcaagctctcaaagtcactagcggggcggggcggggcgggggtggggtggggttggtgtttaacaaggcattgaatgcaaaagggatggtgatatgtggctcatgcccagcctgtgcaaagtcctacgtctcatccctagcacaaataaaacaattataggcatacttagaacattgttatgttgatttgtgattaactttacaacttggtcttgaactcggtcatgaacttgtgagatggttatgcagtttcacggtgtcagaagaatcactcctagctagcagatactggtgatgctttgagagttgtaggctctagaatccagagaaattgtcacgagccaccagagatcctagccacaactggccatacagaagacactcttattggcttataaaaacaataacaaaccaaaaaaaacaaaaaaaccaaccaaccaaaacaaaaccttaaagcacaaggccttcctgggctagctgctcctgcctctaattgagaaaaacatcaggtaaaatgttaaagaaaagggtgtccatgtgggggacacattcctcctcagattccattatatgacatgtctttcttaactgcaggggagacggcacgaaggcagcaagtccctacctcgccaccagcctcggagaacagcagcgcagcccacagcatagggagcactcagagcactccctgctctagcagcagcacggcctaggtggacagatggacgccgctgcctaggtggacagacggatgcctgccaccgccggggcagggccagatgccgatgctgggtgtccagactcagaaggcttgatctgggttccctgtaaagagagagtgaatttcagtatacagacagcctgctctacccaccccttccttaccacggcccacgtaaatgtgaccctggacatctgtcacacgaaagctaagctggtggccttccccgccagcccctcgcaggatgggggtttcaatgtgaaacatatgccagtttttgttctttttttttttttttatgctgctttgtccaggtgtccaaacatccatcatttggggtcgtatgttttaaagagtaaaggagacggtgaagggatgtcagctagagtgtagagccagggagagacagccagggattctcgcctagctgaaccaagatgtaaaataggagaaatgctccctccatagccaatctgcatctcgctctggatgcccactcctgacctgccacgccctacatggtcccctgtgtagcttgctagccttgggggcctgtcacttgccaaagtaacattcctctcttgggccaaaatgaatgctgactcctgatactccgcacaagcacaccaactccaaaagtgccttaaagccaggtttgtgtctcctttcaggagagagcgtgtaacgtcagatttgtgcctgtctcgaacattctgtcctaatcatacttaaacatcaggcaggtggggttcagtggtaagcgaagggattattagcaaggtaatgcctgtgtatggtcatataggcacaaatgcagaacacccagcacattggagagacgaccacttcctcctttaaaatgtcctatgcttccagagtcggaacctgagttatatgtggtagattatattgactccaaccatcagcctttctgatgagcctgtagagaagcctagagagccccgggccatctgatgatgtcaccagtgctgcctcagatgatacagagacagggagtttcaggtgaacttcttcagcagaataaggtgatgccactctgacctttgctgagctcagtgactcttcagtgttaaaactgaaccccagaggggattctccatgccagatccgctgcaaattaaataataccaattttctagagtccctccctcctcccccctcccctgccaaccaacttaagattccataagtagaacaagctagatcctaacctgaaatagccatgagcaaagcccactgcctttacagtcaggcagttgtgcccagaccttcatgaatgaaaacgtcaacgttgaagcgttgctgatggaagcagcgtgtgaagggatacggacaatctctcagtcgatgagccctcgtctgactgaccagagtggcccagcttctattcaattgggaaaatttgaaccaaagcagatttcttcagggctgagggtctccaaccgatgcatagatacattgaaatactttagatttcccacatggatggtttgagactagagaaatacttttctctagttcgttggtttttaacatgaaggtgtctttggggaggacctggatcatgctaccctgtgtttaaaaataatgcgctttgcctaaccttcagccgaatgtaactgataagtatattctatgtataaaaaaatgtttaaagatgtcttcaaggaagactagagtctttaaatcacttatagctatattttactacaaaaattctgtataaagatatatttaaatattttagagaaatttaagttactccttatgaaatgtttaatttcagttactgtgaattcttctaatcagttcgttctttgattttaaaaagaaaaaccttttccatcatattaaagagaaaattagctatgggaagatattaaaagatttcttagatggatgtggttaaaatttttgtaatatatttaaatgtatatttttgagagagatactacattgccaaggactttataaataatcttaaattaacttacaaatttataagatgcaaaccaaaagacttttttttttttaaagagagagagaaaagagaaaaaagcttttatttccttggatctcattatcagaaatattattcagctcaagaaatctgaccccatattggaaaatgaatgtcctttagtattcctgaagctaaagcttgggtgtctcctcccagctcttgttacagtgtttctgactgcttcacccttcacagatttaatacaatgtataagccttactttcataacatattctacaagtttccttaagactgttgttatagtctggctgaacccatttccacctgcaaagtcttgtgttgtgtctgcaggccacagcagtggccacaggggccattttgtcttgttgatgctgaaaccatgctggactgccccagtctaaggcaggactgtctgtgcaaggcactacagctattcacgtggtgttaccgctgcattttcaaaggtcggagatctttcttctgcctgagttggtcatgtagcaattttttcctaaacacaaaatggccttttgcttgtctggtaatgagattgtaaatccatttcctgcgtgtgttctccgcaggcttgcctgagtgtgtggggtgcgcaggcgcgtgcctgtctttttgtactgtaactacctcatggtttgaatgatgagcgtactgctggttgtattaacagagcacatttgtcgggtgagtcgtgtatacaaacttttttttttatcctgtttgttttatctgggggttcgttcattaaactgacagatatttttctaggaaggactattatcagtttccaaatgcaatactctattctggtttttcctgagtgagcctgattttgttcctgtttttcatctacgagggtaaaagcataccccgggaaatccctgtggccagtttgaacacccctgctgtaaccttccctctgttccatggtctttgtgaacctgcttagaggtatagttttgataaccacagttttaattcttttatctgtgcataataaagatatgtatcaattattaatttatgtcatatctggtcatcactaaaccctccccttggtctgacacagctttgatggcacctgctggaacagggcagatgaggatgaagagaaaggaggggaaagaacaaggacccaagagagcagagaggaagggagggggcagggatgccaggctgtgcccagaattcactccatggcctttgagagtcaaagggagaagtcatgtgcatttagactccacccctttcatctccccaaatgtcaatgcaacttccaccgtgcactgtccctgtctgccactagttccttctggttgcccaaggcagaaagtagaatatggttggagtctccttgactccacaccccggtttacaaagcccaggtttcattcattattgacaatatcattttcaaatgatgagtttattccttctacctgagagccttcttggctttaatttttcactacacagcaaaactcctaaacacatgcaaaccatgtcactgcaccacttgagccttttaagcaatttctgtttgcctcactttcttcctagacccacagaagttaccaaagtagagcagctgccatagaagataaatctgcagtcgctttctcgggtcctccagtcacgtccctggaggacctggtatccatgatcttagttcaaactcaaagtcattgatatgttttcataaatagggattttgtggtgttgaatagaaacaacacaacaaagccgacaactagtcatgtggtacagcacagtcccaccccaccccaccccaataatagcaacttcttgtacttggtggctatacactattccctgtagtgaattaagcctcacttcagataatggatttcgaagtattattgtcacagtgctaacaaaacactctgctgtagttaacattttttttgtgtgtgtatgtttatatatgaataaaattgatattatttccccatatgtgcacacacacacatacacacacacacacacttacaacctggtgctttaaaacaaagactgaaagacaattttatcattacaagaggagattttgacctatgacatgtggaaactgatcaagtaaaagggtttggtttggagagcaagctgtgggttcacacccataattccagcactcaggagacagatggaaggactaagttctgagtcagcctgggctgtatgataaatttcaggcaagcctgggctaccaaaaaggttctgtctcaaaaacaaattaaaagaaaaaaatggatgtgagaatctgaatgatgcagttgagcttgatcagctgggttcacgaaagaccgtttccaggctggagaaggctcaacagatgagatagcgctaggaattctgccccatagtgggactctcagcaaatatcatagaattcaatcatgtcgatttaacataatgccaggttaggaatcgatctgatttgattggatacccaatacatttctaaatttcaaggcactacacaatggttaagggttaaagaacttgtgatggcaaatgggaggtatttagagtggaaaacttaggagaatccatggaaacatgctgctgaagaagcactgtgtgtagttacaatgtttcaaattcggaaaacacaacgttgcaagtctcatgcactgtggaactgctgaaggcagaagttcctcacaatgaacacaggcattaggcaggaaacagcgcacactatagaaacgtaacgaaagtggttgccatgaaccactctatcctctcgaagcaaaaaactcagtcacggtgggtgacatgacagggtcagtgtggtcctggtggataaacagacttggtcaggtgggttttaggcaagtgaggacatgaatggttggctgaggttaatcggtgaggaagatgagctgggtatattggaacgtgaggctgtgagatggtttagtgggcagacacccactgccaaggctgataacctgagctcaagccccaggctccagatagtagaaggagagaaccaggtcctgcaagctgccctccaaccttcacacaatgcacattataaatcaaaagtgatagaaatgaattaacagaagctaaaaatacaatattaattactaaaagtaaaatgcacaaacaaataaaaaagttgaaaaaccaagaagacagggagagggctcagtggttaatagcatgggttaatagacctcttgcagaatgtctgtgctcagttccaacacccacatgacaactcacaaccatctataacgccagtttcaactgacattccctgcttctggcctctataaacaccaagagtgcatgtggtacacaaacattcctgtatatcatcaaacactcatatgcaaaaaaataagtaaatctaaaaaagcattcttttcagtagtaaacacacagatgaaaacagatgggaagactaaattctgagatggcaagcctgggctatatgataaatttcaggcaagcctgggctaccaggaaggtagtagtagtaacacagagatgaaaacactgctgagcccatgtagttttacaggtaaaattttctgaaaggtaaaatttccaaatggtttctggtttctggaatggtgggccaaagagaatgcatttttaaaattaaactgagcatggcagtacactgtaacctcggcccttggcaaaacaaggaagaaagatccatccagtcatatggcgctgcagagcaatttcaaggccatgcaaccctgcttgaaaaatgaagaaaagatgtattgccacattactctctctgaaggccatgtgtgagcatgcccagcccctggctcctctatcagccctgggcatgttgacagcattcaagctctgggagtcagatgcatggattagatcttggccctaccacttgttggataagccatcccttaacttaaaattttttttaaaaaaatatacttttcaacatttctgtgaatattaaatgagataatctacatgaagttcttgaggtagaataatagcttaataaaagcatctcctgccatcaccagagttacatgctgtgtgagctttggcaacataatgggtgcagctttatctcattattgagattatttgcactaatggtgagttctaaactattttataatggccttttccagatcattctgtacatttctaatttctctgcctgtttttttttctttttcatatgatgatattttagaatattttttattaactctgagaatttcaggcaatttttgatcatactcacccctcccccaactcctcttggaaatctagtctattaatttctgagaatttcataggtatgatgtgttttaatcagactcagcctctcactgctcccgctgacctagtctcctagttctacactagctccctccctccctcgctatgtttaatagccgactgtcagcctaccaaggatcacatctttaaaggagacccactctttcttgttgagcagccatctgctaaccatctgcaccgcctctgctggggggagggggggtctgtccatttttctaatgagtagtttggtttcttttgtttttgtttttaaccttcattgggaaagatttgtgtcacatgtatgaccagtgttttctttcataccattatctttctcttctattcatgataaacatatcacccggatcattgcttgtcactttaggtagttggcttcatccatctttttcttgtatccattggcttcttgtccctcctgggattctgtgactctagacacaccttaacacctgtcatttttgctcttaaggtttggatgcatgcttaacccatacatgtatgatatgaaggaaggctcacatgcttaacccatacatgtatgatatgaaggaaggctcacatgcttaagccatgcatgtgtgatatgaaggaaggcacacatgcttaagccatatgtgtgtgatatgaaggaaggctctagttttgtttcttccagatcagaattcaattctactgggaggtttaaagttcatccatttcctattgtattaaatttttaaaaaaatgatgaggggctggagatgtagctaagtggtagactcttgtctagcatgcttataaggccatgggtttaatcatactgaagaaaaaggggggtggggtgggatgtggagattgcccagcattaagcgatagatttggtgtgaaatcatagctaggcagtaccgggaaacacttagaacagtaggaggcccacctaagagttaataacaacaggccatcgttttcattaagttcctcactgatcccatgttccaaaggaaaatgtaactcttagcactatgggttctctgatttttctcgagaacaaatctgtctttcccctctctgtcattgtaaaaatcttgagaaaaggttttctggtcagtaataaaaagcagaccaatgtcagatctatcaacatgcaaccctgcgctctctctctctctctctctctctctctctctctctctctctctgtctctccctcactctctctctctctctgtctctccctcactctctctctctctctcctgttccacacattttacaagtcaaagtcatttgtggtgtgttgtttcttccagctgctgcctatgaatgctataataattctataaaatgaagaaatattaacaaacgtcatttctgagaaaaatgctggcatctttttcttgtttcctagcgagccaagctcatacatcgctctttcctaagttaatgtgttcaaaagcatgcaagcaacttgattaatttttacagatgtcattaatagtctgaggtttgagttttggcatttttcttcctttgtctctaactttccatctcagcttttttttttcttccagagaaaatgaacgctgtgcttcatgtagatttgatttccacactaaagtaaaggtcacatgatgtcacccctcctcctcagaaggccacagcctgaactgattttttaatgatttttctcctcttgttgcctctgagaattcattaaaaagaaaaacaaactcaaaagtggaatcccaggattgtaattttgtttctttctgctgtacccaaataacccaaaacgaagcagcttatggggtctgctgggcctgagtctgaggggacagaatccatcagagaggacaaggcatggcagcagcagctctgcgggtgcaggagtgagcatccgggtggggctctcaccccctagcatcttggcagagcaggaagcagagagcacacaggaagtgtggctgggcaaggcccagcttccagggacgcacgtcctctggagaggccccattgtctaaggttgcacagcacttcatgcagcactgcccaatggggaccaagtgttcagacacacaagcatctgtgccacaccacctaccgtcttagctcgagaagaagtgaaggctgggaatgagtgtaggaggatcaacctccaggtaccctcggtcacaaaccagagatgcagacagatctagagtcctgcagagtgcaacttgttgggggacctaatcatggaagtgtggtcctgtgtatccagatgagcatatttatgggttaggaaaaaactgaattcaccctgcctgggatatacctggactaggatgatactaaagttacatacatccaatagtaaagacccacatatatttctaaccatttgatctgtttttcatttgctaggatagtatgcaggaaaaacaacaacaacaaccagggttacttagggatatcatgatagttatggttttagatgtatgtaaatacatcaagcactatccatacaatctccactccttaatcgacccttacaatgtcatagcctccttgaaccctccttgaacatatcctcagcctgccaagggattgagcatcgtgtagacaggaagactgttttcccagcatgcacacataatccacagcaacagtcaaggcaagagctcaaaacaaaagtcatgcaaacaataactactaacttttacccagagccccaagaacaaagctcagccacctcctgtatgaggcacatgaggcacaagcgtgggtttcccaacagtgcagtctccagggacaatagaaaaaacaagagtaatgctgtgattagaaaaccaaacacaggtcggggcaaatgtgctcacccaaacggcatcgtctctgctggaggacacagcggcagtgccaggggctggcgcagtggagcaagcatccatgctggctggtatgatggagtctgttgtagttggactataaaaatgcccccctacagatttgtatgtttgagtatgtgacctcagctggtggcattttttggagaagttgtggaacctttgagatgtgacctaattatcaggagtggattaactgagggcaggacttgaagggttcatctggctctggccctatctctgcttcctggttattcagactgtaactgtcagttcctatatgatggtcccaccactctggacacccagttgtcatgtcttcctagctgtgatggtttgtattccctgagccatgagccagaacaagtccttcctcccttaaatgctttctttcaggtagtctgtcatcagaagtgtcaccaatacacagacatatcaggtgcagggccatgccttgttgtacttgtaacatcctgaaacagtatcatcattaccagttagcatgatgtcacctacacgatgcagccagatggtagcagtaggaaacatggaacaccttggctgctaagtgaagcaagcctgattttgttagtctagtttcaaaagatttctgatgctggcattcagagaagcatgcccagagccaaggaaacatgtgacttttttttttcagcacagggtcaatagtacactctgcatagtcaggaggcatggccttattttagcttcctatagtccatccatccacgcactcgttcatcagggtggaatacatgtgtacaggtccagcctgtgcaaagctgaacagtcctcttaggggggagtgaggaaggctataggaaagatagaaaagagatgcaagagacagatgtgggagggctgcaggtcattaccacatcagcactgagtgtgtttctcatatgccttttatactgcagtactatggaaagcaaaaccacaagctaacagaaacaatttgctaaaatatacgcagaagacatttgtttccatccaaaagcctccctattccttccatcaaggtcaatagaatcttcagcctcttgccttgagcctcaagtgcacctctcctatccttcgatgtcccagcaggctgggaaatctgccaacaaaccctgacctgctttgactgcccagcaggcagagagagagattcatattctctctttctctcccccccccccccccccccgcttcagagaagcggcaaacagctcccgacacgcatggatacagcttgatataactacagccatattgagtggtagttattacccctgaacaaccctgcttttctagaaaactaggtaaaaccagtagactcatattaagagcctgaatctaaggatgtacctaattctttgttattatcttaagataaaccagataaatttcagccaggatgaagtcacttatgtaccaaatcacaaatattccccattcctgatccaaattgaagagatagcctcacacatatgcacagaaggccacagcagttgcatggctatcttgtttgtttcctttctcttcagcatcacgattttgtctaaaatctgaaaacgattaattcacctttactcctaccccaccccacccccaatttaagaattattcataacagggagacctgtttattccacaatggaaagaaatggaagttgtctctttgatcatataaaatgcatttactcctaaactaaatggctatgaatactatatattttcccttaagatgattcgtgacattcagagaatctttaaaatacaactaaaccattatactaattaggttgattcctggcttaactcattaggccacggtgtatgcagagtaaggagtaaccacccacgggacagatccagtgactctggcgctgagcatctaatgaatacagcttgctttctttcctgtttggggagatgcttgaagccacactctattttaaactggtttggtaaacttgcaaccaaaagaaaggattcctgtggtgactcaaagcaaaggctccttttgtgaaatgaataaacacttcctaatctttctgtaaataaagattttcaaacatttggttggcttgccgtattcggtgagaaatctgtttgccaaggctaagtgtgggtgtggatgtggatgtggacggtgtttgggaaatgaataagaaagaatggctttacccagaccttatcctaaaccctgctggtctgggtagaagccaggtggttttgaatgagatgataagtaacaagcatgagataagaaatcagtacgtgtgcacacagaaacatacatgtgcacacacatagacacgcacacagacacaggctcacacatgtgcacacacatacacacaggcacacacatacacacacagagatatacatgtgtacatacccaggcacacacacagacacaggcacacacagagacacacatgtacacatagataaagacacacatgtgcacagagagacacatgtgcatacacagagacacacatgtgcacacatagaaacacacatgtgcacacatgcaaagacacacatgcatacatgcagagacagacacaaacacacacacatagacacacatgtattcacacataaatacacaggcacacacagagacacacacgtgctcaaacacagacactcacacacacacagacacagatgcactgacacagatgcagacacatataggcacacacacacacacacacatgcacgtgcgcgtgcacatttaccaatttatatgctagtttcaggtcacctgtctgctatgaaaaaatttgtatactcatttatttatgatgcagcaactacttattccgtgtacactgtgtgtcaggtgctgctgtggttagcttacaggcgggtccactaggctccacccaaagataaataggtttcagatggaactctttactattcctttatctacagaactcactttacagtggccgttcccaaagatcagccacctgcatctcattcatggtaaataattaggaataaggcgtaaagtttaagatctgggggtgtgaaagcttaagttgaggatctaagacaatgtcttaaagtctaagaaggtgttttaaggctggtaagtttaagattttaaatttcctctggttgtcttttaagtatagacctaagggtgtttttcatgatcagtttatatacagccagtcttctggatgggggaagacactccttcagcctgtgctcacactggaaaccagatccagggagcttttgtccctcctgctccgtggacggcttctgtctgctgagctcaccctaaagagcatttgtgctcttaacataaaacaaaaaacaaaaatgtttaccaaccctctactatgacacaaatacgtatatcttgtgcctttttctacagtgtggatttcagtacagaccacagtggtaatgcaaacctgctgaacatttctctcttttttggattcacctcctatgggtcgaatggactccagataatgcccctgccaatcaacagcctaactttaactcctattgctactagagagggtggggttcctctgccactccctggttgggggactctcctcccagcaactaccaaaaccatggaaataaaatctccaaatataaacctaaaaaaaataatttccctaaccttcttaactttatcttctttgtgtgtgtgtgtgtgtgtgtgtgggtgtgtattccagtatcctgccaagaccaggtgtctccttgagatctccatccaggaaggctccagagtggctacccacaggtgtctggtctagcctc

SEQ ID NO: 964 - DNA, 6093 bp, Mus musculus
ggcaggaggaggagtttctaggcggccgagcccccgaggcccgcggtgcccttcccccctttcgctgattgctgtggctgcgcgcccgaccccgcccgcgcgtgtgcgcggccgagttagggcgccgcacgggcctgatgggggtgatccaggctttcggggacgccgagcgccactttcctcctccctggcagtgagagagagagagaggtggagagggagaagcgggctgctgtccttccaggccactttcgctgcgcgattccgcgagctcccggcaggaggtgaaagtccccggcggggtccggatggcgcagttgaactgcggctgctgagctcgcggccgcctgcgcgcgctgggcgcggggactcgtctgggctactcccccacctcgcgttggacgaccggtcctggacacaccgcttgcgaggcaagttgaacattgcagagaaggatcttaaggctacacccgacttgccacacttgccatccagctgaagaaccaaaggctgttggagagatggcagtgacatcccaccacatggtccctgtgtttgtcctgatgagcgcctgcctggccaccgcaggtccagagcccagcacccggtgtgaactgtcaccgatcagtgcctctcatccagtccaggccctgatggagagcttcaccgttctgtctggctgtgccagcagaggcaccactgggctgccaagggaggttcacatcctaaacctccgcagtacagaccaaggactaggccagccgcagagagaggttaccctgcatctgaaccccattgcctccgtgcacactcaccacaagcctgttgtgttcctgctcaactccccacagcccctggtgtggcatgtgaagacagagagactggctgctggtgtccccagactcttcctggtttcggagggttctgtggtccagttttcatcaggaaacttctccttgacagcagaaacagaggaaaggagtttccctcaagaaaatgagcatctgctacactgggcccaaaaggaatatggagcagtgacttcattcaccgaacttaagatagcaagaaatatctatattaaagtgggagaagatcaagtgttccctcccacgtgtaacatagggaaaaattttctctcgctcaattaccttgcggagtaccttcaacccaaagccgccgaaggttgtgtcctggccagtcagccccacgagaaggaagtgcatatcattgagttaatctcccccaactccaatccttacagcaccttccaggtggatataataattgacatacgacctgctcgagaggatcctgaggtggtcaaaaacctcgtcctgatcttgaagtgcaaaaaatctgtcaactgggtgatcaagtcttttgacgtcaagggaaacttgaaagttattgctcctgacagtattggctttggaaaagagagtgaacgatccatgacagtgaccaaattggtaagaaatgacatcccttccacccaagagaatctgatgaagtgggcattggacaatggctacagcccagtgacgtcatacaccatagctcctgtggccaatagatttcatcttcggcttgagaacaacgaggagatgagagatgaggaagtccacaccattcctcctgagcttcggatcctgctgggccctgaccacctgcctgccctggacagcccatccttccaaggggaaatcccaaatggaggtttccccttcccattcccggatatccccaggagaggctggaaggagggagaagataggatcccccggccaaaggaacccatcattcccagagttcaattgcttccagaccacagagagccagaagaagtgcaagggggcgtgaatatcgccctgtcagtcaaatgtgacaatgaaaagatggtggtagctgtagacaaagattctttccagaccaatggctactcggggatggagctcaccctgttggatccttcctgcaaagccaagatgaatggtacccactttgtactggagtctccgctgaatggctgtggtactagacataggaggtcagccccagatggtgtggtttactataactctattgtggtgcaggctccatcccctggggatagcagtggctggccagacggctacgaagatttggagtcgggtgataatggatttcctggagacacagatgaaggagaaactgcccccctgagccgtgctggagtggtagtgtttaactgcagcttgcggcagctgaggagtcccagtggcttccaggaccagctcgatggaaatgctaccttcaacatggagctgtataacacagacctctttctggtgccctccccaggggtcttctctgtggcagagaatgagcatgtatatgttgaggtgtctgtcactaaggctgaccaagatctgggatttgccatccaaacctgctttatctctccatactcaaacccagacagaatgtctgattacaccatcatcgagaacatctgtccgaaggatgactctgtgaagttctacagctccaagagagtgcacttccccatcccacatgctgaagtggacaagaagcggttcagctttgtgttcaagtccgtgttcaacacctccctgctcttcctgcactgcgagctgacgctgtgctctaggaagaagggctcccagaagctgccaaagtgtgtgactcctgacgacgcctgcacctctctagatgccaccatgatctggaccatgatgcagaataagaagacattcaccaagcccctggccgtggtcctccaagtagattataaagagattttccacggcctggacacgctcaccgtgatgggcattgcgtttgcagcatttgtgatcggagcactcctgacgggggccttgtggtatatctactcccacacaggggagacggcacgaaggcagcaagtccctacctcgccaccagcctcggagaacagcagcgcagcccacagcatagggagcactcagagcactccctgctctagcagcagcacggcctaggtggacagatggacgccgctgcctaggtggacagacggatgcctgccaccgccggggcagggccagatgccgatgctgggtgtccagactcagaaggcttgatctgggttccctgtaaagagagagtgaatttcagtatacagacagcctgctctacccaccccttccttaccacggcccacgtaaatgtgaccctggacatctgtcacacgaaagctaagctggtggccttccccgccagcccctcgcaggatgggggtttcaatgtgaaacatatgccagtttttgttctttttttttttttttatgctgctttgtccaggtgtccaaacatccatcatttggggtcgtatgttttaaagagtaaaggagacggtgaagggatgtcagctagagtgtagagccagggagagacagccagggattctcgcctagctgaaccaagatgtaaaataggagaaatgctccctccatagccaatctgcatctcgctctggatgcccactcctgacctgccacgccctacatggtcccctgtgtagcttgctagccttgggggcctgtcacttgccaaagtaacattcctctcttgggccaaaatgaatgctgactcctgatactccgcacaagcacaccaactccaaaagtgccttaaagccaggtttgtgtctcctttcaggagagagcgtgtaacgtcagatttgtgcctgtctcgaacattctgtcctaatcatacttaaacatcaggcaggtggggttcagtggtaagcgaagggattattagcaaggtaatgcctgtgtatggtcatataggcacaaatgcagaacacccagcacattggagagacgaccacttcctcctttaaaatgtcctatgcttccagagtcggaacctgagttatatgtggtagattatattgactccaaccatcagcctttctgatgagcctgtagagaagcctagagagccccgggccatctgatgatgtcaccagtgctgcctcagatgatacagagacagggagtttcaggtgaacttcttcagcagaataaggtgatgccactctgacctttgctgagctcagtgactcttcagtgttaaaactgaaccccagaggggattctccatgccagatccgctgcaaattaaataataccaattttctagagtccctccctcctcccccctcccctgccaaccaacttaagattccataagtagaacaagctagatcctaacctgaaatagccatgagcaaagcccactgcctttacagtcaggcagttgtgcccagaccttcatgaatgaaaacgtcaacgttgaagcgttgctgatggaagcagcgtgtgaagggatacggacaatctctcagtcgatgagccctcgtctgactgaccagagtggcccagcttctattcaattgggaaaatttgaaccaaagcagatttcttcagggctgagggtctccaaccgatgcatagatacattgaaatactttagatttcccacatggatggtttgagactagagaaatacttttctctagttcgttggtttttaacatgaaggtgtctttggggaggacctggatcatgctaccctgtgtttaaaaataatgcgctttgcctaaccttcagccgaatgtaactgataagtatattctatgtataaaaaaatgtttaaagatgtcttcaaggaagactagagtctttaaatcacttatagctatattttactacaaaaattctgtataaagatatatttaaatattttagagaaatttaagttactccttatgaaatgtttaatttcagttactgtgaattcttctaatcagttcgttctttgattttaaaaagaaaaaccttttccatcatattaaagagaaaattagctatgggaagatattaaaagatttcttagatggatgtggttaaaatttttgtaatatatttaaatgtatatttttgagagagatactacattgccaaggactttataaataatcttaaattaacttacaaatttataagatgcaaaccaaaagacttttttttttttaaagagagagagaaaagagaaaaaagcttttatttccttggatctcattatcagaaatattattcagctcaagaaatctgaccccatattggaaaatgaatgtcctttagtattcctgaagctaaagcttgggtgtctcctcccagctcttgttacagtgtttctgactgcttcacccttcacagatttaatacaatgtataagccttactttcataacatattctacaagtttccttaagactgttgttatagtctggctgaacccatttccacctgcaaagtcttgtgttgtgtctgcaggccacagcagtggccacaggggccattttgtcttgttgatgctgaaaccatgctggactgccccagtctaaggcaggactgtctgtgcaaggcactacagctattcacgtggtgttaccgctgcattttcaaaggtcggagatctttcttctgcctgagttggtcatgtagcaattttttcctaaacacaaaatggccttttgcttgtctggtaatgagattgtaaatccatttcctgcgtgtgttctccgcaggcttgcctgagtgtgtggggtgcgcaggcgcgtgcctgtctttttgtactgtaactacctcatggtttgaatgatgagcgtactgctggttgtattaacagagcacatttgtcgggtgagtcgtgtatacaaacttttttttttatcctgtttgttttatctgggggttcgttcattaaactgacagatatttttctaggaaggactattatcagtttccaaatgcaatactctattctggtttttcctgagtgagcctgattttgttcctgtttttcatctacgagggtaaaagcataccccgggaaatccctgtggccagtttgaacacccctgctgtaaccttccctctgttccatggtctttgtgaacctgcttagaggtatagttttgataaccacagttttaattcttttatctgtgcataataaagatatgtatcaattatt

SEQ ID NO: 965 - protein, 857 aa, Mus musculus
TLQRRILRLHPTCHTCHPAEEPKAVGEMAVTSHHMVPVFVLMSACLATAGPEPSTRCELSPISASHPVQALMESFTVLSGCASRGTTGLPREVHILNLRSTDQGLGQPQREVTLHLNPIASVHTHHKPVVFLLNSPQPLVWHVKTERLAAGVPRLFLVSEGSVVQFSSGNFSLTAETEERSFPQENEHLLHWAQKEYGAVTSFTELKIARNIYIKVGEDQVFPPTCNIGKNFLSLNYLAEYLQPKAAEGCVLASQFKEVHIIELISPNSNPYSTFQVDIIIDIRPAREDPEVVKNLVLILKCKKSVNWVIKSFDVKGNLKVIAPDSIGFGKESSMTVTKLVRNDIPSTQENLMKWALDNGYSPVTSYTIAPVANRFHLRLENNEEMRDEEVHTIPPELRILLGPDHLPALDSPSFQGEIPNGGFPFPFPDIPRRGWKEGEDRIPRPKEPIIPRVQLLPDHREPEEVQGGVNIALSVKCDNEKMVVAVDKDSFQTNGYSGMELTLLDPSCKAKMNGTHFVLESPLNGCGTRHRRSAPDGVVYYNSIVVQAPSPGDSSGWPDGYEDLESGDNGFPGDTDEGETAPLSRAGVVVFNCSLRQLRSPSGFQDQLDGNATFNMELYNTDLFLVPSPGVFSVAENEHVYVEVSVTKADQDLGFAIQTCFISPYSNPDRMSDYTIIENICPKDDSVKFYSSKRVHFPIPHAEVDKKRFSFVFKSVFNTSLLFLHCELTLCSRKKGSQKLPKCVTPDDACTSLDATMIWTMMQNKKTFTKPLAVVLQVDYKEIFHGLDTLTVMGIAFAAFVIGALLTGALWYIYSHTGETARRQQVPTSPPASENSSAAHSIGSTQSTPCSSSSTA

SEQ ID NO: 966 - DNA, 243934 bp, Homo sapiens
  misc_feature (1)...(243934): n = A,T,C or G
ttcccctatgcctcaccctacatgtcttacgtgcctctttatctgtatcctttgtaatatccttcataataaacaggtacatgtaaaaaaaaaaaaagaaagaaaagaaaaaagaaaagaaaaatcgaatgatacagccacaaagaacacctagagccaccagaaagctgcaagaggcaagatttctccctgagagccccacaggtagagcagccctgctgacaccgtgctttcagacttctggtttccagaactgggagaaaacacattgcgattgtttacagcagccataggaaactaatacagggagggaggagtcccggatgcccccgaccctcatcccaggtttctgagtgtctgatattgtcatttactgagttagagaagtctgggtttctgggggttgggagatggagttctgatttggacacattacatttgaaatgcttgtaagatgtccaggcagagatgttgatcaatagctggatagagtagtctggaactcagaggaggatcaagtgggaaggtagaaattgggaactgtcaagcatacagatcacattctttttaaattttaattaattgatttttttttttagagacaaggtcttgctttgttgcccaggctggagtgcagtggtgagatcatagctcactgttgcctggaactcctgacctcccagctgggactacaggtgtgtgtcgcaaaccagctactttttcttttcttttttattttttagtttttttgagatggtgtttggctctgtcacccaggctggagtgcagtggcgcaatctcagctcactgcaacatccgcctcccgggtttaagcaattctctgcctcagcctcctgagtagctgggattataggcatccgccaccatgcccggctaattttttgtatttttcatagagatggggtttcaccatccaggctggtcttgaactcctgacctcgtgattcacccgcctcggcctcccaaagtgctggcattacaggcgtgagccactgtgcctggcctcattggctaacaaaaacatttttttttgtagagatggggtctcactatcttgcccaggctggtctcaaactcctgggctcaagcaaacctcttgcctcagcctctcaaagtgatgagattatagtgtgaaccattgtgcacgggcaattaaaaaaaatttttttagagactgggatcttgctatattgcccaggctggtcttgaactcctgaggtcaagtgatcctcctgcctcagcctcctaaaatgctgggagtatagctgtgagccaccatgcctagtccaaaatatttttttccgtttgttgactgatggctggccttccataattagagattcattcctttagatattcaaacataaacactctttgggagaaatcattcatatgctttttctttatatgtttgttagaatttgtttatcagacactttccttagagcaggttatgatgtagtgggtgatagagtgtgaaagagcgaaagttaggcaggctgagtagaaaaaggcaatcaagagaaactggaacccttaaagcctgaccatctctgctttacagttttgcatgggagggaaatggcagcctagagaaagattcctcaccactatgccattgcctgaaaacttttttttttgagacaaggtctggccctgtcacccaggctggagtgcatggcgtgatctcagctgactacaacctctgcctcccaggttcaaatgattctcatgcctcagcctcctgagtagctgagattacaggcacatgccaccacgcccggcaaatttttgtatttttagtggagacaggttttcgccatgttgcgcaggctggtctcaaattcctggccttgagcgatccacccatctcagcctcccaaagtgctgggattacaggcgtgagccaccgcgcccaaactgaaaactcatttatcaaacttttttcccatagatggaatctgagctgacacacccttctccagaatgaaaagaaatgtgaaagaaacacgctgacacacaggggacacctttacaatattatgagaggaaatctgctgcatggacttcacagcattttgttaagggctgttctgtagtttctgcattctccaatgggatggttacttttactagcctgtctatgttacctcctcttgtctccatggctaatatcatcagcctagcactagcctattgtgactctccggaactactacagcagccccctacatctggccagatcccctgcaaccctccacctacccccgaccttcctgctagctctgagagagagggagcatttttaagacgcaaatatgcttcccattcttcagtgctccttggacaaaaaaaccataaagctttgtttgatctaactattgtcctatatttccagctttatctctcccctccctctcccgtcccaatgcccatggggacttggctctctgagatccagctgcactgacattcattcagtgtttccagctccacaaacccttgctcagtctggaatgggttccccatcccttcattaggaaagcagtcctgacctctttccctccccaactgtatcaagtccccctattttgagatttctggcaccgtgtaccttttctgcctgattcttatgagagttgtaattatatgtatatatatttttagtgggattattttatcaatgtctcttccctatcagattttaatctccatgagagcaggtatctttttcttggtggcatccctcacatccagccgccctgggccagttacaggatctcattgtatgttggctgaatagatgaaataaatgaacatattttgccactaattgttaagttaccagatgaattgtaagagttctcaggatggctgacttctatgtggctctttagggcttgaaagtgattcataataatattgagtctgattttcctcctcctggggagattccaactctgagtaaaaggagataagttcttgcaggccccaggagaaatggtatcttttttgtgatagcaaccagcaggaagggtttctcttatgaatgaagggaaaactcaatgaaggacgatgtccaccttaacatagagagccactccctcacccccacgtacacacttttacaatgtgctctggttatttgaaaatgtgtttggcctccctgaaagaagaaagaagaggataactaaactcaatcactttaaatagaaaggaagacacaggggcgatgcttgataaaattaccaaaaaacattaatttaagaaaaaagtctacatacctcacatgtagttcaaattttttttttcaaatattaagtctccaaaacatggctctagtcttcagagtgaggaaaatatggtgtacatctgcacatttgctttctcatggcttgtgtttaattatccacaaagaaaaaaattcacaagatgtttcatgttcttctcttttaactgccaaagcaggaacttctgaggctttgatagaattggttgcaatccctttgaaagtttttattaatgtagacagagtatgtttttaatcttttgtattttgaacacccaaatttatgttctgtgatttgttcatgcttgattctatcatattttaagtaaacaaggagtcaacagtttttacccagcaaaatatattgggattttttaaaaatatagtgtaatgatgattaatgaacaaagtattaaatcagaggattcttcattgtgacagaaaggaagtcttgagacccagtgagagattgatatctccattgattttaatgtaaacatcagagacattccactgtgaacacatttctttccggagattttctttctggaaagaaatgtgttctggaaagagggagaaaagcataattacaaagaaaagcataattttctaggacaatgcatacaaatttagccataaggtaatcatttatatgataaacattaaatgagatttcataccttttttttgttgttgttgagacggagtctcaccgtgtcacccaggctggagtgcaatggtgccatctcagatcactgcaacctctacttcctgggttcatgaggttctcctgcctcagcctcccaagtatctgggattataggcgcccagctaaagagatttcacactctcttaaatccagaaaaataatgcatgtggtacaatatttccttctaggtattcttaaattcaatctgtgatgacaatttagagattaattttttttttctttgagacacagtcttgctttgtcaccaggctggagtgcagtggtacgatctcagctcactgcaacctccgcctcccgggttcaagccattctcctgcctcagcctcccgagtagctgggactacaggtgcgcaccaccatgcccagctaatttttgtatttttagtagagatggtttcaccatgttggccaggatggtctcgatctcttgacctcgtgatctacccacttcgggctcccaaagtgttgggattacaggtgtgagccaccacgcccagcctattttaatgttttaatggtgtgtgatctacttttcaaataagaaaagatgtagttaaatgttaattaagcattttacttctgtcttccagaatagaagctccctgaggctgagaatttttttttttttttgagacagtgtctcagttacccaggctggagtgcagtggcacgatcatggctcactgcagcctctgccgcctgtgctcaagtgatccttccacctcagcctctcgagtagctgtagttccagttactcaggagactgaggcaggaggattgcttgaagccaggagttcgaggccacagtgccctatgatcacacctgtgaatagccactgtactccagcctgggcaacacagctaggtgtgatggtttattcctgtaatccccacacattgagaggccaagaaaggaggatcacttgaagccaggagttcaagaagagcctgggaaatatagggagaccccacctctacaaaaaaatcaaaaattagccagtcgtagtggcacacacctgtagtcccagctactcagaaagctaaagtgggagaattgcttgagccagagaagttgaggctgcagtgatccatgattgtgccactgcactccagcctgggtgacagagtgagaccctgtctcaaaaataaataaataacggccgggcgcggtggcgcatgcctgtaatcccagcactttgggaggctaaggcaggcggatcacaaggtcaggagttcaagaccagcctgaccaacatggtgaaaccccatctctactaaaaatacaaaaattagccgggcatggaggcatgcgcatgtaagctaatcaggaggctgaggcaggagaatcgcttgaacccaggaggcagaggttgcagtgagccaagatggcaccatcgcactccagcctgggcgagagagcaagactctgtctcaaaaaaaaataataaaaataaaaaataaatacatatcttaattacattgactgaataaattgcccagcctgactttcatctttggttgtgtagatatcatccctaaaaggtaccctataaatgagatgcaacacttatactctaattagttaaattgggatggtatgggtaagagannnnnnnnnnnnnnnnnnnnnnnnnnnnnnnnnnnnnnnnnnnnnnnnnnnnnnnnnnnnnnnnnnnnnnnnnnnnnnnnnnnnnnnnnnnnnnnnnnnnnnnnnnnnnnnnnnnnnnnnnnnnnnnnnnnnnnnnnnnnnnnnnnnnnnnnnnnnnnnnnnnnnnnnnnnnnnnnnnnnnnnnnnnnnnnnnnnnnnnnnnnnnnnnnnnnnnnnnnnnnnnnnnnnnnnnnnnnnnnnnnnnnnnnnnnnnnnnnnnnnnnnnnnnnnnnnnnnnnnnnnnnnnnnnnnnnnnnnnnnnnnnnnnnnnnnnnnnnnnnnnnnnnnnnnnnnnnnnnnnnnnnnnnnnnnnnnnnnnnnnnnnnnnnnnnnnnnnnnnnnnnnnnnnnnnnnnnnnnnnnnnnnnnnnnnnnnnnnnnnnnnnnnnnnnnnnnnnnnnnnnnnnnnnnnnnnnnnnnnnnnnnnnnnnnnnnnnnnnnnnnnnnnnnnnnnnnnnnnnnnnnnnnnnnnnnnnnnnnnnnnnnnnnnnnnnnnnnnnnnnnnnnnnnnnnnnnnnnnnnnnnnnnnnnnnnnnnnnnnnnnnnnnnnnnnnnnnnnnnnnnnnnnnnnnnnnnnnnnnnnnnnnnnnnnnnnnnnnnnnnnnnnnnnnnnnnnnnnnnnnnnnnnnnnnnnnnnnnnnnnnnnnnnnnnnnnnnnnnnnnnnnnnnnnnnnnnnnnnnnnnnnnnnnnnnnnnnnnnnnnnnnnnnnnnnnnnnnnnnnnnnnnnnnnnnnnnntgatatctacacaaccaaagatgaaagtcaggctgggcaatttattcagcggccgagcgcggaggcgcatgcctgttatcccagcactttgggagtctgaggcgggcagatcacctgagtttgggagtttgagaccagcctgaccaacatggagaaacccagtctctaccaaaaattcaaaattagccaggcgtggtgacgcatccctgtaatctctgctacttgggaggctgacgcaggagaatcgcttgaacccgggaggcggaggttacggtgagccaagatcgtgccattgcactctagcctgggtaacaagagtgaaactccatctcaaaattaaagaaaaagaaaaagaaaaaagaaagttgtgtattatggggcttatataaatgtttcctttttttcctccctgatcatatactcatcctcactcctagatgtggaacataaccaagctgaaagatgagatcatgtttgtgaagcccagtgaaatctcaacaagaatcttctaatttgagaggcatcagtattctactcactcatatgccaaaatgctgaagaataaaatcaggagtttaaaaagtcattttcagcattgggattaaacaaagaacaccgaatttttcatttttgtatttttaaaatatttataataacttattttttcttgtaagcatgatgctgtttcacttagaaaaattgactcagccaacaatagtgatttgcaaatgcaaataatgccaatgtcttcctttttttctcagtattgttgaaattatttctatgttaactcttttgtttttattttgaagttggcaaatttttatatttatttatttattttttgagatagggtctcgctctgtcacccaggctggagtgcaggggctcaatctcagctcactgcaacctctgccttctgggttcaagtgattctcctgcctcaccctcccaagtagctgggattataggcatccgccaccatgcccagctagttttggtatttttagtagagacgaagtttcaccatattggccacgttggtctcgaactcctgacctcaagtgatatgcctgcttctgcctcccaaagtactgggattataggcatgagccaccacgctgggccaaaattggcaaaattttatgaagaactcttagaccactatttattaatttcctgatttgcttttttaatatgaagaaacatttttcctttgttactttttcatgtacttgtatatgattattatttattagtggtctgatttgctttttcaatatggaaagataattttccctttttttcatgtaattatgcacacactttattgcttaggatgcagaacatatgaggataactttttttttttggcagatgtttaccatatgtggagcttagttagcatagagaatactcatgagtcaagaatggcccaccccaatgcccctttgaaacatttgtatgtggtttcatgaaataaatacttttttttttggagaggtagtttcactcttattgcccaggctggagtgcaattgtgcgatcttggctcactgcaacctccacctcccaggttcaagcgattctcctgcctcagactcctgagtagctgggattacaggcaggtgccgccacacccaactaattttgtatttttagtagagatgggggtttctccatgttggttaggctggtctcaaactcctgacctcaggtgatccacccgtctcggcctcccaaagtgctgggattacagtgtgagccaccgcacctggcacaaatgtatattttaatagagtcaagatggccatgctgaagtctttgtttttgggtaatccaacccaaactatctgctgtgggcatctatttttttttttttttttgagacggagtctcactctgtcacccaggctggagtgcaatggcgtgatctaggctcactgcaacctccacctcctgggttcaagcgattctccagcctcagcctcctgagtagctgggactacaggcatgtgccatcatacccggctaattttgtatttttagtagagacggggtttcaccatgttggtcagactggtctcaaactcccgtcctcaggtgatctgcccacctcagcttcctaaagtgctgggattacaggtgtgaaccactgtgcccagccgggcatctattgttttttctgcacactctaccatacctcttaaaaaattttttaaaaatttttattgtttgtgggtacatagtaggtatatatatttatggcatacatgagatattttgatacaggcatgtagtgtgtaattatcacatcatggtaaatgtggtatccatcgcctcaagcatttatcctttgtgttacaaacaatccaattatactctgttttttaaaaaaatgtacaatgaaattattattgactttagtcatactgttgtgctattagatactagatattattcgttctaactggaataatatattttttaaacagtaaagaatgagatataaaagtgaaagagaaagagaaaggtactgtattcctgggtaaatatacatgctccctttgctttccctgtttcattgacagccatgcacacttacgtttatattcctcattatttgataatcttccccattagagaaataggaaaggctctagaacacatgaacacacttatacagcctttatgatatccaaatttatccattttacgccaaaaaaaaaaagtactttcagtagtgcctcccatgtatctttcaaaaggtacatagctctgggtgcacaaaaaaattaacacaattccctatacaaaagggactgctcagagctaataacagctaaagaagagaggacgccaattgcaggtacaggcacatctcttcgaaccctcccctaaaacaaatgaaggacagaagaaaacagaaaactggttaattcaattattactctgcggaaacttagggatagtgcaaataaagctctgaaattagactttactgagccctgcctcttgggcatcccccaagaagtgtccgcgaccccccagaaacctcagggacaccctcctagacaccccgccccaccagcctcacagggatgaacctccctaccattctttgaacccccctaccattcctttttgtctggaatcagatcttgatttccttttggggaatcgcccctcccctggccatgtggttctcgcgagatgagcacagtgccccacctactctgaactaagaatcttgtttttttgagacggagtctcaccctgtcgcccgggctggagtgcagtggcgcgatcgcaacctccgcttcccgggttcaagggattctcctgcctcagcctcctgagtagctgggactacaggcgcacgccactacacccggccaatttttgtatttatttattttattttattttattttttagtagagacggggtttcaccatgttggccagaacagtctcgatctcctaacctcgtgatccacccgcctcgggctcccaaagtgttgagattacaggcgtgagccaccgcgcccgtccagaattatctttaaaatttatttctttaagatttgtagctactaagaaagaaaggagctttttttccttgggccttcaaactgaaagaaccgcatgagcctgaagctgcgcatggtcttaacatcaggctgtgcaggaagaagctatctgcagatggatgccagcacacacaaggaagcagagctctggcaacattgaggtcagtaccttcttttttgcttaagctaatattaattgaatttccatcatttgcaaccaaaagtgctttgatactgcttttcatctaggggtaagaatgatcaacttggtgcaagcaaaagtaactggttggccaggcgcggtggctcgcgcctgtaatcccagcactttgggaggccgaggcgggtggatcagcgaaaccccgtctctactaaaaatacaaaaaattagctttgcgtgctggtgggcgcctgtaatcccagccacttgggaggctgaggcacgagaatcgcttgaacctgggaggccgacgttgcagtgagccgaggtcgtgccactgcacttcagcctgggcaacagagtgagactcttacctcaaaaaaacaaaaacaaaaacaaaaagtaactggtcaacggttgtgagtaatagaaaacttatcacaatctcttttggataactggtaaatttttattggtttggcatgctaaatttagaaagctcaaataactagcatttttctgtaccctagagaaaagtgttaaataagccaactgatcctgaggattattcaaagatgtaattccaggttatgtcagagtgtcagtgtggattcaacttaatcacctacatttccaacattaataggattattctgtagaaactgatgccaagagaaatgatcctgagttctgtactaataatagctacaacatattgacatattttgtgccaagaagtgtgctaagcctatcattatttatatttaattcgcccagaaatcctaaaaggtaggtgtgattgttccttttttacaggtaaagaatctggccaggcatggtggctcatgcctgtaatcccagcattttgggagaccaaagcgggcggatcacaaggttaggagttcaagaccagcctggccaccatggtgaaactctatctctattaaaaatacaaaaattaggccgggcgcggtggctcatgcctatagtcccagcactttgggaggccgaggtgggcggatcacctgaggtcaggagttcgagaccagcctggccaacatgacaaaaccctgtctctactaaaaagtacaaatattagccaggcatggcagtgggggcctgtaatcccagctactcaggaggctgaggcaggagaattgcttgaactcaggaggcagaggatgcagtgagccgagattgcaccactgcactctagcctgggtgacaagagtgagactccacctcaaaaaaaaaaaaaaaaaatcagctgcatgtggtggcacgcgtctgtaatcccagctacctgggaggctgaggcaggagaattgcttgaacccgggaggcagaggttgcagtgagctgagatcccaccattgcattccagtctgggcgacagagcaagaaaaaaaaaaaaagaattttaggtttagtaatgtgctcaagcatgggctttgaaattagaaagacaactgacaagtagtagaacccaaatctaagccctcatgttgatatttctaaaaaaaaaaaaaaaaaaaaaatccaagccctgatctttctaatttcaaacccatgcttttaaccactgtgctctctataagtttccaaagtaagtttttgagttagcagggttttactatagttttttgagacagtgttgctctgttgcccaggttggagtgcagtggcacgatctcggctcactgcagcctctgcctcctgggttcaagcgattcttgtgtctcagcctcccgagtagctgggattacagattataggaacgcgccaccaggcctggctaattttttttgtatttttagtagagatagggtttcactgtgttgcccaggctggtctcgaactcctgagctcaggcagtctgcccgcctaggcctcccaaagtgctaggattataggcgtgagccaccatgcctggccagttttactaagttttaatgttagatgtgttagattgattctttaaatttgccaaccatatgtagctagcagttcataagaattcattcaaatatcattttttcaacatattttgaatacatatgtagcttattcctgctatgagccaggaataagaatgtctaattgacatggagatcttatttcaaaactcttttttttagacaggctgactgcagcctcgaactcctaagctcaaacgatcctctcacctcagcctcccaagtacctgcagagactaccatgcccggctaatttttaaatttttttttagagagataggggtctcagtatgttgcctgggctggtcttgaacttctgggctcaagcaatcctcccactttgacttcccagtgctgagactataggtgtgagccaatacacctagcctgtcaaaattcttatagataatcagaatttgccatcaacaatcattatctgaatgataaattctttctcttatgagacagaggtccagactggcaattttttttttttttttttttttttttttttttttgaggcagaatctcactctgtctcccaggctgaagtgcagtggtgtgatcttggctcactgcaacctctgcctcccaggttcaagcaattctcatgcctcagcctcctgagtagctgggattacaggcacacactaccacgcctggctaatttttgtatttttagtagagacagggtttcgccatgttggtcaggccggtctcaaactcccaacctcaggtgatcaccacccccaccatctcggcctgccaaagtgctgggattacaggcttgagccaccatgcccggcctcaatttttttttttttttttttaagtgaggtgctagaagactgttaccagaacttgggagtcactcctttttcaaaaaatacacaaaacccagtggttttagaagatctggagggcatccctgcccatctcatgagatcctcagcatagcaggcagggaaaaggggttggagagcctggcactgcccctgtccacagctgtctcctttcctaaactaagtctctgatgcgaactctactcctgacctccatcatccgtgtgtgaaatgccttgttttcatgttgactcttcagtgctgggtgctgaattagcatcctgtgtttgttttagcttcttatacagggaccaagtctggaatgtaattaattgagcccttatttgaaataaatgtgttctgggtgttcagagacctaaaaagatgtgagaaaaaaaaaagaaagaaaagaaaaaaaaaataaactgcacttggctgggtgtggtggctcatgcctataatcccagcactttgggaggccgaggtaggaagatcacttgagcccaggagtttgagaccagcctgggcaaaatggcaagaccctgtctctacaaaaattaaaaaaaattagccaggtgtgtttgtgtttgtatgcgtctgtcatctcagctacggaggctaaggtgggaggattgcttgagtccgagagtttgaggctgcagtgagctatgatcatgccactgtactccagcctgagtgacagagtgagaccctgtcacacacacacacacacacacacacacaaaagaaaaggaaagaaactgcacgtcttcaaacagaactatgttctctaatggaggagtgaaaagaagtagggatttggaaagagagcacctaactttgaatttcagctaaccatttattaaacatatgtctttgggcagatgtttgtacctcagttttccaataatatttaacttataaggatgtaggggcaattaaatactgtgcatgctagtattatgtaagttttaaaacaaaaattattataaattaatggagcctactgattttgataggaaaatctataaattccttgagtatcagtgaacacataccgtttttttttttttcttttggtggggtgggggagggtcagggccttgctttgttgctctgttgcccaggctggagtggtgcagtggcgtgtttatagctcactgcagcctcaaactcctggactcaagtgatcctcccacctcagcctctggagtagctgggactagaggtatatgctaccatgtctggctaacttttttttttttttaagcaccaggtcttgctatgttgtccaggctggtctttaacccaggtctcaagctatcctcccacctctgtctcccaaagtgctgggattacaggcatgagcctggcccacaacgtttattctaatgtttatttccataaaatttcaagaacagttgaaaaagttagtttgatgtctttaaacatgttataatatataatagtatacaataacatttgtaatatgagaatgtacaatgctattatttaaacaaaaagctgaataaaaacagatgtaaatccttgtcagcttaatcacataaataatcagcctattgcatagagattgccttgtttcactataatctttggatgtagtttccattcattgcatattttcagatattacttctgactatccttttcttccatgctggagaagctacttctttttctttggatattatttgtatgtgttccaactaaccaagtatttggactgatgaagagttgttatatatttttcagaggataagacccaataaaaatacacctaacaaaaagtatatatgattattttaaaaacaaacaaaacccacagaaaataacaagtgttggtgaggatgaggacatggaggcactggaacccttgtaaagtgttagtgggaatgtaaaatggtgcagctgctatggaaaatggcatacagagctcttaaaaaatttaaaatagaattaccatatgagaagccacattcagtggtgtatgcctatagtcccaggtattccagaggctgaggcagaaggatcatccgagcccagaagtttgaggccagcctgagcaacatgacaagaccttatctcaaataaaacaaaaccaaacccaataactttttttcatgtctcttgaatttgctttttcaagataggcaccactggggaaatatccagagagtggggcaatcacagttttagtctttgatactttgagacactgtaaagtgatatgatgattcagctttgctgtcatcccaactattttccagagagtattaatgttggaccaccttgtggattatgcaagactgtcagtgttgcctttggcactaacagaaaagagtgagtcaagaatatatattgcaaggtagaaatggtcaagatgtggagtttcttgtatgtgatacttttctattttgttttataagaaaaaactagctatttcattaggaaattacagtttgcatatttagaattttcattagtagtgattttaagtgttactgttgttaaaacggtgagtttgttagtttagaaacggttcatctaacagctaacaacttagatttaaataattaagtttggctgggcgtggtgattcacacctgtaatcccagcactttgggaggctgaggcaggcagatcacctgaggtctggagtttgagacaagcctggccaacatggtgaaaccctgtctctgctaaaaatacaaaaattagccaggtgtggtggcacacgcctgtagtcccaggtactcgggaggctgaggtgggagaatctctaaacctgggaggtggaggttgcagtcagctgagattgcaccactgcactccaacctgggcaacagagtgagactccatctcaaaataaaataaaatgatgtaaaataagtaagtttaatatgaatggagagggatatctaggagtatatttcagaatcttttttttttaactactccaaatatctatgcacaaaattcaagtcaactgtgcaagaaaagtcaaagaagtttctttttgttttgttttgtttttagagacaggtctcactatgctgcccaggctggagtgcagtggttattcacaggtaccatcatagcacactatagtcttcaactcctggctaaagtggttctcctgcctcagcctcctgagtagctgtgactacaagtgcccactgtgcccagccaaagcagtttcttggtatttcaggagttcttgtataaatgttaattttcagccaaaaactcaagtttgctacaactatactcaattaatgttctttgttttatttgtagtcaaagcaaggacacaacatcagagggacggcagagaatccttgtgtgtagatctttggtggtgagtacctgggaaaagtcacctaagtcaagatgtcagcataaaaagcattttattttgagcctgaaaagtggaatgagccatctatctaagtgcttacatggcataatgtgattagtagaaaggtttttttgtgactctcttactctgttgcccaggctggagtgcagtggtgtgataacagatcactgcagcctcaacctcctcggctcaagtgatcctcccacctcagcctcctgagtaggtgggactaccagtgcacgccaccatacgtggctaatttttaaattttttgtagagacaggatctcactatgttgctgaattcctgggctcaagtgatccttccgcctaagctttccaaagtgcaggggttatagcataaaccatggcacccagctgacattttgatagatgtatacattgtggaataattaaatcaagctaattaatatatttgtcacctcacattcttattttgggggtaagaacatttgaaatttactctcaacaattttgaaattataatacattattaaccatagtcaccaagctgtacaatagatctgtctccattcttccctttacatttatgatttgctctgtctagaaactgaataagtatcacaaggaggaaaattgagtggttaacaaacatacatgaaaccacgttcaactttactttcccacctttaaggcaacttataaacaaaaattgtaatagtatagtaatgcaagggatatatagcagctaagagaaatgaactaaatctacatatacacaacacagatgggttttaaaatcattgtaattattacaggcatgagccacgatgcccggctgtaatattttatttcttataggaaagataacaaatttgtcaaaatgttaacaatgatcagccagacgtgttcgctcacacctgtaatcccagcactttgggaggccaaggcgggtggatcacgaggtcaggagatcgagaccatcctgctaacacggtgaaaccccgtctctactaaaaataaaaaaaaaattagctgggcgtggtggcgggcgcctgtggtcccagctactcaggaggctgaggcaggagaatggcgtgaacccgggaggcggagcttgcagtgagccgagatcgcgccactgcactccagcctcggtgacagagcgagactccatctcaaaaaaaacagaaaaaccaaaaaaaacatactgttgaatgaaaagcaagttacagattatgtactgcttatgtaacgtttttatttatttgttttgtttttctccttggtgggcattggaaaatggaacattcttaaatggacacattcatactaatagcatcttcatgttctgtctttttaaatgcacacacacagacacacacatatgcggaagaaagggacacactggaaggatacactctaaattcctgaaagtggttacctctgaagagactgggagggtaattgatttggactggggttgaggggagtgcaagggggcttcaattgtatctgtaattttttttctttttttcctgtactttctaggggtgactaatgtaatgttttatttcttttttttttttaaattgaaaacattttttaatggagactgaggtcttgctatattgcccaggctggtcttgaattcctgggctcaagcaatcttcctgcctcgggctcccaaagtcctgggattacagccatgagccatgatgcccggctgtaatattttatttcttataggaaagacaaaaaatttgtcaaaatgttaacaatgatcagttttggatgttgactcatgagtgtttgttatattctttgcatttttctgtcttttgaagatttcttataaataagatttgttctctcctgtgaagattaattttctactttgtgcctggatttggtatgttgtgcacatttcggcccacacaatagtaataaatgagtcttggaacaaaacgtaagcaatcctctgcaagcctgcatgatacattctcactaagccagcctaaaaataacagaagagtaaaagtattattagacagagggaccctcatttgacctttcggccatttggattgtccattcagttaatcttgtcacaatcatgtaattatgaggttggtttgagcttaatgaaccaatatatacaatgaaaatatgctgtcaccagaactgtgccacacaaaggccttgggacataatacttttcttgtgtttgtacatgagatttcccaaagataacaaaaccttttaccaaatatgcttttcagacctattaccctttctaacgaatattcctcttccccacgtcaagtcggcatctcccaaaatatgtcgatgctgtccctttgccacataaatacccaaatgctgcctgatacccccgcaggctacatttgacagtacaatacctgcaaaggcagtggagctgcagagtgctattgaaaagaccattataatctcctctgaaagagtctcaaactgaaatgccagttagtaaaacatataggaaagagaaaaacaaccaggcaagtatataagtgtactcagcagcactcaaaattccagctgagttgaacctggaggtatttttaaaaagttgaatgtctggagaactagtttaggaaacttactttgtcttttttaatttaaaaaaaagttaaaaaagatatatacacttcactccctaaaaaaaaaaaaaagaaaagaaaaagtgagtaggaagtaggggatgtgtacattaatgagggcttccttcctttctctcacttggggagttagtcaaagaccctttaagacttgtttacttttccttctctagaaggaaatagccagcgttttccagcaatgataatagcagtatggacatcatttttaaaaactctagcagtatactattataagaccaaaataagagcaatatagtaaagcattatacattatttctactcctgtatctgactctttctctttcagctagctttagtcagcaggcttatttgctccagcctagggggtttgatttatttactctatgtgaacaggtctgactatggaaaccccttcctcatgtcagaacctttggcttccaggtggagattcattcatgccgtttacaccacatacttgctccctgcctggacaaattggtcccagttccctcaggtcagatgtattctgatgactcccaagtcctgagctgcataacactcagaacctttgcatcagtctctcattgagccctagaggtgcatctctcttcatggttgttgcaaacattactaattgcctcaacctcttaactgtgggtacccatctctagaatgaaaccatcccttaatttgatgtttattgaatacctgtcagatgctgccattctgctaggagctaggaatatagtgctgattaagatagccatggcccctgccttcatggtgcttatagtgtactgtggagcttacacagggagcctgctttaaggaaggatcaggtttcttcactaatgagacctgtacatagatggtactggatgagtgtgtgtgtatatgtttgttagtgggtgggaagcaagacaggaagcaaggaaaccagaactatcaacattgtttaggttagagatgatggtattttgaccagggttgtagcagcaatggaaatagtgagaagtgatcatttgagggtaaacaggactgactggcagactggttgtggggttaaagagacagagataaatcaatgatgacccataatgtgtttgacctgagctactgggtgaacagcagggctatttacagagatgaggatagacagaatgtgtgtgcaagaatcaagagttgagtttttttcattgttacatttgattttccagttgaaaaatcaagtggcgatattgagaagtcacaaatacatgactttgaagttcaaggttagagataaaattttgagatcatcaatgtgtaatccatttaaagaaatgggtcttgtattagtccattctggactggccgtgtgtggtggctcacactttaatcccagcactttgggaggccaagatgggaggattcactcaaggccaggagtttgagactagcctggtcaatgtagtgagaccccatctctctaaaaaaataaagaaatacctgatactgggtaatttataagaaaagaggtttaattggctcatggttctataggctgtataggaagcataaagctggcatctacttctcggggaggcctcaggaagctgccaatcttggcagaaggtgaaggaggagcaggtgtttcacatggtggaagcaggagcaagagagtgaggggagagatgctgcacacttttagatgattagatctcgcaagaactcactatcttgaggacaataccaagggtatgatactaaaccattcatgagaaattcgccttcatgatccaatcacctcccactaggctccacttccaacattggggattacaattgaacatgagatttggatgaggacgcagattcaagctagatgagtctggatgataacaccttcagagagagtgtctcagctgggcgcggtggctcatgcctgtaatcccagcactttgggaggctgaggtgggcagatcacaaggtcaggagatcgagaccatcctggctaacatggtgaaaccccttctctactaaaaaaacaaaaaattagccaggtgtggtggtacatgcctgtagtcccagctactcgggaggctgaggcaggagaatctcttgaacccaggaggcggaagttgcagtgagccgagtttgtgccactgcactccagcctgggcgacagaacgagactccgtctcaaaggacagagagtgtctcaacagagaagaggaccaaggacattgccttgggacaagccaacatttagatcctgggagcagaaagaaaagccagcggaggtgacttagaaggaacagccagtgtgatgggagggaaaccattagtacatcttatccctgcagccaaatgcagtgtctcaaagaggatgaagtaatctcttgcgtaaactaagagcagttaggtaagatgaaaactgagtatcagtcactggtcttgccacaaggtgaccttgacaagtgatctgattggatctgattgaggaggagctgtggatgaagaagtgtgggcaacaaaggaagacatctcttttgaggagttagtgcaaagggagtagagaaataggggtaaggtggatagatggggtcaagtaagatttttaaagacaagaaatattctagtatgtttgtaagttgatgagaatgatccaggaaagaaagaaatctgaggctgcaattgcaagagggaattactacaggatgaaagtcattgagtcattgaaggaatgactccagggcacagatggaggaagcaaggccagttcatccagggtaacgagagaaagcagagcagagaagacgcatagataaaatcggcagatgtggtgggaagacaaagatactttcttctgagggctctgatattctcagtaaaataagaaacaaggtcatctgctgagttcaaagagggagaagaaggtattgaagacttgagaagaaataaaatcaacctcctgtagagtgatccacccactttggcctcccaaagtgctgggattacaggtgtgagccaccgcgcctggccaaaggaagtttttttttttttttaaggaagttttaattaaaaattttatattatttttctcaaatgttaacaatgtattataaaccaaaaataaaattttaaatcctccaactgactgaacgctttttgaagagaaacattcttagaaacctttgggaaaacatttcctactttgaaaaacatggactataagcaaataatgtcttttattatgagaaagtcttttggttcttaattatccttgtcaggaaaaaaaaaacaggataaaagattgctttttaagattgtcactaaaataaaaaatacaacataaaaacaaatttctatttaactcattcctgaatcttaaagaatgtgttacaagttgggctgggcacagtggctcacacctgtaatcccagcactttgaggccgagatgggcagatcacttgaggtcaggagttcaagaccagcctggccaacatggtgaaaccctgctctacagaaaatacaacaattaaccgggcatggtggtacgtgcctgtaatcccagccacttgagagctgaggcacaagaattgcttgaacccgggaggtgaaggttgtagtgggccgagatcacgccactgtactgtagcctggcgacagagcaaaactctgtctcaaaaaaaaaaatagttacaagttaagaaactcttctttctccttagacaacatgttaaaagaaactcaagaaatgttacagcaggtaattttatgacaaatatgtggatatgcccattttcaaaatatgttagaaaatacattttataaacccaaacttacaacacggccttccacaaaataagtgctcaataaagggtaataataacagacccaataataacagcaataatttttaaatttagatatttttagaagtagactttcagcatttcttctacttgttgaaatgaagtcaatgaggttgttttctttagtgtgttaactgagtatcaagaggcactaggaaggaaatgtttgatcagttggctttaggaataaagcatttccctgaagctaccttggttaatatttgcaagtattgtgaactttttggatgaaataccacacagatgcaactcaaaacgaatagtaatacacatatatagttatttcagctctaaactggtattactttcaagtaaactctgaaatctcgggaataaccatctcatggctcttggtaaaaatgatacatgttcattacgaaacaatcaagcacagataagatgatgatccgaggatgagatggtgccctcactaatttctgttcaatgttcaaggtataaccctgaacagagagggttcagggagaccctcatttgactaaaggactcacaatgcaacttcagttcagttttaaaaaataagaaagttatgtttctggcacactttcattttgggctgagattcaaaacatttacaggcattaatatatgttccgggtaccccttgtctttttttgtccccctgagcacaaaataacattacataattcatgattctttttttctcttctctagaccaaaacccagtaaacagaaaacagataaacaaaagaggtggggctagttctctgcagagtgttgtggaggtggggctgaggatggagttttccttctggaatcccagccctgctgttgggagagcaaggtcctgccacataccctaaggagctaagaccacagggatctcagggggttttactgtcactttgaaatggtgtgaggtttcctgcttcatcagaatccctgctgagggggaaattgaaggtgtactgtggaaacctccattgggggcttctgcacagtcacaggaaatggtgagtttgcaggaacttgcggttactgtgagaaaatttgctttggatttttatgtccaaaatctctgtggaattccccagatctgaagccagtgcctgctttggactctgctctgcatacaggttcatctgattgtattttttctcattaattgaaatttgccagctgcaattttatcagcgaaaaccaaattctaatctcgtagatagatatagaaaatgtggctttaaattatggccttaggttatgatgaaataaaacaccaacgagtatgaactgggtctttatgagcgaatttgaaaaataaagtagtaaatctgtctgtgataataggttaacagagcagaaaataagggcagatactgtagtttgtagatcagcatcctgtcacaacaattttggaacatttggttcatgttctgtcacacattcttaagagtagttgtgcaattgcctccaagctgttggctgtattagacaaactttaaattagtgaaaggaatctatttttatgtggtggtggtggggtaatagttcttctaaacaaactttcatttttatcttttgaaagtttttaaagaatcgagttttttttttttttctttgagacagatctcagttctgttgcccaggctggagtacagtggcacgatcacggctcactgcagcctcaacctaccgggctcaagtgatcctcccacctcagcctcccaagtagctgggactacaggcacataccctcacgcctagctaatttttgtattttttgtagagactgggtttcaccacattgcctaggctggtctcgaaatcctgggctcaagtgattcacctcggcctcccaagtactgggattacaggcctgagccactgtacttggcctttgaagtaaacttaaaaaaaaaaaaaagagagaccaggctcagtgactcacacctgtaatcccagcactttgggaggccgaggcagctggatcacagagctcgagaccagcctggccaacatggtgaaaccccatctctactaaaaatacaaaaattagccaggcgtggtggtaggcacctgtattcccagctacttaggaggtggaggcaggaaaatcgcttgaactcaggaggcagaggttgcagtgaaccaagactgcaccactgcactctagcctgggtgacagtgcaagactccgtttcaaaaaaaaaaaggaaatatgagactctctttttatgagtagaaggtgtctttcacctgtagcacaaagtggaggttcagagcatgaacggattctgtagccaggccacctgactctgccacttgctggttgtgtgaccttgggcaagttacataacctctctgtgcatcatttcctaatctgtaaaatgaggataatagctgggcacagtagctcatgcctgtaatcccagcaccttgggaggctgaggcaggtggatcacgaggtcaggagtttgagaccagcctggccaatatggtgaaaccttgtctctactaaaaatacaaaaattagcagggcgtggtggcgtgtgcctttagtcccagctactcgggaagctgaggcagaagaatcacttgaacccaggaggtggaggttgcagtgagccaagatggcgccactgcactccggcctgggcaacaagacggaaactgtgtctcaaaaaaaaaaaaaaaaaaaaaaaaaaagattatagagaaacaaccaaatgatttttctaatgataaagtcttttagactttatctgattaaagaaagtctgattagcagactgtgaactgctaatcaacagaatctggagacatgccactaaatctgagtcactgtcaacatgtgagtccacacctacaggaggggtggttccttgtatgaaaaacagcctcagtaaatcactgaaactctgctggcaaacatttttaatgcaagtaatgcacctcaatttcacccccctgcttacaatcctgtttgaaacaattccaaacaaatgaccaagaaaccactttggaccaaaagaaagctggtatcttacagtaacaaatactgtagcttgaatgcagttctccatgagaaattagtgaaagggagcatccattcccttagaaatcagttaatattgccattaataagaggttgggcaactgggcacggcagctcacgcctgtaatcccaacactgtgggaggccaaggtgggtggatcacttgaggtcaggagttatggcaaaaccctgtctctactgaaaatacaaatatcaaccaggcatggtggtgggtgctggtaatcccagctacttgagaggctgaggcatgagaatcacttgaacctgggaggtgggggtgggggttgcagtgagctgagatcgcgctgctgcactctagtctgggcaacaagagggaaactccgtctcaaaaaagaaagaaagaaagaaaagaggtaggggaacccttttttatagagctttgctcaggaaccaaaaattcaagtttattttaaacctttcgtctatgcttgaggtatctggatttctgcttttaatatcacattgtaaagatttaaagagaaaacatctctgtagacattgttaattttgtaaatactgatgtaatttcttgtgtttttccatatcatctactgaaactaaatagctcagaattaaaaaaaagagcccttttattttgccagtctataaagcttctgatgacaggtagaagaacctggtggttaaggacttaggttttgaggtcggtggatgtgagattgaatcgtggacaggttttgaggtcggtggatgtgagattgaatcgtggacaagatctcagtttgtataaaggcatgtatatcggcctcatttatacatattcttagagggctgtgagaagtaaatgtgtttatatgtatagaatttagtacccatggccaggcgcagtggctcatgcctgtaatctcagcagtttgggaggccaaggcgggtggatcacttgaggtcaggagttcgagagcagcctggccaacatggtatgaaaccccgtctctactaaaaatacaaaaattagccaggcatggtggtgcgtgcttgtcaatcccagctactcaggaggctgaggcaggagaattgcttgagcccaggaggcagaggttgcagtgagctgagattgcgccactgcactccagcctcggcagcagagcgagactctgtctcaaaacaaaaacaaacaaacaaaaaagaattcagtacccacgctggctcagatgttgatggttactgttgtgaatctggctctacggggaccagtcacttcatcactctttaaagacaagacactcctaaattatctaccaggccattttatttagaaggccttaacatgattgatacatttaatttaattttatttttttgagacagagtgttgctcttgtccaggctagagtgcaatggcaccatctcagctcactgcaacctctgcctcctgggttcaaacgattctcttgcctcagcctcccaagtagctgggattacaggtgcccgccaccatgcctggctaatttttgtattttagttgagatggggtttcaccatgttggtcaggctggtctagaactcctgacctcaagtgatccacccacctcggcttcccaaattgctgagattataggcatgagccacctcacctggccgatgcatttaaatgtgggattaaatattcacacctagttcaagtgttcacatctgtacttgaaactaaaacttgttaacaaggcataaatactgtattagtctgttttcatgctgctgataaagacatacccgagactgggcaatttacaaaagaaaggtttattggacttacagttccacatggctggggagacctcacaatcatggcagaaggtaaggaggagcaagtcacatatcacgtggatggcagcaggcagagagagctggtacgcggagactcctgtttttaaagccatcagatctcgtgagacttattcactatcatgagaacagcacaggaaaaactcatccccaagattcaattacctcccattgggttcctcctaggacacatggggattgtgggacttacaattcgagatgagatttgggtggggacacagccaaaccatatcaaatactgtttaatttgagtctaggagaaatcttaaggccttaaacttagactttataaaagcagaggctagctccatctggactgtttattccttcagaatattatgcctacttgtattcccaatgcctgactcagggctctcccatagtcagtgctcaatgaatattggtaaggaaaaaaatggttcagtgaggagatttttgcagtaattcaggtgactgatgacatttgacctttgtgaatgaatctccaattctgcaattgggtggattctctgcctataggtacaagaggaagaggacgagaaatatttcctgttctctcaataactttccaaataacatgtcataagaagcctcctcattctactctccaacatattaaaagcctaggattgagccaggtgcagcggctaacgcctctaatcccagcactttgggaggccaaggcaggcgaatctcttgagctcaggagtttgagaccagcctgggcaactaagtgagacccccgccctgccaaccccctctacaaaaaatacaaaaagttagctgggcgtggtggcatttgtcagtaatcccagctactcaggaggctgaggtgggagaatcgcttgagcctgagaagcggaggttgtagcgagctgagattgagattgtgccactgcactccagcctgggcgacagggcgagactccatctcaaaaaaaaaaaaaaaaaaaaaaaaaaaggcataggtccatagccctttagaactggaagaagccttctaggccaagcccttcatttgaactgagccttgacgggtattagccgttagccatttgtggaaggtcgcacagtagtcaggactggaagtctggtctttgaaacctgtcagtccacggtcatttcacctgcctgtttgtaaaacaatgtcctgttacttaagtatactttttaataagaaaaactgggtgtaagcaagagtatcagagtggtgttctggtgccagcagttcaacttctgcagcgtgtacttcacaggcacaggtacttaggacgtcgcacaggcacaggtacttaggacgttgccccgccgagactgtcgttcatatcgcgcccacctccgggtaacgccggtaatgctgacctagctccattatttgtattaatttatttagctagcagggggaacggctgggtaatgcagtctcagctgctggaggggaagaggcaagactccgccggcgcccaccatcagagcgtgacaacaagcgggaccggaggttgggaaaaagcacagggacagaatgaatgtgtgcatgggggagctctgctggggagagggcaagaggctgtgatcagattatctgaggtttcagaacttttatataaagaccaaggaaccaaatgaaaatccaactcttccagggagccctggaaagttcaaaggacctcgtttgagggagcgagtccccgcagctcgtgcccacgtctccctcgcgcttcccccaggacaggggccgccccaacccgggcacgctgagcccggccgcgcccctagccccttctctctcggcctcctcgtcccgaagggaagcacaggctcgagcagcattcggggctcatccatcagccgcggaggcaaagggggaggagagaggaggcgggaggcgggaggcgggaggaggagtttctgggcggccgagagcccccggtggggccggcggaggagcgcccttccccccgcgcgctgattgctgtggcgtcctgcccgtccccgcccgcgtgtgtgcgagggagggcgagtgcgccgggtcggcctgatgggggtaatcgagggtttcggggacgccgagcggcactttcctcttcccagcgagtgaaggagggcagtcggcggctctcgcgccccggccactttccctgcgcgattcccggagctccctgcaggaggtgagagtccccagcgggtccggatggcgtagttttgccgcggcgcagcagctgccggagctcgccgccgccgagcgctgggcggggaaacttgccgccgctttcctccaacttgctgcgggtggatctccgctggacacaccgcctccgaggtacgtgccggcccagccccgcggcgctgcagcccgcccgggctgtgggctctgcaggctgcgcgggtgcccgtcggcgcggcgcgggctgccagtgcctacttaccggccagggtcgctccagccgccaggacctccggccttgggagggaggcgctggtggggcggtgtttaccctccggggagcaggcaccggtggccagcggtgcgtgggcagcggccgcacggggcaggcagtgcccccggcgatgcgcagtgctggggaggaattctccacgcccgccctcactcttcctctccgcgggtccttctgacccctgcggggcgcggcggccacttccctccgggcgcgtgacagcttcggtgggaatggtttgttgtgggttcgcagtcaattgccgtggcccaggctgtggctcccggactcgtgcacggacgcggtttgcgttccccgctggccgcgccctcagggtgccttgcgggctgagccgcaagctgcagctcggcccccccccgccccggtttattttgaaggctctcttcttgtattcatttggttaggacaaacttggaaatcttggactgtcgctagaagaatctgcttgcagacttgatcttattagggcatttgccccgctttgcagaatcgcatagtgtcaggagccgacgtgtcaagcatgaattaccttggcaaagtagaacttagtggatttggtgtcctcacgaaaagctggaagaagaaaaccgttccatttccctagctgtgaagtgaggatagtagtacttgccccgtaaagttgctgtgagcatctaatgatttaatgtgtgtgaggtgctacaacagtgcttggcaccgagtaagcaccgcacggaggttagcgctgcttgccgctagccctgcggtggcaggataggagcggcgagggcagaggatagtaggagtgacaggctgtgctggggaaccaggcgtattctgagttttatgtccttccgaagaagtgagcggtttgggagaagtctccacaggtagtaaaaacacacgtcaagaccgtttcttcttcctgaatgcagagtgcaaacagttacttcagtgtgaactcagttgtttcttttggataataataacagctaacgttttctaagcccatactgtgtgcacttaatcctcacagcatctctatgggaaaagcactattaataaccctattttacagataagacactagaggttaagttacttgtccaagatcatacataactttctgttagttctgactccaaagctaccttccttcctcagcggagagcggcaagtgcaggccgatttgtgtgtacatagatttgtgtgcatagtccatgcatcttctcccatctttcagctttctatttgagctgaacgcatatctcttgaaacacacataaggtatctgtgatgaatttaggcgattttacatacttatgagggtgcccaattaaagttcctctgaaactggccccaaataattataaatagaactctgacttgtattaattaacatggaaatttttttttttttttggtgacagagtctcgctctgtccccaggctgcagtgcagtggtgcgatctcggctcactgcaacctccacctcccgggttcaagagtttctcctgactcagcctccagagtagctgggactacaggcgcgcgctaccacgcccagctaacttttgtatttttagtagagacggcgtttcaccatgttggccaggatggtctcgatttcttgacctcgtgatccacctgcctcggcctcccaaagtgctgggattacaggtgtgagccaccacgcctggccaacatggatctttattcttaatttcttttattaattctccagacattgttgatcaccattacttggcttccttaggaaacagcttggggttggcacaggaggcagggaaataattcttacccccttaagggctattaacatgaaattgatttcatgccattgtgtcagttaaaggatgttgctctatttcttgctgttctttgcttttggctttatttctgcattgtttagtgtttcaaggcttgagcgttttttttttttggcccttcagtttgacatttgtcaactttaatttttcctgttttgatggaatctgaccgttacacggcagctttgcctaacaactgttgattcagctcatgtttttaaatataaaaatcaccaacatagttttgaatcccagcacttcaaaggcaacccgtggggagttcattgttattttgaatattagtcaatagggggagcataacacactgttgatatctataaggcgcataaacccgtttttagagtattaaacatatagtttgaaaggggagggcaaaatatctagcaaaataactaagttgcttttggagtttataatggaggactagatttaatttgaactgattaagaatgaccttgaggacagggcctgtatgttgaatatatgtcaagaactccatggtggctggacagatagataaacacacatatagttttttttcaatttgtttccttaagtggtgtgtaggccaggcacagtggctcacacctgtaattccaacactttgggaggctgaggtaggaggatcacttggccaaggagttcgagaccagcctgggtaatatagtgagacccccatctctttaaaaagtgaagtttgtatgtaaactaattttgtgtggtttgaataatatttcaacttacctgggagaaatggaaatccagaggaatttgttgtgaatccttttgtaatgatcctcatttgtcttttgtagaaaactgaatataatgaatttgttctcagggaggttggtgtgttcacaatcctgtcatcatctttcattaacatcttctaagtgcaagacaataggggatcagtaatcctaaataacagcagttctattactgtgcattcctcagaggcttacgttaatattcaagtatagtagtagttcagatgtatcatatttgatactagtataggtgtgatgtgtctatgaatactcatacttgtaaacataaacaataagaatatgcttgaaaaaatcacacttgacatttatctatttatttatttattttttgagatggagtctctcgctctgtcgcccgggcgggagtgcagtggtgcaatctcagctcactgcaagctccacctcccaggttcacgccattctcctgcctcagcctccccagcagctgtaactacaggcactcgccaccatgcccggctaatttttttgtatttttagtagagacgggggtttcaccgtgttagccaggannnnnnnnnnnnnnnnnnnnnnnnnnnnnnnnnnnnnnnnnnnnnnnnnnnnnnnnnnnnnnnnnnnntaatcccagcatgttgggaggccgaggcaggtggatcacttgaggtcaggagttcgagaccagcctggccaacatggcgaaacctgatctctacagaaaatacaacaatttgctgagcgtggtggtgcacacctgtaatcacagctactccagaggctgaggtgggaggatcccttgagcccaggaggtggaggtttcagtgagctgagatcgtgccactgcacgccagcctggcagacagcgaggttctgtctcaaaaaaaaaaaaaaaaaggttttcaatttttgtctgtagttttgtaggccagtttcctttcttgtttcttgcgtattatgtagtatttttttattatttatttatttatttatttatttatttttgagacaaagtttcgctctgtcgcccaggctggagtgcagtggagtgatcttggctcactgcaacctccgcctcccaggttcaagagattctcctgcctcagcctcccgagtagcggggaccacaggtgcatgccaccacgcccgactaattttttatatttttcgtagagacggggcttcactgtgttagccccgatggtcttgatctcctgacctcatgatccacccgcctcggcctcccaaagtgctgggattataggcgtgagcgactgtgcccggccccatattatgtagtattgatttacctttatttcatttaccacgttagggtcccatggatcctattttaaaataactttcaaaattagttgagtcccttctttttaaatcttagcattgcgcttatactacagagtggcatttatttaggatctcatttagtcttctatgctttgctctagtttactcgagtaattcaacaaacacttataacctcctactccctactaggctatggtttctggtcttggagcttggcaaattaattgtccttattcagtgctctgatgactgggggccaaaatgccttcaggttgcttagggctttcttacagaaagcctttcgttggcttgaaggaaagtgttgttccattgtttttaagactcaaaagaattaatttttctctcttgcatgcaaacttggttgtgacttgtaaaagtcaggtgagtgcttgtttttctgagggcagaatctgagcctaagagcccagggaactcaactgtcctttgagttttaagaaggtgatcactgctgacttctttagtatataagtgaagaccaatttcctggcttcaaaaatctgtgaaaggtcctgactttacattttaagcttaacagacagaacagttagagtttagactgtgactgtgtaagtaataactttgctgtaatattttgcctggatgattctgctctgtggtcattttgaattacctcccttcttgatagttcattttgaaacgtctttttgtggtgctttcattgctgttggataaaaattgtaattgtcagatttattttttatttttatttatatacttattcatataaaatatgtaaatatatgtaaaatctcacatatatataatctataactatatattgtataatatataatatgtatatattttgagacagagtcttactatgttgcctcggctggtctcgaactcctgggctcaagtgatcctcctgcctcatcttctcaaattgttgggattacaggcatgagccactgctcctggctgtcagatttattagctactaaaggacagtcttctttttcagtcttaacagttacttaaaagtgattttattgccatttccatcagtctactggagcatttttcttatatttttatttttatttttattttttttgggacggagtctcgctctgtcacccagggtggagtgcagtggcgcgatctcggctcactgcaagctccgcctccctggttcacgccattctcttgcctcagtctcccgagtagctgagactacaggcgcccgccaccacgcccagctaatttttgtatttttagtagagacagggtttcaccgtgttagctaggatggtctcaatctcctgacctcgtgatccgccgtcttggcctcccaacgtgctgggattacaggtgtgagccatcgcgcccggccatatttttaaacttatttaaaacaattgtaaatttaaaaaatgttaacttttttgaaatttgcataacttgagttagataaatgtttttaggggcctttaatgtaaaagcagtcttgtattgccactaggaatataagcaatttggaatttaagagtgaatctaggttatatgaaaagctaaccttaaacacataatagtgagccttcagcagattgagtgagggcatttctgtaggaagaaaattaagtgtaccaagagccatagcagtaacttctctggttctgcatcttcagagtaacacttggaatgatagcattgtttctttgcagcatttcataaaacacaagctgttgctaatttgttcagtgtctagtcaagctgaaataaatcaacacagcttggaagggccttacaagaaggatctgggttcatttcctgggctctgtccaggaaatatagaaatataataaataaatctaggaatataaaatttctagatttcttattttatatcttttgaaatagcacatttgtttgttaactgacattgagctttattttctctgcttgcaaagtccttgcttaagaatcagcacaaatttccaagcattcttcctccccacttgaataatgattttgatgtcttgctctctcaaccaaaatgtgtttttgaaacaacattgatataaattctgcatgaggctactgtcatttggaacttattcttcattttttattcttcagtttttcaggccaaagatgaagacttaataggctgacaactgcttatgagggatagagaccatatttaaaatggaaggtctagaacaagagccccagaaccatgccttcaggccatcctaatgtgccctgctgaagataattttttggtgtcggggggcagggcagggagcctaatgtctggtttttgtggtggtggttcttttatgttgaaatcttcttccatcctgggaagaggattcagttatatgtagagcctagcaaagttgatttttagaattagattttaatggttatttttttttttgagacagagtcttgctctgttgcttaggctggagtgcagtggtgtgatcttggctcactgcaacctctgcctcctgggttcaagcgattattgtgcctcagcctcccaagtaactgggattacaggcgggggccaccacatctggctaatttttgtatttttagtagagacagggttttgccatgttgtccaggctggtctcgaacttctggcctcaagtgatctttccccctcagcctcccaaagtgcagggattacaggcgtgagccaccatgcccgcaagcccactttaatgttaaactgttgccaagataatttagaattaagtctgaaatgttagctctatctttacttaaaaaatggttataaagaagcgtatactttctggacattggactcctagtgaagggggcctttggagttgggtgttgtttgcaggaggacgaaacacctgcttttctgtccttccaggcacataattcatttctctggtatatgccgaaggtcaggttttttgtgtaaaattgctgatggatcatttgtaaaaacacatttaagttgattagtccttgaaaaatgatctttagaaaatgatctttacagatactagtccttgagctttcctgtggatcagattgccttgggcgaaggtctgcagtttcacaagcatgactcactaccttttataggtgagaacatcaaatgggccaggtggagggtctagtagaactctggatttctttttaaatttgtatcatactattttgctaatggaaacttgatgaatacttaattccatctggcaagtgaaaagggtcccttttgggagtattcgttttgttagcatttttagtgatttattgttttgacagtgtgatattggtccttggatgcaaaaatactctggagactatttggaaatttcattttataattaactaactgtgtgataattgctggagcagaatgtgtgtttttttttttttcttttcattctggaaggttatttgaggtgaaaaacttagattctaatcacaaaggcttgtgttcatgtggtaccctgagtacttttgtaagatactcactgtgttgctgtgagttatctcttttatggttttttctttaaaacaaaactcttctgagtctccataaagaataagtatctcattttgttatattagattttgtgcagttggctggcaaattaaatttaactttgagggaaagcaccattgactcattacatacattttgcatcattgcagcgtaaggtcttccctatgtgtgtgggagaagtttctgatctaaatgggcatgtttcctattgctggtctatcttttagccaaagcatttctgaatagacattcctattcattttcttattttcgagactttagagagattgctacttgttatgtattcgtgataaatcatctgaatcctgaaaaaaatacttatgccaacagcccattttgtaaagacacttgtctttgagcttttaagctgtcatactcattattcgttacaatagctgtacagccattggatgtatcatgtttttgacacaggagctaggggaaggatgacctacttgttgcatttcacatttttccatatttatatcttttttcaatttgtggcatctttatttcattgttagagtggttgttctctaagacgttccaggttttaatttcattcactgtgtgggctaaataaggagctttcctgtagaaccaattctactaaattcctgaaaatgtcagttaaaaattagccaggcatggtggtgtgtgcctgtagtcccagcttctcaggaggctgaggcaggaggatggcttgagccaggaggtcgaggctgcagtgagtcatgatcataccactgcactccagcctgggtgacagagtgagaccttgtccctacccccaccacacacacaaaaaaagaaaatatgaagaaaaaagaaaatgcttccaaaaagtatcccatctagataccatgctggttagggcttttggtcatgtttgaatgggacatagctgaacacagagcaggatttcaatgggtaggctaggaaaaggagaggagtgtctaatttgttgggagaaaatccacttttgcataataataggggatttacgtgttttctttggagttaatatgtatttcaagtaggtagataggtaagaggtttgcaaaaaaattttgctaaggttgaggttctgtagttggcaactcttataaccctgaagatcctgttctctaaagccaggaaaaagcagtctgtttccaattatgtatcacaaaaaatagtgaaattaagccaagaaaaatgatcatttgggagttgggttgcttttttttttgcagagggtaaaggagaaaggactgtagacacacattttaaagaatctgctagtttttctgttggctttcagatttttctcaaatgctctgtattggaaattaagaataattttaggattaaaggccttttcctccttcggcttctttttgtttctcagagagcaaatagaagagcatttaggcagtttttgctgacatgaaagggtttgggtccagtgttccgggacccagcttgtgtttttggtaaagccttttcctgcctgaatggtcccaggttatgggctcacagcatcatacctggtagtggtgctatggtttttgttatatgaatttttttaccatgctttgaactgaaatgtagtccctgctgcctagcattattctgctggaggagaaaactagggatgttagtgtgggaaaggtatggaggtgcgaagcctagcatttggatgatgtgtgggtgaatatattgtcctcagcacttgtcagaagcaactagcctttcgggatgcctactgctagtttcaggattagtggtcctgtgagacctaggtgttaactaagaaatctcctttccactgccagaagatcagccccggcaggtcttagttcctgtttctcacaccttacacctccacagagtgttgaataagactttcctgatgctgcataatctttgataactcttagtcttgtcactgaggctaatgtgttttagctcttggtgcttttcttctcacctcccatttactcttctgcctgctgctggctcccacgcccaccacacccccaccacacccccatgaggtgctagaagaggtgtgaagtacggagtgcaaagttgcatttgctgctttactatcctttttcccccatttttttttcttggtttccctgaaacgagttctcctggttttcctcttatgttccggatgtctcttcagtcttccattttgtttctttttctttctttttttttttttttttttgagacggagtctcactctgttgcccaggctggagtgcattggcacgacgttggctcactgcagtctccgcctcctgggttcaagcaattctcctccctcagctgcacactcccacccccccccccccccgagtagctgggattacaggtgtgcgccaccatgcccagctaatttttctatttttagtagagacaaggttttgccatgttggccaggctggtcttgaactcctgacctcaggtgatctgcctgcctcagcctcccaaaatgctgggaatatagacgtgagccacagtgcccagcccagtcttccttttcaatgcttgatccctatgggttgacattttccaaggttgcattttcctttcctcctctcctctcccctcttcttttctttttcttgtcttttcagtctacattgagttgctcatatttctgtgcttcaatatcagcagctccctgttttttcacacccatatttccaacagcctatcggacagtgccatctggttgttctgtagatttttctgttacagtccaaaagccaccatattacttctctgtggtccacagcctccacagtgtcaccttctgtatttcccatgtccctccttctctatgggggttcctgcttactcttccaggctctcactgctgccagctcctccagtggggcttcatgtggctcctcctggcaggtgcttctcttgctgcctcgtgagaatgttgtttttccttcggcagattccccagagcaggattgagtcttaccatcttggtatcctaggtgtgtagcatgggcctggtttatagatatattgtcaaatggaattcttcatttcagcccacttcagttatggctttggggaaagatcaggcttacagttgatataaattatagctatagaaaagacacagaaaatcaactcagaatcatagagtttagggttacagtggggcttagaataatcttccttaagtttctctaaagatgagaacaaccagagagcagtgtttctcttcttgcccctctgcagcctagttcccacccaatagccagaatgattgtgataaaacctaagtcagattccttcattcccttgcttaaaacactctaggctgggcgcagtggctcacgcctgtaatcccagcactttgggaggctgaggcaggcggatcacaaagtcaggagtttgagaccagcctggccagcatggtgaaaccccgtctctactaaaaaaaaaattagcctggcatggtggtgggcgcctgtaatcccagctactcgggaggctaaggcaggagaatcgcttgaacccaggagacggaggttgcagtgagctgagattgcaccactgcactccagtctggtgacagagtgaccaaaaaaccaaaaaaccactctactgtttattcttgtctttctcagaataaaagccagaattcttacagtgatctgcaaagccctgcccaaccagcccaccactcttatgctggtgacccagttgacttccctcttgtgctctctaggctgctcaatctgctccagctgccgcacctgactgttggtccctgagcacgccagatacgctctgtctcagggcctttgcatgtgctgtttcctttgcttggaatgtttttccccaaatagctacagaattcgcttctgttaggtccttactcaaaacagacaaaccaaaccaaaaccccacacacatactttgtctctcccttttctgctttgttttcttagcattggtctctatataatatataattatgtatcttgtttatagtctgtctcctttagctagaatgaaagctccatcagggcagggatttttatgttttgttctctgttgaatacccacacctggaacagtcctggcatgaagcaggcacttgataaacattattaaatgaataagaagcattttatggatttcttttttttttttttgtggcagggtctcactctgtcacccaggctagagtgcagtggcacaatcttggctcactgcaacctctgcctcccgggttcaagccattctcctgcctcatcctcccaagtagctgggattacaggcacatgccatcaggcccagccaattttttttgtatttttggtagagacggagtttcaccatgttggccagcctggtcttgaatttctgatctcaagtgatccacccgccttggcctcccaaagtgctgggattacaggcgttagccacagcgctcagcccattttatggatttcttatagccccagttataggtgcactcagggcattaaaaagggaaaattgggccaggcgtgttggctcaggcctataatcccaacacttttggaggccgaggacaggagtctcgaggactcctgtcacttgaggacaggagtttgagagcagcctggccaacatggtaaagccccatctttactaaaaaaaaatacaaaaattagctgggcgtggtggcaggcacctgtaatcccagctacttgggaggcagaggcaggagaattgcttaaacctgggagggagaggttgcagtgatctgagatagtgccactgcactacagcctgggaaacagtgagactccatctcaaaaaaaaaaaaaaaaaaaagaagggaaaattggccaggtgtgatggcttacccctataatcccagtgctttaggaggctgaggcaggaggattatatgaggcaaagaattcaagattagcctggataacatagtgagaccccatctccataaaaaaatcttaaaaagtcagctgggtgtggtggggcacacctgtagtccctgcttaaagggactgtagttgaggtgggagaatagcttgagccaaggagttcgaggctgcagtgagctatgatcatgccactgcacaccagcctgagtgacagagtgaaaccctatccccccctcccaccaccccgtcaaaaaaagggaaaaccatcaatctcggggaaggagaatctgatttttaaaaagcctcatttaagactcgttggactagaacactgacctcgttttcatgtctgactcaaagcagcacctgtgggtccccccatccttacaagtggtttgggaagactcccattttacctctaacaggcatgggcttgctgcggtttctctctgcctgtggtttgccctttaacccagcaggctacaaagatgaaaagcaaacacaacgttaaagaaaagagctagggaagagggcagggggaaacagggcagaatttccttgcagccctgacatcttgccttgtttctgtgcccatccccttgtctggttacacagtcccttccagagctgccttgcttgggggctgtgctcagtcttgagacttttaggccagatgactcttgagttttgctttgatgttgtaatttctttgaagagaaatcttaattttaggcaaaaaggacattggagaacggattctttaaaattaaattaccatctttcgaagtgaagttttaacccttctcaagataaggggttgtccctgaaatttctgcttgcttctgctgatgatgctagtgggaagtcaggattggcaggaccccatcttgtgaaaccaataccgtaaatcctcagggcaataaattcagctctgaagaagtgtcagactcttatgggtagggattatgtggaatgaagtacataatttgtattagtgtaatagtaaagttagaggaatttgcctcctgctcttattgagataacatcggcatggttcctacagggataggaagcccagccaagaaaggcaaaggcttaggaggaagctattggccatgtacaaagcctgcagtgtcattcaccctgggattcaaaggtatcacattgaaaataaattgtctagaatggagctgagttatcagtgagtagttaaaaataatcaaagctaccatttcctgaattctaacaacatactaggaagtaagtgctttatttattaatttagttagtcatcataacaatcccatgaaggaggtagaatcattatctctactttatagatcaggcatggagctttaagtaagttgcccaaaattatattgcttagaaaaggcaggtgggggatttgaactcaggtaggctatgggggccccgcactttccactatgctgtactgtagtctgcttctaggacaaaccaagcatgctcttacctcaggacctttgcactcactattcccactgcctgggaggtttttcctttagatattgtcatagctttatctcttacctctgtgcttaaatgttaccttgtctgggaggccctctctgaccaccctgtctaaaatagcatccctcctgtcatcactctctctccttaacctgctttattttcctttcctaggtcttctcatgccttgacatattatttatttgttgtcttgtctgtccccacctttagaaggtaacctatgtgaaaacaggagtgtgtttaatttgctgctatgtgcccacctccctgaacagtgcccaggacagggtaggcgctaataaatgtttgttgagtgaatgaatgaagtaaactaaaactgctgatcaaggcctgccaccctggtttcagaacaaaataatttgtcccttgtgccagatctcatcagactacccaccaccagaaagtgagtgtccatgcagggcctggttgatgtctacagtggcttagtaataggcacagtccctatcttttttttgaaagtcagctgtttctggaggatctcttgtttgtagtagttaagagcatgggcgtggaattagacagacctaggtttaagtcctggtgccaggatttataagctggtgacttggggttgcttagcatcttttttttttttttggtgacagagcagagtcccactctgttgcccaggctggagtgcagtggtgccattgtagctcacttgcagccttgaacttctgggctcaagtgatccccctgcctcagccttccaagtagctaggactattggcatgcgccaccatgcctggctaatatttgtgtttgtatttatttatttatttattttcagaaactcctgatattcaaattatttttattttttctatgtttcccaggctggtcatgaactcctggcttcaagggagcctttggcctctgcctcccaaagtgctgggattataggtgtgaaccactgtacccagccttacttagcatcttgaagcctcacctttctcactacaaaatggagtaaagggcatctgtctccttgtattgttgagaagattaaatgggaaattgtgatatacatgataggtgttcagtagatgataacagacattttgtgggttcagaagaaagcagagatgtcagcttctgacaggaaggggaatcaggtatagacacttgatcaaccacagaataattacaaagcagcatgtggacaagtcttggctttgtaactaagtagctgtgtaaagctgggccagtcgttgagcctttctaatttttggtttgctaatctgtaaaattaaagggtcggagtagatactacctgttctagcattccaaattggctctgactagaagataacatggaacaaattatacacaaaatgataagtgacagaatgttcacagtaggatgggattaatcagaagtctcttttggaatgaggtgaggactattggtagagttcttggactttgaggaatagcataaagatggcagattgtgataaaatggttagatctgacaaaattcaggttttttgtgtgcttacattgttgggaagatactgcatttaaataatttttgtttacgtaagttatatattaaaatagctaatgtagtattaatattctgtttattcttatgttgccaagttgaatatttttcttggataacacttttctgttttgtgaagttattcctgctagcctttacataattatgcatttcagatttccacaagtgtgtttgaagtctcattttctagaagggattcaggattattagtccatgtaatgacaattatagtatgatatagaataaaagattttcttgtttaatttcttcatattagaaatgagggaagtaggatgcagaaggtctgagctggtaaaacatgctgatggtcgcactcctgcctccttttcctttgaggatgcctgaggttcttatacataactcttgttattgagaaatgttctaatttatcatcctgctgtactattttttcttttttcttttgtttgagacggagtctcgctctgttgcctaggctggaatgcagtggcgtgatctcagctcactgtaacctctgcctgccgagttcaagcggttctcctgcctcagcctcccgagtagctgagattacaggcatgtgccactacacctggctaattctgtatttcttgtagagatgtgatttcaccatgttggccaggttggtctggaactcctgacctcaagtgatctgcccaccttggcctaccaaagtgctgtgattacaggtgtgagctaccactcccggcctgtactatttttattgtagtgtgcacagtagtatttatacctgtagtccactgtggtaccctcattagatgcccgctgtcagccaagtgtaggtagactgtgatccgccttgctggaattaagacagtgggaaagccatacttggaaggaaataattacataataattacaacctgaagggttgtactgcgttctaggtgtccaagtttaacttggtccaagggaatcagaggaggcttccttcaagaagtaaggcttttgctgagacctgaagatgttagaaagtgaccatcctagggaccatggagggatgttgagttccgatatagtgaacatcacttttggaaggtgaggacttggcccttttgtgggactgaattgacactagtgtggctggagtgtgcagaagatgagcttggactaactagacgatggttggtggccatgtgaagttttgctgtttatctggacggcagtgggcaaccattgaagagttttaattcttagtgtttcacatgcctgggctctaaaccaccacacctggtgcacttttaaattttttgtagagacagcgtttcactatgttgtccaggctatcaaaagcttttttcaatggccaggtgcttgctagggcctgagggaggatgactgttgtcctgagaatattctgatatgctgaattttgctcgaataattacagctttatgatttaaacctttttgatgacagctgattcctcattctaggtagcttggttggtttggtggcagtgccagaccaagttccacagcccccagctgaacccctgcagctaattgggaatcatcaaatagaatcgagaagggccctgcagccagatccctgtaacttataccagaaatgttgaggcaatggcttcaccaccatttggacagttttgctacattatgagtatctttagaacccataccttgtatggaatttggaatcatttttttgtgatggagggaatttttgaaattctagatgataaagtctaatctcaaaaataatacaaaatttgctataaacaactatttctgttgccttgctactagtagtttgcttattttctttttggaagtctaggtatattttaaccataaaaataccaatgactattatttatttaaaatagacagtgtggggccgagcacagtggttcacacctgtaatcccagcacattgtgaggctgaggtgggttgatcacctgaggtcaggagctcgagaccagctgggccaacatggcgaaaccctgtctctactaaaaatacaaaaattagccaggcgtggtggcacatgcctgtaatcctggctatttgggaggctgagacaagagaattgcttgaacccaaaggcagaggttgcagtgagctgacatcgtgccactgcactccagcctgggtggcagagtgagactccatctcaaaaaagaaagaataaaataaaatagactgtgtgggccaggtattgttttaggtaccatgcctatattctgtcttatattataatcaaaatattgctaccattttacagatgagggcgtggtaggggctaaatgacttttccaatgtaacacagctgggtaagccaggttttgaacccccaaatacagttctttattaattctagcttaaaagcagacacccttataaatgaaaaggtacagaaacctttggatgcaaaaatcttaaatgtgaaaaggtggttcttagagtattgcaagggtgggtgaaaaagccatcctagtttgtgagtttgaataaaacatggtcttttccaactttgtgaaatgtgtcaacacccaccctccctttttcctgtattttccttgggagtgaggtgtgttgtgcttgggatagatggaagggctcttaaggacggactgaagttcggccccaaggaaaccaaggctgctggggccagatttgttgatcatgctcccagccaggaatgagggtgggcctgctctggagggacagcccaccttgcctctgaaggcagccggcacagaacaggcagagtggagtcaggcttctctgctctcctcgtaccctctgtgcgtactgcttcccccgtgcctaccagtacaggtggttccagagtaatcttcctcctttcttttcctgccactggcagccacagaatgttgggactaattaatctgatacctcaggataataaatctctttggtagaaacagcttgctaatgataaatgatagttttaatactatacatgcacaatctcatttgattcttgcaacaactctgtgatgtagctaagttttgtctgttacactctttacaaaggaggaaactgaggctccattctgatctaaacctccatcctttcttgtctgacatgctgtgagaatctcaactgattgtccaggcagtctggcctcccttcagtctgttctctgtacagcgtgagggaaatctttagtaatcccatctgatcacgctattccctgtttaaacccctccttgaacttattcgtcttctctttccctttcagctctgcagctctcctccctcctgtaatgcttcctctgcctgcagtgtcattcatcacctgacttttaaaatcttcgcttatcctcaggttgcgtatacttttcctttagagctctgattatatcgtgtagttacatgtttgtgattattgtctgtttatctcaccagcttttaagcccacaagggcaaaaaacatgtctccttggccactgcttagcagagtaagcaataaagatttgttgaaaggagaaactcaggaaattaaatgtcttgtgagaagtagtaaatgatatttttactcggatataagctccctgagggcaggatttttggcgtctttttttcattgctatatccctggcatcttgaacagtgcctggcatatagcagtaatatttattgaatatcagttgtgcttggatgtgattccgaagatttcttatccaaatctaggactttttctctcattgtgccaaatctatctgaagatggggattagtttagttctgattctgaatcaactcatggatgtagccaggccatgttagccatctaaggggaagctactaattttttcttactggtttttagcctattgccagacatccattttgccacagtttttctcttagatagagcaagatttctctcctcaccttagggaatattgtacccaaccagatccttttgaatattggtttagaacgtgatggttttgaggattcatttggatgggattttttcagctaatcttggtctttacctgtgcactctgttgggtcatgagggcatgtggggcagtatgctcagtttaatggactcagaaataaacccaggggatctctgaaattagcagaattagcagcacatttgtttgctttttttttaaacccattaagttctaagaattttctttttttttttttttttgggagacgtagtctcgctctgtcacccaggctggagtgcagtggcgcgatctcagctcactgcaagctccgcctcctgggttcacgccattcttctgtctcagcctcccgagtagctgggactacaggtgcctgccaccgcgcccggctaattttttgtattttaagtagaaacggggtttcaccatgttagccaagatggtctcgatctcctgacctcgtgatccacccgcctcggcctcccaaagtgctgggattacaggcgtgagccaccgcgcccggccaagttctcagaattttcttatgttcattgatgaatactaagtgttcttcagttcatcaaagttcacctaccttttaaatggaacatgttgctttgaaatgtggggaaaatgactattattccaaattgctctttcatgatctcagagtaccctatttatatttctactttttttttaaataaatactttaagttctagggtacatgtgcacaatgtgcaggtttgttacataggtatacattaggtatacatgtgccatgttggtttgctgaaaccattaactcatcatttacattaggtatttctactttttttttttttttaagtgaaagcaagtttattaagaaagtaaaggaataaaggaatggctactccatagacagaacctatatttctttctttctttttttctttttttttttttttgagatggagtctcactctgttgtccaggctggagtgcagtggcataatctcggctcattgcaatttccctctcctgggttcaagtgattctcctgcctcagcctcccgagtagctgggattacaggcacgtaccaccacgcctggctaacttttgtatttttggttgagctggagtttcgccaggttggccaggctggtcttgaactcctgacctcaggtgttctgcccagctcggcctcccaaagtgctgggattacaggcatgagccactgtgcccagccagaacccatatttctaaagaaagcatttagttcataaagtccagagattctttgaggtcaaaaagtcaggattgggagtccctgatgtttgcagtcagtgtggtagaacctcacagaagaaagaggagtttgtatttcgttagttttatcaaagctacaacttttcggaagccttcagtccatccagcattccagggaactgattcctaagtcgggtgttaaggcactgaggtgtacaagttgtggccaaaactggagttcagctgaatgagaatgacacacttcccttttgcttctcctctgccttgggagcctttcaccacactggggagattagacaaaaaccttctgcagtttattttctttttgaacagttacattatggagagacttttaagctaaaagaagaaaagctccctttttgttacaaacagcagtgtgtagtttcaacttgtccaggacttcctcagagatgttttaagatccggtgtaaacttgctgtggtttgcctttgggcatcaaactgtttagcttggctctattatatctgtaattgctgcattttaataattgcccaatattcttgtcagcaatttgcagcctatatttttaatggaaccatttgcctttcttttccacaggtttgttcagacctggcttaagcccctggattaacgcagcacagaccctcagacccactgcagctgtgggcagggtgacgcaagctcattaaatattcccacaagcctcgtgccgcttacagtttatgtgcttcataaaatcctctgggaagtcatcttcttctgagatctccttacagggatttgctttataaaagttgtctttaacatttgctgaaatagcatattgtttcagagaggtttttccttatcaaaattattatataggcaggaggcactatagttcttgtgaaccaattcactaatttagggaatctaatatttcgaagggaaaaaaatagagacagatcctctttgtggtggttgaatttttaagttaacggagaagatttccatatgatcagagttgatgtggaattatggtgacagaaatgttcgacttagagggataataagtcagtttaatggctcccaaattatctctataatttagtcagcttttgagacaagaccgttgtgtcattgatgacttatgcctcaacttgactggtaattttgttcttttagtgagtccactctttagcttatctccttttgactgttgtaatgtttatttttcagtaaacaaaagattgaactggatttacagtagctaagaattacataaatagctatatcttaatttctccactttattggtataaatagctcaaagagaatggacaagtagtgatacagtacagtaattgtagctaacatttatttggttggttgttacgtgctagggactgttctaagcattgtgtatgtatattaactaactgaatcctcacaacagcctaccatacatttcctaccacaggatatgttcattcaagaagagtaagctgcctaacattaccatttggtaaggggcagagtggattcacacccaggcagatttttaatctttatcataatccgtatgctattcatactaggattttaatcactatcgtatatcaagattgaaccatagtggcctcctgcctatataataatttagtttcaagacatatctaagaaattctttttgaaattggaactttactgttattatttctggataggtaatacttgcacatggtattaatacaaaacccagaagggaattcagtgaaaagcttctgctccctcccacccctgtcctgcagtcaccctatttcccccgttctcataggtaaagttacaattgcaaagagccattttaaatatctctctttgtcacttgatgcaataaattaagaccatttaattaaaaactcatttaaaataattttttttgtactgttatctacaagcgcccacattggctttgtctctgaaggtagctatgggcaactcctgttgcgtgatatttcctgagtgaggatgacaaggccacaacccccaggtgtgtgagatggctcccggaaatgccaccattctgccttttccagggcttagatcagggagggtctttgcacttttacccataacttttattcttgatgagaaggaaccatgcctggagcatagtaaatgctcagtacatgtttgttaattgaacttctgtgagttgtgccaggctcagggatagagggctggagaaatatactttggagtgtctaaatcagtgaccattagggccgtgtgaggaatattcaagttaggcaaaccaccacaaaactctcattgaagactctggataggaaaaggttagaaagaaccttctagatccttgagtccagtaaccagatagtctcagatgggctgagagacagggaagacttttttcctgttaaaatgttggcaaacagttgaaataagaaccttgcctttttatgtttctttatttttttcagattgattcctagcacaacttaatttgatccttgtgataaccctgttattataacattagattgagtctctaatcagtgctggttttgttttcttgctggcactagggttgcatgtatcaagtgtcattgattactttggtaccacaacttaactggtggtgttatatttcaggtgcaccttgattttcttctgtagttctgaaaattctctataaaaccaaagatttaaaatgtcaaaaacagggccgggcgtggtggctcacgcctgtaatcccagcactttgggaggctgaggtgggcagatcacgaggtcaggagttcaagaccagcctggccaacatggtgaaaccccatctctactaaaaatacaaaaattagccaggcgtagtggcgcatgtctgtaatcccagctacttgggaggctgaggcaggagaatcgcttgaacccaggaggcggaggttgcagtgagccaagactgcgccactgtgctccagcttggcgacagagagagactctatctcaaaaaaaaaaaaaaaaaagccaataacaaatatgtcatttgcaaaagtatttgctataaaaatctttattagatagtcactgccctcagtctagtttgcttgagtgctattttgcatcttttaagataaatttcttacattacgcttttcagaaattctctgtttaattttagtgtctgtttgtttatgaagtttcttcattaagttttcttattgaaatttgttttacaggcagtttgaaaattgcaaggagggactttaagactacttctgatttgcaaagattgtctgtgctctgagcaggctgaagtgactggacgagacgcactgttggagaaataaaaatgacttcccattatgtgattgccatctttgccctgatgagctcctgtttagccactgcaggtaagttgcataatataaattgcatatttgttatatatttttggatatattttgtcccagtctctttagttgagatgaagtttcactctgttacccaggctggagtgcagaggcataatcatggcttactgtaggctctacctcctgggcttaagcgatcctcccacctcagcctcctaactagttgggactacaggcgtgtgccaccatgcccagctaatgttttattttttgtagagatagggtttcctatgttgctcaggctggtttcaaactcctgacctcaagtgatcctctcttcttggcctcctagcatgctggtattacaggtatgtgccactgtgcccgacctgtatttacatttttgtccctgaataaggatttcaagaaagcatttttgtcctttattagcaaataaatagatcttctagattgaggtgacactcttgacataggctgcttgggaggtatttagttttgcctatttcacatatttcaatatgtaaccttttttttttttttttttttttttttttgtgggagacagagtcttgctctgtcacccaggctggagtgcaatggcctgatctcggctcactgcaacctcctcctcttgggttcaagcaattctcgtgcctcagcctcccaagtagctgggactgcagatgcctgccactacacgtggataatatttgtatttttaatagagacagggtttcaccattttggccatgctggtcttgaactcctgacctcaggtgatccgcctaccttggtctcccaaagtgctgggattactaactttttaaaaagtagagaaatacactgagcttcctggaggccaaatgagattggagatgaaaagatgcaaatgacttggaacattgttgcttaactaagagtatcggatctcccacaccaccatcttagtgtgtttactgtgaggggttacttagtaaatttggaagcttaatttgctctattttattataatttccattgtgtctattctgtaatgagctacataaaactaatttgttggaccagttctggaaactggcaggtctcagcaagaaaagcattgactcgaaaagtgattagctgcttggttttggctgttgaattgcacatacagatgagagtgatagtaatgatcatctattgagtgggcactatatccaggcactgggctaaacaattaaagaatataaaaatgaataaggatattcttatttaatgagctcacttaatcacaacttggaggtagaattaatttggcattttataaatgatgaaatgagatatggagagattaggtaacttgcgtagtgtcatgtagctggaaagtggaagagccagattttacattcagattttacatctatgctcttcacctctgtgttatactgaagaaaccagatctcccttaagactccaatagactcagatctggggttgtgtgcagacgtagactaagcgagagtcagctggcagaaactggtttatggattggaaagtagaatgttcctctcattgcaagtatctttttttttttttttttttgagatggagtctccctctgttgcccaggctggagtgcactggtgtgatctcggctcactgcaacctctgtctcctgggttcaagcgattctcctgcctcagccttccgagtagctgggactacaggcgtgtgccaccatgcctggctaattttttgtatttttagtagagacaaggtttcaccatgttagccaggctggtctcgatctcctggcctcagcctcccaaagtgctgggattacaggcgtgagccacttcccctggctataaatatcttgaaagaaagttgctaggccttttttgttgttgttgttttttgaatgccagtttatgaatttcaactgcccattctctatttttgtctatcagcagtttcattttgtctcattattgaagtgctatttgccttttagcctgtgtattaaaatggaattgacttaaaatctcatcgaaaagtagtagaaatgcacccccccacccccacctcccaaaaaaaaagagagagagaaagagggagagaagcggcttgatggaaaacatgctgttttgatgacaagatgtctagtctcaccttgtgggtttgaggctgggctttctgccttcattgatgcctgggtcagactgaaaaacacaactgaagaaggcactttatgggaaaggagtgagttcaatggccctgtccagccttgatgaatttgatagtgaatcagttttgcttcagatcttcctttcctatttgaagcctttgggaaaatatacacacaagtatatatatatttgagttgaatacacactcaaggctttgctgaggtggaagggacagtagagttacagattttttttttttttttgatacagagtctcgctctgtgtgtcacccaggctggagtgcagtggtgccatctcggctcactgcaacctctgcctcctggttcaagcgattctcctgcctcagcctcctgagtagctgggattacaggcatgcaccaccatatccagctaatttttgtatttttggtagagatggggttttgtcatgttggccaggctggtctcgaactcctgacctcaagtgatccacccccttcagcctctgaaaacgctgggattacaggtgtgagccaccaccgctggatgaattacagattttataatagcatgaggcaactgataaatagcacagaggtatggatgcctttttggtgtagaagtttgttggttgtttcccttttgcacaacataatagatcaaatgaatgaagaagagggaaattttgtttttttttttttttttttttgagacagagtctcactcgccccggctacagtgcagtggcacaatcttggctcattgtaacctccatctcctgggttcaagcaattctcctgcctcaacctcccgagtagatgggagtacaggcacacgctgccacgcccagctaattttttgtattttagtagagatggggtttcatcgtgttgcccaggctggtcgtgaactcctgagctcaggcaatccgcctgcctcggcctcccaaagtgctgggattacaggtgtgagccactgtgcctggctgcaaaaaaaattttttatatgctaatatctgatatttttctctgtaggcccagcatactttacaaaatggttttttgggcgttctggatgagctgaatttagctcatctgggtagttataacaatgatgaatatttcaaataattactgtgtgtcaggccccaaatttctttacatgtattatctcatttcatcctcataaatactctaagaaatatagatactttaataatccatagtttataagtgaggaaatggaagcacagagaggtcaaataactttcttaaggtcacacagctaataaatggcaggtggaactataaacctacttagtccaggtctggagattgagcctttaggcctctctactatattgatttgaaggaaatcatttgtttggaaagaatggtaataggttttgagccatttatgtcctcctgaaacattaaatcatttattcactgatccctgctgagtacaaagcacagtagtagtcacttagggatatacatgcaaagaaatgtaagattcgttcccaccctattttttttatttttggagagatgggatcttgctgtgttgtccaggttgaccttgaactcttgacctcaagtgatcctcccacctcagcctctcaaagcactgggattaaaggcgtgagccactgtgcccagccatattcatcccttcttttgagttgcttgtactttatttaggcttataaaatataaccatataaccaaataatgaatgtgtagtgaaagccaagtaaaacccaaagacctcagaggggtcacgaggggaagccctgtgggtcagagtagccagggacagctatgtggaagctctagatcttgaactctgtcttgaagactgggcagaatctaggaagaaggaggcactgagttcaccaggtgggaaaacctggcctagcacggaatgtggcatttaggtgcttaatttttttttttttttaaataaatggatgacctggagagctggtgtggaaatgtagcaggaggtctatttggaaagaaggatggagtagattatgaaagttcttaaatatcataatgaggcttgtggattttattctgtggtttggatgctctcttcttccatcccttggagccaaaggcatgcactgtttaatcttggaattcaaacggtggcctcaaacagtgaggctgagtatgtggcctcattagcttcagacccagcagtgcttggctcacaggctgtcatttatcaagggcttgatctctgccagctaatttatttaagacaactctatgagatgggtattattattatcatcacctccattttacaaacaaggaaattgagactcagtttggttaataatttgtacaaagtcctggaactaataagtggcagagttgagacttgaacctggcagtttggctctagaatccagcccatcaaccactagatccttctctagggaggagaccctgtgtgtgggatgaataaacctcttcttgattgattaaataccaggtgagtagctaccagtgtgacatcctggaaccagattaagcccctttggcctcagaagagacagacacaggtcatcagagcagaaggaccctcaagtagtgggccttctttattcatattctgacttaaccaaagtggccttaaagctgtaaatcggtgggaaggtgtggaggtctggcagcagaggggtgaaggttgtcaaaggcctccttttggttatgtggccagaggaggggcagagcacaagggagcacgtaaattgagcccaagttagaataataggagcctgcttgttccagctccataggtttgtctgggccttcagtgaaaacctttctttccttctctgcttgtgatagagagtgaatgaaggcagtcggggccgggtgggtcgggggatatccatgtcccagtgttagtgttgttctgacaaaactcatgctttcggctgggcgtggtggctcacgcctgtaatcccagcactttgggaggccgaggcgggcagattacgaggtcaggagattgagaccatcctggctaacacggtgaaaccccgtctctactaaaagtacaaaaacaaaattagccacgcgcggtggcggacgcctgtagtcccagctactggggaggctgaggcagaagaatggtgtgaacccgggaggcggagcttgcagtgagctgagatcgcgccactgcactccagcctgggcgacagagccaaactccgtctcaaaaaacaaaaaactcatgctttccctcccctccctcgttccttcgttatcatatagcactgttgaggatggagggtggactgtgctcttggtgaacacgagctgtgtaaggaccataatgcctcttgattagaaattagcttaggtgatttacttgggttaaaaaaaaaagagagagaataaatacaagagatttattggggttaaaaacaaaaaagaaaaaaaaagaaattatctaaggttatttattggcctcttagatcctgtaagctacctaatgtaagaaaagtgggaagtttaaaaaataagtgcttgatactatgggcttaagtctaagttttgctttaaaaactcgtctatacttgtgttataacattactattattgaaaatatctgctttccaggctgaagtgattcatttattattctagttctgctttcctcctttgtaatttgtgataattgtgcttttctttttaatacaaaaaatggataaaaataaaaacttgaaaaggcaaaaacaaaaacaaaaacaaaacaacctcccaactgttctacacatctttaaaagatattagctgctgcctctgaggcttgccaacattaggcagggctatgtttccaggagttttagtaataagaaaaagaggcatgcatggagaattcagggaaatcagttttattggaagggctggagttatcactggccccttgtgccaggtgagaggggtgccgctgaggtgagctctggagcagggctgctggcattgatgccagtgggctcttggtggaatggctaacttcttcattccactgtctcaattcagtacccagatgtatccttttggaaactcgcctgcaaactgtgcacagatttctattgagaaacacatttcttttcctctctactggatgtacctggaattccaggtagagtccacaggaaaatcgagatgcttttagtctgagctattttcctgctcagaaagctctgaactctttgtgtctgtgggagagcaagctgagataccagctggttaatacttggtctggaatggtacaagctggcagccttgagtagaggctaataataccatattgtatttgtaatcttaaaaatgtttttataacaggtatttcatttgatcctcacagcagcctctgggggtaggcaggcactattttcttcatttctagaatgagaataatagggcttagagaaagtaagtgatttagaaagataattcaagtcttggttggaccagaacttagacatgcttttgcagacaaactgcaccaacaaatcctgtgacctttttggtatagtgcacccttagcacctcttgacaaataaaaattgtatatatttatggtgtacatcatgatgtttttatacatgtctacattgtggtgagtaaatcaagctttttaacatatgcataacctcacacacttatcattttttgtggtgagaacacttaaaatatactctcttaacaattttcatgtgtaaaatatattattttttttcacatttttatagggggctgtaggaagggggcctcctcactgtcgagtgaggtggtcacagtttctttggcagctccaagctgggcactgggggtcctggaggtggctctgtatgtcagcatgttcctaccaccttggaagggcactagatagtttcagggcgtcacctggttggtcatgatgttgtacttggtaggggctgagtattggcccccatggtgaaggacatgactggcaccagctccatggcccaggcatttttgaggaaggcatgagtcctagaggggtaggtgagtgggggtcacctctacaggggtcatggccatcttaggctcagtggtggcagtggctactataataccttgttattaactatagtcaccatggtgtacagtcaatctcttgaacttattcctcctgtctaattgaaattttgtatatttgaccaacatctcctcagtccttccacccccactccccagcctctggtaaccaccattttactgtttctatgagtttgactttttttttgggagggggtgggatggagtctcactgtgtcacccaggctggagtgcagtagcatgatctcagctcactgcaacctccgcctcccgggttcgagtgattctcctgccttggcctcctgactgggactacaggcatgcgccgccacacctggccaatttttgttatttttagtagagatggggtttcaccatattggccacgctggtctcgaactcctgaccttgtgatctgcccgccttggcctccaaaagttctgggattacaggcctgagccaccgctcccggccatgagtttggctttttaagattccgcatataagtttgatcatatatgatatttgtcgctctgtgcctggcttatttctctgagcataatgtcctccatgttcatctgtgttgttgcaaatgacaggatttccttcttttttaaggctgtatagtattccactgtgtatatataccacattttcattattcaatttattcatttatcctgtacttgaaagagaaatcttggatgtgagttaacggcctgtgaacctcagaggtggttctgccatagttatctcctgtctgccaaacgagtgatcaaaggctgtaatactcataagggcaggaaggctggagggtgctggcaggggactaccaccagggaatgtaaggatagaagatggataggctcaaaggttcaaagcaaactgaaaaaaagccccctcccctttttttcttcttcttcttttttttttttttttttttttgccaaccctcaggtcttagaacacagctagttgatttggtctgtgattattattgtttttagctgattattttatcttatttttattttatttgtttttttgagacagggtctcactctgttgcctgggctggagtgcagtggcgcgatcatggctcactgcagcctcgacctcccaggttcaagccattttccccccacagacccccaagtagctgggactacgggtgcacgccgctatgcctggctaatttttgtgttttttttctgtagagatggggttccgccatgttgcccaggctggtttggaactcttgagctcaagtggtccacccatatcggcctcccaaagtgctaggattataggtgtgagccatcatgcctggcctttagctggttattttaaccagttttgtgtttaattctgctttttgatacacaaggaaaggatattgtcaaatgtgataccagttatcaccagagtgccaaactttattttaaagagcaaataactgctattaaaagacctagagtggcatggtggtggctgcctgtaatcccagctactcgagaggctgaggcaggagaaccacttgaacctgggaggcggaggttgcggtgagccgagatggcgccactgcactccagcctgggcaacaagagcgaaactaggtctcaaaaataaaagaaagacccagagtggatagggtagcctgcattttagagtgtattccctttgaggatattgtgcacagccaagtgtgatgaagcacctccccacctaccttctccattagatttttctacagaaacagcatgtgcgtgcatgcgtgtgcaaacacaacacacacatgcatgcgcacacacacacatacacacacacgggagttgaggcagtagttgagagaaaggtgagttcatttctcaaagattcccttgccctgtatggacctgtgtgtgtgtggaggtggggtggatagcctaatgcaaggccttttactttttttttttccctgagacagggtctcactctgttgcccaggctggagtgcagtggcacggtagctcactgcagccttggcctcctgggctcaaacgatcctcccacctcagcctcttgagtagctggaactacaggcacatgccaccacacctggctaagttttgtattttttgtagagacaaggtttcgccatgttttccaagctggtctcaaactcttgagctaagcaatccacctgccttggcctcccaaagtgctaggattacaggcgtgagccactgtacctggccctttttatcattttcaaggagagtttactaatagctagttgggcaactgaatgtgcatatagtggaggggaggatgtttaccaagaatgagtaagattattgctagatgtgatgttagccaagtcaagagaatcgaggtttctctttgctttgcatccttatcgtaggctgtataattgccacccagctttctggatttctgattgatttgggttattttaggacagcagtgatggtgtgttttacagtgatcaacacttccatcaagacacagctttatctgtatgtgcctacacagctctttaattgctaaaagcttacccttgcacacggttgtgtatataggaaattagactttctcagcttgtttgctttggtaattaatccaactctggaggtatctttatcaccccatagagcttcgagctctgagcacgctgattttggaagtgatgtaggagcagggagtgttctgggaagtgttccgggaagcgtgccagcaagaggccttcctttaggactgaccctgctcagcaccgaggcgcatgattggcccatcccgcaccacatccatggcagccactgactttcattttctttaaaacgatctctgccagaatggcctaaaaaacatttatcctgaacttcaatctagtcatatttttgttttctgagagggcactgtcaatcaggtggaattctagagggctgaaaaatgccatagctcttggaacgttccttccaaggagtaggcagcaggtgctctggggactgaagcccagctattcccctgccctcccttgccagctcttaaacatctttaaaaaaatctacagtgtaatgtggaaaattttactaccttcaaagggaaatgttgatttaaaaaattattttaaagttactctgtttgttggcaatgaggggaaccatatatggcaaaaggaaaaggtcttgataaaattgctctgtgttctttgttttgcttccttttgtcctcatatgcctgagtaactgcgtcctagtccagaagattgaccagggccatctgagtaacacctcccttccttcctactctcctactccacccatgaggatacacaggtagcataggcctcaaaggagggcagaggttcagcctctggagtcagcccctgctctgcattttttttttttttttttttttttttgagacagggtcttgctctgtcacccaggctggagtgcagtagtgcagtcttggctcactgcagcctcaacctcccaggctcaagagatcttcctgcctcagcctcctatgtaggtgggactacaggcacgtggcaccacacctggctaattttgtgatcttttatagagatgacatctcactgtgttgcctaggctggtctcaaacttctggcctcaagtgatctgcccaccttagcctcccaaagtgccaggattacaggcgtgagccaccacgcctggcctccctgctgtgttgttttcatcattgaccccgctggactgctacagcattttcctgtgatgaacttttccagtgggatgcacctgtgcatgacaattatgttgttaaattgctgaaagttaaagttataatactacatggtgaagcaaaatgctctatagctcctgcccgcccttatcttttccttttgagttaattagaggacagaaccacttattttgccttttctttatacttttaaataactactatgttttagatgaagacttgtagtctggtcaacgttaagtacctcctaagattcaggtactttgctagcttctgaggcacagaaaggggagagactttggggttagtgcaaataatgagttttttcatttttttctttttctttcttttttttttttttttttttttgagatggagtcttgctctgttgcccaggctggagtgcagtgacgcgatctcagctcactgcaagctctgcctcccaggttcatgcattctcctgcctcagcctcccgagtagctgggactacaggcacccgccaccatgcccggctaattttttgtatttttagcagagacggggtttcaccgtgttagccaggatggtctcaatctcctgacctcgtgatcggcccgcctcggcctcccaaagtgctgggattacaggcgtgagccacctcgctggccttttcatttttttctaatacagttaactttcctaaagtgttgattgattgatttaacaaggatttactgagtacctattgtatttcagacactattccaagtgttggagagatagtagtaaacaaaacagataaaaatccttgtccttatgaagcatgtctctagtggagagagaccagaaacaaacaaaatgcatatatcagcaggttcgtcgaataaaaagcaaagaggttggggattgttagcggggattgcaatttgaagtaaggtgattaggaagggcttcactaggaacattgagcaaaggtttggaggaggtgagctaagtggatatctggggaaagagcattccaggcagcaggaaaagcaagtgcagaggccctgtggtggaagtttgcttgcagtgctcaggcaatagcaggtgggccaggtgcctgctggaatgggaagtcagagagttaactgaggggtgggagacggtgcgggtgtgtatagcccaaggcattgcaggccatcataaggttctcactctgaatgacactgagccattggagagtttgagcagaagaatgatatgatctgaaggatgtcttaacaggaccactctggctgctgggctgagaataggctgttgggcaaaggtggatttggagatactggcaagagataatgatgaccaggactccttattagaaggaaggacccttgggagtcatatgcttaggaaattcagaatgatgcttttgtaatttttccccaacctattccttttgaggaggaaagtggataaagatgtatttctcacatcagtggaatactgtgccatagcctaatattaaagataattacatctatagaactgaaaaagctgagtcttaaaacacaaaacaacctccccaaaccatctaaagaaaatctctttgtgttgtgaatgaatgtccttgaaaaatcatcgtcttaatagcctaaaccctcttttccttgcttacttaccctcctgatttccaagtcttgttcttttcatttctcagggggcctggttttcaggatcatgagttttgagggtcttaccaccttttgcagaagtgcttcttacagtgttgtaaattacagtttcgaagaaatacagttgcatccagttttacatagtaaatgtttctgagttgtaggtcaacctatttttataagttaaactacatattaaatgtgagcaaggagcatgatacagcagatttttttctataaagaaaataatcacttttaaatatattttataataaggatattcatagtggttttgccagaggtgagtggttttgccagaggtggaatataccatcttgtttatggaataggaagttttgcttttggagtttgaggttataaacaaatattaggccagtgctttcttatatgcatgagaatcacccagggatcttgttaaaatgcagattctgttttagtaggccttgatgggtcaaagactgtagatttttaacaggctcataagatgctgataccgttagtctgaggaccacatttgacagcataggtcatctgttttctcaatgcacaaattgtaacacagaaactgcaaacacctagacaatttcttagtgccataaaagggagcttgattttagcatgcctttacaacagctaccttgaacacctttggtaaacttgtttgggtcagagggatccatgtgctggagaggaaattggtttgaggcagtgagttccacagatgcctttagctctctgactgtaagtgtggtgcacctgcagaaaccaggtgcatctttattagctggggctacaccttgacataatcctaacagttgttaaagaaggaattcttcccgcccccaccatttcttccttttatgtgcctcttttgccttgtctcatttcttgccttgtgacttagtagaccaaggtaggagattcgtgttgggtcactgagggcggggtcattggtcccggaacctgtggccaagggactcttcggtaatgagaggtgatatgggctgagtggataaaagggggactttaggtgggttagcgagggtggctctggagttagggactaaaagttaaaagttgggtatacctcatttctgctagcagggctctaattttctagctcaggtttccccattgacttcctactttattctttttttttttttttttttgagatggagttttgctcttgttgcccaggctggagtgcaatggcgtgatctcggctcactgcaacctccgcctactgggttcaagcgattctcctgcctcagcctcccgagtagctgggattacaggcatgcactaccacgcctggctaattttgtatttttagtaggaatggggtttctccatgttgctcaggctggtctcgaactcccaacctcaggtgatctgcctgcctcatcctcccaaagtgctgggattacaggcatgagccaccgcgcccggccctactttattcttataatcacactccagtctagagcttttaaaaaattaacattttttagaagggaaaaatttctgtaagttgtaattgatgtttattaagcaccctgacaccacatttattataagtggggataagactgagaatatttaagctctgtgcctgaaaagttgtgttttaaactaacttttatttgtttacactgccattgagtagtttataaggttttctgatttgctttctctggcctcatcactgtttttggagaggcagcgtacaacctatgtacagctctggagctcgccgcaagactcaggtggtggtcattctgcttttgaaattgaaccagaaaagtcctgaggaatgtaacaatattttttctttttgcccccctgctagcttttttctagccctcccaaaaatgtgtttatgttgctgtccatgcatgtggagcagtctggaattctgtgtgacattagatagtgaaaaaaatagatttcccacgtgactgaggttataggagtgagaaatcttggattatgcaaggactctttgattggaagaaggacattttgagatgagatttattttaagatatagtaaaaaaaaacctagtatacaactttttgtttttttctaaactaacccttttcgggggtgacaggatggggtgtggactagaagcaataccaaacttttaagtatcaaatcttcactcagaagaaaaaaaatgtcttcagggtgaaagaatagctcaaatgcgaaaagcctgatagttatataatttgagagtagggtctggcatattatagaggactccgagagcctgatccaagcagcctgccattttcatcaccccaggattatctgtaaggacaactttactgtctgtcacctgccaggtctcagcctggcccttgtgagtgccaggaagtttgtgtcctctgttttgccaagcttaattagctctagaaataccctatcaaaggctgtctggcagtgttccattaatggtatggggtgaattcaaaagcactaattaattgttagattatttgcaaagcccatgctgaaaaacctaatgcctgcaggagaaagttggcagagagacggtacagagattagcttggaccttacccggctcaattgcgttttggaattgggccaagaggggagttgcttttctttttggagaagtgcttgtggctatattgttttctaaactgccagtgtactgctctaggctctccgtgagggagctcatatggacacttgcagacctagagagcccagagaccatcttcaagaggttttgtttatttttgttttgtgagagaaacacaattgtttaactttcattaactaaataaattcttcgcaagggcctcttcttaaatagaggaaaaggaactctagtttgtagtgtaacaattcaggttttaagtgttaaatgttcaaaggagccaggatcagggctttaaatagttttttcttcttaaaataaaacaagtcaggttcctcatgtcctctgtttaggtggcccaggtcagcaaaaagtgaattttccaactgctactgcagttggaagatgctgtttaaaaaaatcttcatttgaaatcaagtgcatgccaatttaaggtcagggtatactacatgcaggaaaggaagaaacaggtaaacaggtttgcattattttgctacatttgacatatagaatgataacacctataattaactcagcttgacaaattgtagacaaataatagaagtccctgtcccttatagatgagagagatttgaggcttttggagccaagtgccagtttctgttgactctgaaggcaacggagacagctgaagatcaaagtatagaaggatatttcagacttatctaaaagccaattgagtgttatataagggagctgtgtgtagctctgtttgaaaacatccatccagtaatcttccagttcctgagcctggccctgcctcctgttgacaggcctcagcgtctttttcttgtccttttgggcttgagcaacatgtgagtaagtacttatgtacaaatcccagaccaaatcttactttattaacatgattcagaagaaaagaattctaatgaaaaatttcagaggactgtgccgaaacatttcgtgatgttgtcagatctccctgaactcaggaaaggcccccaaaaatctattatttctgtttattactcaacttggaaaaagcttacaagaatgcctcaggagagtatgcactggttgaggaatttattcctgggtgtacagcatcccctacgtttactctgtgtgaggcgggctatcctgaaaccctgggcaacctgcctgctcctcagccagcaggtctagagtagcagcttagtatttttaaccctttctgtcatatgactcccagccaactttttgagttgatagaaacacagatctgagagctatgaggaattatgaaagcctttgtactgacaaaagactatgatttttctttgctgctttattatggttaaaaggtctcattatgcttttattttggagaggtaattctgtataacaagacctacttgtatatcccagttaggttgtgagatatcatgaataacattacaactgatagttaaattgaagactttaaatgattttcctcaaaaagataaaactaaattcaaggttattctaaaataagtatggttatttgcatttaaaaatatttcaaagggagaaagagaagttaggattacaagtgatagaatgaaaagtgctcataatttgttgcctgtagtatctgttttgctattcatgaacatggtacacccattcatttgtttaggttttccttaatttctttcagcactgcttttgtagttttcactagtttcttttgaagactctagtgtgtccaaatgtgaacaagattcatcatgtctgtcttattagaattatgtttaagaacctctgttttagagctgtaatgctatcctcttcaatctactcttcattaataatgatgaaaactgatactccctctgactttcctggagagtgagctcaggggtgtgtaactaaggctattgctaaagtgagttatcggcctggctgcctttgctctaagttgtaggaactcaaagctcagtgtgtactgtgagatatgttctttaaggctgaaggctagtgttgctgagcaagagatgtagtaaaatgaatatccttgttcctttggactaaatgtcagagttagaggcagtcttggaacccaaagattggatgttgtgcctttccatcaggccgttgggctttcccagcagagtttcgctggaacagagtcactccagtgaactttcattttggacttgtaacaaaaggattttgtagagattttaccctctgaatgtgggtaatacctgagggctttatcaagatgaagagtaactttgttgggttgctgcacctttatttagggaaagtaattctccaccacagtgtcaagagtggtcttgacagagacatatgaaaggtcagagagtcaggatcgtgcactagttgtgaccttgggttttggattcaggcacacaggttcaggtccagatcataggctgtgtgaccacaggctcagtgtcctcatttgtaaaattgaagtatcagtagttcctgtctcagttgtgttcttgtgaggattataaatgagataatgcatataaaccagaggatcacgtttattatgaatgaaactactggaaatagtattctttgaaaatgttaccatagtacttacctagtttggactgctataacaaagtcacatataagtcacacatagattgtatgtcttataaacaacagaaatgtatttttctcacagtgctggaggctgtaagtctgtgatcaagatgccagcatggttaggttctggaaagggccttttccaaattgcagactgatgacttttcattgtatcctcacatggatacagtcctcaaaaagacaaactagagagttctctggagtctcttttaagacactcataccattcatgagagcgctgtcctcatgacctaattgctccacctgttagcgtgccccatctcccaataccatcacactggggttaggattttaacatacaaattttaggggggtacacattcagtccgtaacacatggtggacatatttaatcagtcttttaagttgcagttctattattcaggcatatttttggtacaaaaattagatctgatcctgaaatataatgttgctgttaaacagactttattgatgcccagtttctttattttccgtaagttttacttagagcagtacagtggaaataccacagtggtacaatgggagtgatggagttgggagagggtgtggataagaagtgctctccctgccccccaactttttgttttgttttgttttggagatttgagtcccagttttgtggtttgcagagcttttgttgccttatctatacaatactgctaattatacctattcctttgatttgatgaggataaaatacttgtaaagcagccagaagtttatggcacatagtagttaggtcttcaaaaagttaatctttatttagacaatatatatgtgtaggaaaagagggggagagagagctagaacaaccttatgatgggcagaatgcatttgctgtttagctttgtgctcccaatggagaaaaagcaggttggggaatgtccttgggagatggctgaggagctgttggctgagccaggtggatttgaactgagcacctggatggaaaagaccttgttttcttttgaggcagtgacttggtctttaactggaagttacagggtaaagatgaatgctcaagaacggtggcggtgctgaggatcaggaccagtgggggacaggagaacccaagtgaagtggattgaggctgtgtattggtagttttcctcatctatatggtacctctaggctcagtcccagtctaaccaccctacttaaaattgtaatccctctctaaccacagaaactcctattccttcttatcttgctctgtttttcctcgtagcacttctcacctcaaaagctgcttgtaatttacttatgtttattatttatcttcccccactaaaatgtaagctccgtgagagtcaagttagttttgcttttgctctggtgcagctttttcttttttcttttctttctttctttctttttttttttggcagagtcttgctctgtcacccaggctggagtgcaggggcacatttcttggctgactgcaaccttcggctcccagtctcaagtgatcctcttaccttagcctctcaagtagctggggccacaggtgcacaccaccatgcttggctaattttttgtattttttggtagagacggggttttgctctgttgcccaggctggtctcgaactcctgaactcaagcaatccacctgcctcccaaagtgttgtgattacaggtgtgagccactccacccggcctaaaactactttttttttttttttttttgagatggagtcttgctctgttgcccaggctggagtgcagtggcgtgatctcagctcacagcaaccttcgcctcccaggttcaagtgattctcctgcctcaacctcctgagtagctgggattacaggcccacaccaccactcctggctaattttttgtatttttagcagagatggggtttcaccatgttggtcaggctggtcttgaactcctgacctcgtgatctgcccgccttggcctcccaaagtgctgggattacaggtgtaagccactgcgcctggccaactatttttacaataattccaagattgggttaacactgctctaattgtataagagcaatattggataaaactgctggtgactcagcaggaatgaaggcagtacttcactggcacacacttgcagtaaaacatctgccactttcctttaagagtgttgttaccctcagatacatgttttttccttattctatatggtaaaatgggaggtacgtatgttgcatttctgcattccaaagtacaatgattttcttgaggaaaagcactgtgcagttgtttgagttgtgagctgatctggtctgtttttcatggaacaccatttgatgtgaaagagtgactgacagacaactgatggttatccagacttcagtatttggcagacatttttgaaaatgaacaaagtgagccgggcgcgggggctcacacctgtaatcccagcactttgggaggccaaggtgggccgatcacctgaggtccggagttcaagaccagcctggccaacatggtgaaacccagtctctactaaaaatacaaaaattagctgggtgtggtggcatgcacctgtagtctcagctactcaggaggctgaggcaggagaattgcttgaaccctggaggtggaggttgcagtgaactgagatggtgccattgcactccagcctgggcaacaagagtgaaactccatttcaaaaaaaaaaaagaaaatgaacaaagtgaacctgttagttcaaggaaaacaacagtatttgttgccaataataaaatttcgtttttcacacaagttaaaattttggaaaacttacatccattaccatgattatgacagtttctcaatggttaaatacttttctgatgaaatcagttgagatattaacaaatgtgatttttaaaatattatataatgaaatatgtcttatttggcagtaaaccattattttccagatgaccaatgcatgatattacaaaatcatgcatgatattacaaaatcatgcatgatattacaaaatcatgcatgatattacaaaatcatgcatgatattacaaaatcatgcatgatattacaaaatcatgcatgatattacaaaatcatgcatgatattacaaaatcatgcatgatattacaaaatcatgcattggtaaaatattccacatcttgagagtacaagatagaacaattgattttttttttttttttgacagagtcttgctctgttgcccaggctggaatgcagtggcatggtctcggctcactgcaaactctgcctcccaggctcaagtgattctcctgcctcaggctcccaggaagctgggacttcaggtgcacgccaccatacccagttaatttttgtatttttttttttttttaaagtagagatgggatttcatcatgttggccaggctggtctggaactcttgacctcaggtgatccacctgcctgagcctcccaaagtgctgggattacaggcgtgagccaccgtgcctggccagagcaagtgatttttaaaaactttttattttgagataatttttgactgacagaagggttgcataagtagtacagcgtttctttaggcttatcactcagctttaccttatgaggacatcttacataaccaaagtacaatgatcaaaactaagaaattaatcttgttacaatattattaactaaagtataatatttattaggatttcaccagtttttctactaatgttctttttctggtccagaatccaacccaggatctcacattgcatttagtcgccttgtctccttagcctcctccaggctgacagttccctggtctttcaatgaccttgacgctttgggaactactggagaatgtccctcaattaatttttttcctgacattctctcaggattacattgaggttatgtgtcatttggaagaataccatagaggtgatgtcctcttttcagggcatcaaatcgaggatatgttatgttgataggaattattactagtgacgttaatcttggtcacttggctagagtgatgtctgccagaattctctggtgtaaaggtactatttttcactttgaaattacgcagtattttggggaaagcaaaggattttaatgttacggagtatgaaaaatttattatgtaattcagatgctaccttgcaactaaacttaagaaatgattatttgttgagtttaggtgtaatagtaaagaagaaataaccacaagtatataaaaagacttaagatttggctgggtgtggtggctcacacttgtaaattccagtactttcacggggtgaggtgggaagattgtttgagcccaggagtttgagaccaggctggtcaacacagcgagaccgtgtctctacgaaaaactaaaacattagccaggaatggtggtgtgtgcctgtggtcccagctgctcaggaggctgaggtgagaggatctcttgagcccggaaggtcaggactgcagtgagccatgttcatgccactgcactctagcctgggtgacagagtgagaccctgtctcaaaaacaaacaaacaaacataaaaaaacttaagatttgaaacttccaactgcatatactgtatctgtgtgaggccagatttcttcatatccttcaaccagaacaatgtattgcaaaaaattgaatgcaaaagtagatgggaaaacccagtggtcttgtattaagccagacatttaaagagatttgctgtgcatgtgtctttgaaatttaacaagaaaagagatttgcggccgggcgcggtggctcacgcctgtaatcccagcactttgggaggcagaggcgggtggatcatgaggtcaggagatcaagaccatcctggctaacgcggtgaaaccctgtctctactaaaaaatacaaaaaaaaaaaaaaaattagtcgggcgtgatgacgggtgcctgtagtcccagctacttgggaggctgaggcaggagaatggtgtgaacccgggaggcagagcttgcagtgcgccgagttcgccccactgcactccagcctgggcgacagggcgagactccgtctcaaaaaaaaaaaaaaaaaagagatttccaaaaatgtaaaacagtgctgctcatctcaccttacattttgttttagaaagtagttgtttttcatgaaagatactgtttatgttacagtttattatagttggtttttagtgaattaataaatatttaaaaatttcctcagttttaatttctattgcagaaaatgttaatagacttatattaacaaaatctctttggagtcctcagtaattttaaagcaataaagggatcctaacaacaaaaagtttcagaattgctttttttctgaataatacagaagagatatcttagtaggggaatcttttcttctggaccaaataaagatttaatgaaggactccaccaaggactcttggtccttgcagggaagtcactcaattatcagtgtactcagctggcagatgagggggattgccttgtactatctccaagtttctttaaaccccaaactacatgatttcaaatcactatcattgtcagcatgggcattatgcagcaatctcccgagtatgctatttgctaggttaaagatgaaggttatatgtaaggatataatgcagtagtatttgtgaagcagggactccagggacttttctttttgggcctgtaaaattatttctttcactgctcctttaaaagtagaagttttcatgattattagattttactgtaatgagcaagggaaagatttttaattattgctgaaaatttttgtcaatttatgtatatcacaaatttaaaaatgcatgatttctgagaatttttctgctctaatgtatatgtgtaaacttatgtgaatatttgtaagtatttacataaatcatttaaatttgttaatgggttctaaatataccactgatgtctctgttgaagtagactcgggttgcatatccattatatccttacttaccagccgggcatggtggctcacacatgtaatcccagcactttgagaggctgaagtggatcatgaggtcaggagtttgagaccagcctggccaacatggtgaaaccccgtctctactgaaaatacaaaaattagccaggcgtgatggtgcatgcctgtaatcccagctacttgggaggctgaggcaggagaattgcttgaacccacgaggtggaggctgcagtgagccgagatcatgccactgcactccagcctgggcgacagacagagcaagactctatcttggaaaattaaataaataaataaataaataaataaataatatccttacttatagtcttcatgaagttaatttgttattttggttctttggttttaaaaaaaattattaggtctgtatttacaaatacagacttaaaaatgtaccagctagaatctattaagaatccccaactttggaactaacatttttcttttttagtttaaatgaaaggcaatttgatggcttagttttttaaaatggggaaacaaaagggaggggaagccagtagtatcttgtcgtgttaagtatcagtttaaatcaaatgttaaacaggatcctgcattcttgtaaagtgaatttagtaatggaaactgccacagtggagggccagctctgtcataatcaccaacttgagcatctctgatatttagcagaaatataaatatctaatgcagcgtgtatgtgttatactgtcatggcaaaatgttgtaactgattttgagccagattcttccagtgttttgaagctactgcttggaaataagatttggaagctgaactaacttctacaatttggtaaactatagtaaagttaactcagcatatattataaatacaatagaaatatataattatatataaaaaagtttcatcaaatttcaaaggtttaagtactattttaggatattcatagaacccaatctaagaggaaaatgctcctcactgccagcaggagaacttaatggagcgcagcgttttagagcatagacgttaagagccagctgcctgggtgcatatcccacggctgccactgagtagctgtgtaacctcggtttgctacattttacagtgtactcctctgtaaaatggagataatatccatctccctgggttgttttgaagatctaacgagatactgtgtttcaagtgctctgttgttccattattgtttagttagcaattgttaagttttaggttatttcttcatgacatctgaattttttttaaaatttatttatttgtttattttccttgagatggagttttgctcttgttgcccaggctggagtgcaatggtgcaatctcggctcaccgcaacctctgcctcccaggttcaaacgattctccagcctcagcctcctgagtagctgggattacaggcatgcaccaccacgcctggctaattttgtatttttagtagagatagggtttctccaagttagtcaggctggtctcgaactcccgacctcaggtgatccgcccaccttggcctcccagagtgctgggattacgggcatgaaccacggccgacatctgaatttttatctcattaacaacatatatcctcaagtaatgttttagggtaagttacatctgggaagatttggtattcatagggcatggtagagttctagtggtatgttggctttttttttttttttttttttttttttgaggtggagtctcgctctgtcacccagactggagtacagtggcacaatctcggctcactgcaagctccgccttccgggttcacgtcattgtcctgcctcagcctccccagtagctgggactacaggcatccgccaccacgcccggctaattttttgtatttttagtagagacggggtttcaccgtgttagccaggatggtctcgatctcctgacctcatgatctgcccacctcagcctcccaaagtgctgggattagaggtgtgagcaccacgcctggcctgtgttggcattttaagaatccttggagattatctggtcaaactcagcctgatatgtaaactacctttctaatatcctgttgactaagcccccaacctttacttgaatttaaaacatccctgactcttgggaaattcttccttgtgttgtgctacagttcatctggctgtaacctcctctcccagcccttacttcttccttgtagagctacatagaatttttgtctaacaaataacccatctgaatggtgacagtgaagcaaatgaattctggacaatttaagtgttgtataaaagtggccggatggtgtgtgtcaaagttgagggagctcagaggactttgctccctgttggtaaaagaagcaaggctcagatttgtggttagagctatcctgatctagttgggaacacttttgcctcattgagcctatgatggggctgtgagccagacaggggataggcagtggctgggtctctgggccccccacttgcataaagcacccccatccattgctatacttgtcctttcctggaggaggagcttctttgtgccttaaaaattatctcaccgccaggcacagtgactcacacctgtaatcccagcactttgggaggctgaggcaggtggatcaccggaggtcaggagtttgagaccagcctggccaacatggcaaaaccctgactctactaaaaatgcaaaaaattagctgggtgtggtggcaggcgcctgtaatctcaactactagggaggctgaggcaggagaatggcttgaacccaggaggcggaggctgcagtgagccaagattgcgccattgcactgcagcctgggcaacagagcaagactctgtcttaaaaaccaaaccaaaccaaaacaaactccatctcacgtatttgttcattgtctatttctcctcctgcatagaatggaagctccatgaaagcagaggagaaactgcttatcttgttcgctgctgtttctcgagtagccacaagaacttggcactttaggtagtaggtgttcggtattcaaatgatggaattaaagatcaactctgaactctcaaaggcagatagattttcactttagtgcaggaaaataaacactcatatgtcatgcccattcttcaggcctgaaccaaaggggaacctgtcagaggataggaaatgagatctcagcagcgtctgttactatttgcaattttcaaatacataaagagaaaagtatcttttgtctttttgatatgtgaagattttctagaaaggagaggtttcaactcttattgaaggcgggagacaccatgctatcagaattggattttaaaatcagcccagctggatagtagcttcaaactgcagccagcatgatgtgttacatgagtttagctttgagtgttaaaagaacaagtttgccagaaacatgaattgttaaaaaaccatgaaaacattacaatgtaggaaaaaaatgtagtgaaaattccagtatataatgtccaaatagttcctttttctggaggctttaaacattttcttaggtaatttgcaaagaatattggacaatgtagaaaatatgtgtagagttaaaatgatattgagaattctgagcagatgattaaggaaatctggacctccttttttctttgtttctttctttctttaatatgttagtacttgagttttccatagaattaggacatatatttaggtcagatctcactgggatattccttgggatatcttgattcagggttttcttccttttttttttttgagatgaagtctcactctgtcacccaggctggactgcagtagcaccatcttggctcactgaaacctccgcctcctgggctcaagcaattctcctgcctcaaggcctcccaagtagctggaattacaggtgtgtgccaccgcacccagccaattttttttttaatttttatttttagtagatgtggggtttcaccatattggccaggctggtcttgaacccctgatctcaaatgatccacctgtctcagcctcccaaagtgctgggattataggcgtaagccaccgtgcctggccttttttttttttttttttttttttgagacagagctttgctctgtcgcccagggtggagtgcagtggtgtgatcttggctctctgcaacctccgcctcctgggttcaagtgattcttctgcctcagtctccctagtagctggtattacaggcgtgggttaccaggcctgtttttttttttttttttttttttgagtcggagtctcctactgtcgcctgggctggagtgcaatggagtgatctcggctcactgcaacctccgcctcctgggttcaagcgattcttctgcctcagccttccaagtagctgggattacaggctcccgccaccaagactggttaattttttgtatttttagtagagacggggtttcgctatgttggccaggtcagtctcaaactcctgaccctgtgatccacctgccttggcctcccaaagtgctgggattataggccactgcacctggcttttttttttttttgagacagattcttgctctgtggcccagggtggagtgtagtggtgtgatctgggctcactgcaacctccacctcccgggttcaagtgattctcctgcatcagtctcctgagtagctggaattacaggcatgtaccatttttatatttttatataatttttgtatttttaatagagacagggtttcgccatgttggccaggctggtcttgaactcctggcctcatgtgatccgcctgcctcggcctcccaaagtgctgggattacaggtgtgagccaccatgcgtgaccccgattcagagttttctctgagaagaaactcccttcgattttggaacccaggaggctggactgccttctagtctaggttctaccttccccctgctgtctggtttggcttaatcacttgattcaataattttatgactttgagtgagttacttaatatcactctaccttagttctttcatctgtaaagtgcggccaataatagtgtatctcaaggttgttgtgaggaataaacatgttaatacatgtcaaatgcttagaagagacccttgcacaatagtaaacactccatagataataatgttattattagccaaatgtggttattttgagggtcatataatggggaaaaaatgcaaatttaaaattcctgtacaaattcaaaggaatatcgattgtctctgtatatcaaagatgaccttagtatttgcaaagctctctctcatttagggccactagctgtttttccatttacacttccctatacaggatatagagttaatttctaggaaattagccattaattattggttaatgatggactaggaatgctctcaggagagctgactagttagaacatgacataactttgaattatctaagctttacctttacgtggaattttaactttgttgaatttttaagtaaagggatataaaagccagtctgctctattattagattcactgtgttcataaggcaacatggaaaaaaatagataatacagaaagaaaaatgacaattttaaggagaaaagtttttgtttttaaataattttctatgttaattaaattccatggatgttttgttattactttgtctctacagagaatgcagcagattttgaacatgcttttttccctctgcttaaaatgtgttggctattatatttcacaggacttacgtcgttttcaaaaatagaggtaattaattgttacgtgttttgatgttcagcaggcaaaggaaacacattactttgtgtaaacagaggttaatatggagtctttgaagtctaaattattgaactatttgcctaaggacaaacttcttaactgtttaggtttcttctggcctgtaataaactacagtggtggaaataacacaaaaaatcctgtgtataaaacatttgggtcctggttgcgtgtttgacccaaatctgcaggtttacctttgagttacactgcgaattagggacctttcatttccattttcctttccttgtagtggtttagttggttcatggttgataaagacagaagcatatgtttctgggaatggtaaaccttaattttgcttaagttttaaatgatcacttatttctggaactggcactggggtcgaagaatgtttattattccatgttaacatgggaatgagtctaaagactaagtgacgtttatgctcacttctattttacagcttccttgggctctagccaaggtgacttggttttgcaagagcgaagaggacctgccttatagtgcagtttttttttttaaattgtttttgtctgaaatgatctaccttgaggacagaagctgtactttgcagagtaaaagacaaactattactggttttaacaaatgaacaacccaggcaggtgggcatggtgcaggttgtgccccagcttgtgaggtctagcagatcttgtggcctttggacaggcttgccttggggaggtggaaacacaatggtgatgatttctaacttgaagagacctttgggactccagtccagaagtttttacctgtgtgtactgggtgggaggcgtgttgtgcttcctgctatgggggtggtgagagccgtttcccacctaagtgggacagggagaaagcgtctgatcggcacacagggtgcagaagcagcactggcccaactccacactcacttttccaggatcattccttttgcaccaagctctgaccctgtgccctctcactgctctggggactgttgaagccacaaggaggaagttgctactccttatgcccttcattcttcctgtgccccagaccgagatctgtcaggggtggggtattggaccccacctgaaatcacttgtgtatctggcagctttcttgggagtttctcctcagggggcagactcccatataaagtactggctggtatgactgcagctcccgttgacccactcactgttcacagaagcctaggaacagactgtagaacccagagaaagctctgggtgacctctgttatttagcagctgcttgcagcaccagtcactgtggcaactgggctttgtttatgaaaatgaatgaggacctcaagcctggggcatccataccgtggacagagctccccctggaaatcgactgcctgccagattgccagggctaaaccaaaacaaagacataccaaacacaagtagccaggaagtattctgcccttggggacgagcaccaagtcccgattgcctgtatccctcttcaccaagcataaccctgccaggctgagctgatcttggttatgccagagaaagacagaggcaaagaacatggtactagtattggcagtttttggaacacagccttgtattgctcaggtctggcctctagttctggttttagatggaaagagtgttgagtaccaaagatctagctttttgaaaattttatttcaggccctgcctttatgtaaactgtaacgatcatttgggtctgtactcaagaggcaggagaatcacttgagcccgggagttctgggctgttgtagtgcactatgccaatcaggtgtctgcactaagttcagcgtcagtgtggtgacttccctggggactcccaggggactgccagattgcctaaggagagatgaactggccaggtcagaaatggagcaggtcgaaactcccatcctgatcagtagtgggattgtgcctatgaatagacactgtattccagcctgggcaatatagcaagatcctgtctctaaacaaaataaaacaaaacaaaaaaaaaccccttgtctggaacaactgagtttggagtttgttgtccccttagagtccttgctttcatagtgattgttttcttgtgtccaaagcatccttggtagttttaactctccatgggaattggtgagccatggacatcatcttggagcacactttgaatctcagagcttcctttgaggggactgctatgttctgggtgcttctggtattcacaggttctatgattctatggctggacccttctagcatatgtgccctttggtgtcactttgtcagaaccacagccagtgcatgggtcttctgatgccatcctgtggctctcttccccacaccatgccttgtttttttttttttgtttgtttgtttttttgaagaccttcgagtctcgctctgttgctcaggctagagtgcagtggggcaatctcagctcactgcaacctctgcctcctgggttcaagtgattcttgtgcctcagccttatgagtagctgggattacaggtgcgtgccaccacacctggctaatatttgtatttttagaagagacggggtttcaccatgctctccaggctggtcttgaactcctgacctcaagtgatctgcccacctcaccctcccacagtgctgggattacaggtgtgagccatcgtgcccagccacactgtgccttgttactgcatgtctgcttgggtcatggcccaggtgtcatggtggagggggcggggttgggaggtagagagtgctggcattggtgatttgccagcaggacacatgcccaggaagatggtcagaaaaagagggactccttcacgtacgtataagtcagctttagccttaaagcttcaaacacccactcactgcattgaggagtccttgaggtccctcacctgctcttcctggtctgactagatgccagggaattgggagagagggacctgcagtgggagggtcctggaactgcagtgacagtaatacgggcttaaactagaattccttcctggaagaatttcggtcttcctctaccccagcagcctttcactccttaactttagtagtgtgccttggggcttgagcagctgctgcttctgtggaggtgaccatccagagggaccctttcacagctaagttcacttgcacctccgtttctgcttaaggcaactacagtttcgggggtggctgcccctgtttgctcatgataattccttatgaactctcctgttgataaactgaactggatcagctttagtttccctttaactaaggatttaagtcaaagcgtaaccacaagtgtcctgttcgttttcattcatttcagtgctgaacatttatacactgggctatggatttgatgtttccttcctgtcttggctgagatacctgtgtgaaatatgagtttgccatttggcaaactctttttcctttgactagttaatgaagccaaaatattgacgggggtgtggagttaggggaagaggaggtgtgcatggttacatttgaaagttcttcatggtgcaggagaatccagtgcttcaccctgagtaattgtaattagggtagtaagtaaaccctttcaggtttattctatagcgatcatgacgagttatcttggggaagggataaagaagactgtgagaggttgtacagttctgatcctgtcaggctttgagaagcagacctcagcgtgatctgaagagccggtaccctggagtagatgattaaccaagataatgttccggacagtctgcagctgaactgaactggtgtctctgcatccattcatagttacccagtgtggttaataacaagtccgttgggagttatgcctgtgctggccataactaccttgtattctggatgggggtcagagaaactgaatggatcgattcattcactgagtagtgagtgactgcagccttactgaagccagctcctttccagctctttgatgacatgcactattattgttgttaacaggttggctaaaaaagtaaacctgggagagttgaggctttgttcctctgtccagcactcagatatttcctgtagtcattcagtaaacatttaccaagtgcttactgtgtgccagggactgtgttatcataaccagtaactttttcttcgttaatgaattatctcatgcggcgtgcatacaaagaagccttaagaagtggaggataatgggggcctgtctctccctgctcatcctttggggctgtcacatcacggaaaggaagtaacagtcaacttaaatcagtttactttggtaatagcagtttttgaaaaggtttggagcaggaaattgaaactcttgagaaacaggaggtttggggattactgctggatttttcttattcctgctatcccaaggacttgatcccagttaccactgataatggaccccttttatgtttaactgtcttgtcagtaagtcagtgacacatgctgagaatagaaaccagtaccattccatgtcgtaaccgccagcctgtacacgccccgctggttctgttgttgtgatcgttgctacagcgcttaacatcaaacgccagcctcatgcctggcactttacatcacacctacggcgtccccaccccgggagcttaccttccctagaagtccaggacattttctatgttggcaccacaggaataggtagagggcaagggacagaaagttttcgtcagtaaaatgtggtcttttcttgaatcaataaaggcaactatgttcatctgttttaataggaaaggcctgtaggtaattttttttctccgttaaaatctgcttttaaaaatgtttggggttgagtgtaacaacagattgataactctctgttcatcgcttttccgttcttgcaaaatatgtgacttgcagtggttgactaagtgctaggctctgacgggaagaaatgagacccgtggaactcctggccccctgctctgtaggtgcctccagaccagggaggggagacaggcatcaggtggcatggccaggccttttttttttttttttaatagtggatgggagaaaatgggaatatgactaattttatttaatacttaggttgttttgtctgtttgctttactggcatagggtcatcttcagctgaagaaggatgtgctggtgcttaggaatggctgtcaggagccatcggtttgctccttcaaacaggaagggcaatgctggcttcagctaagagcgagagagcttctttccccagacacccagtatgtctctctttgcaatcattggctgaattgactcagcttttcctcccatccttgaatcagtccctggtagagtaatggagttacagtgattggcttaggacagtcagctggagaatcagtcacaccactcaccacagcggcctcctactaaatataaatgtgagcgggacttaaaatagaagaaatgcacatctaacaggaccataacttagggataaggtactggacaaggtaatgaagaggcgatcatggcccttgtttgtgtttcctccgttccctcggcagccttctaggggaccctctaatgtgctacctcactgtgtacctgtctctctatcctgactccacctgtcactctctctcgactctgggagtatagctgcttaaggccaaggcactctgtcttactatttgtggccactgtagctggcacatagcagggacttaatatgggtttcagcaaattgaacgaaaaaggatacttcgtattcctttgtgtttaacttttatcaaacattgcttgaatcaagtggattttttttttttttgagacggggtctcactctcacccaggctagagtgcaatggcactatctgggctcactgcaacctctgcctcctgggttcaagggattgttctgcctcagcctcccgaagagctgggactgcaggcacccaccaccacgcctggctaatttttgtatttctagtagagatggggtttcaccatgttggccaggctggtttcaaactcctgacctcaggtgatccacccgccttggcctcccaaagtgctaggattacaggcgtgagccactgaacctaaccacaagtggactattgatagtatattcattgcacattttataacaagtttattgagatataatacacataccatgcaattcacctctttaaagtgtacaatcatttttaatatgttatcagagtcgtgcagctgccaccacagtcaattttagaacattttaatcatcctccaaaaaacctctttatccattggcaatctctccctattcttccctttccccaggccctagtaactactaatctattttctgtttctatggatttgcctattctggacattctgtagaaatggagtcatgccatatgtggccttttgtgaccaatttctttcacttagcatgttttcaaggttcatccatgttgcagcatgtatttggtatttcattcctttttatggccaagtaatattttgttttatgtatataccacattaaaaaattcatcatcagttaatgaacgtttgcattgtttcctgtctggggatatgaggaataatgttgttatgggcattcatatacatgcaagtttttgtgtgggcttatgttttttcccttttttctgggaagtatggctttggccaaggccagagtcaagcacatccttatgtttttatttctcttgtatttatatgtgtctgagagtagaatcgctgggtcatatggttactctgtgtttaaccctttgaagaactgccaaactctttttcaaagtggttgcattattattgttattattttttgagacggagtcttgctctgtcacccaggcaggagtgcagtagtgcgatcttggctcactgcagcctccgcctcccatgttcaagcgattctcctacctcagcctcccaagtagctgggattacaggtgcctgccaccatgctcggctaatatttgtatttttagtagagatggggtttcatcatcttggccaggctggtctcgaactcgtgacctcgtgatccacctgcctcggcctctcaaagtgctgggattacaggtgtgagctactgcgcctggcctgttgtattattttatactcccagcaacaatatatgagggttctagtttctccacatgcttgcaaaccttattattatctgtcattttgaattagtcatcctagtgggtgtgtaatggtatctcaatggatgttcatcaatgaaaataaacatttgaatgggcacccatggcatgtcagatgctctttcttaggtgtgggggcaaagagatttgcaaccttcggctgtctgtctctctggcctcatctgttttcacatctttcctcttgatttatgttccctaaataccaaactgtttgtagtcctcatactatcatgtcatttcttacttccagatctttgcctataatctaaatattaatgcagtgtgaatattaatgccattactagttaactcttaaacagccaataaattatagagctggcagtctggctccagagtctgtgttctgtactacatactctttttttcttttaaaatcaactttatatcgaagtataatttatatagattaaaatgtacactttatttatttatatatttatttttgagacagggtgttgctctgttacacaggctggagtgcagtggtacagtctcggctcactgcaccctcaacctcccaggctcaggtgatcctcctacctcagccttctgagtcactggtactacaggtgtgcaccactaaacttggctatttcttgtattttttgtagagacggggtcttgctatgttgcctaggctggtcccaaactcctgggtttaagcaaccctcccaccttggcctcccaaagttttgggattacaggcgtgagccactgcacccagcaaattgcacacatttaaaggtacattttgatgagtattaatgaatacatatgcctgtgcaatcaccactgcaatcaagatacagagaatttttctattatccatctccacccctttcattctcttcagcctccctgtagtccatatccccagtcccaggcaattactaatctgctttctgttgctatagattagttttgcctgttctagaagttcatgtgctctttggtgtctgacttctatttgctcagcaaaatgtttttgagaatcaacagccaagttgttgcatgtattagtaatttgttcctttttgatgctgaatgttttccgcggtatggatataccccaatttgtttattcattcacctgctgatggatgtttaggttgtttccttttagtattatgcagttaagtagctatgaacctctataaacatgtctttttctggacatatgtcctcagttttcttgagtaaatacctaggactgtaattgctgagttgtatgtaactttataagaacttgccacgcagttcttcaaagtatgtgtacctatgttggttttaatacagattcatcatttcctatccatgttgcttgggtagattatattaattcttaagaatcacctcagatatcacctgccctaggaagcctttttttgacccttctcatcttccccttctttgaggtgaattagggaggctccccctccaggctcccttaacaccttgatgattgagtgttcactggcctatctttcccattagactgtgagctccttgaagaaggaaaatgcgttattatttctgtatccccaggaccttatatagtatttaccatctagataggtgctcaataaggcttgtgaatgggcgactaaataggacattattcatctttatttttattttatttttgagacagggtctatctagttctgtcacccaggctggagtgcagtggtgtgatcttggctcgctgcaacctctggctcctgggctcaagcagtcctcccacctcagcctcccaagtagctaggactacaagcacgtgccaccacgctggccaatttttgtatttttgtgtagagatggggttttgccatgttcccaggctggtctcgaactcctagactcaagtgattcccttgctttggtctctcaaagtgctaggattacaggcgtgtaccaccatacccggcccttattcagctttgtaagggagtttatggccctgtaagggagataaaataggcatgcaaataactaatgtgaagcagaaattaatagagttgaagaacaaagtctgtgagaagtgaaagagagtgatagcttttagtgaggaggatttgggaaggctaataaaggagatggggtttcaactgagcccccaaaatagattagatgtgctgagatattattacccattgattctaaagggatttgacttgatcttctgttctaaaagattggtgaggctggaaaatgaagtttatgtttgggaaggtcacactaagattcatctttttttttttttttttttttttttaatgctttgctcttctcagcctacagcgggcactaggagatactggaaatgttttctgtttggcagtagaagaatataaatgtggcggtttgtctatcatctctccagattctaaaggcttctaggtgggattgaaaagacttctcttatcctctttgcctcttaccccatatggtaataggtcacataagtcacactattgccaaagctctgcttagccatttgtctggtctctttggtctcagccacctggcttcactatttagcacatatttgtccattgtcttctatagcacatgttcatagactattagagctgggaactttcaaaataatcaaatgataggccctccctttacagaggagaattgatactgaaatctagagactaacctggttaataatagtaaagataaaagctgccatttattgaccatttaatatgtatcgtatatttgcatgcattatgtaatcctcacaaagtgtagatgtcttcattttacaaatgagaaaactaaggcaaagtttcagatggtatagacagaaccaggattcaaagccaggtcttttctctacagcatcctacccaggcaaggccccaggtccgtagagttgctgaccacagaggaggaggaagttgggccacagctctcaggtctatgagagggcgttgtcactgaagtggaggaaaccaggattctctgcttcctagagagacactgagattgttcctttaaaccacatatgatttttaaaataagatatgtagagcagaaaccaatcaactagcattggctttggtcagaattatttttatgataaagtagagcatatttttaaatttttaattatctaagtaatattcaaaaacacatttgcacagtaaaagcattaagaatgtattaggttggtgcaaaagtaattgtgttttttgccattacttttttttttttttttttttttttgagacagtcttatctctgtcacccagtctggagtgcagtggcatgatctcggctcactccaacttctgtctcccaggttcaagtgattctcatgcctcagcctcccaagtagctgggattataggcgtgtgccaccatacccggctaatgtttgtatttttagtagaggcagggtttcaccatgttggccaggttgctctcgaacccctgaccttgggtgatctgcctgcctcagtctcccaagtgctgggattacagtcatgagccactgtgcccggccattactattacttttaatggaaaaaactgcaattacttttgtgtcaacctcatagaaggatggagagcaaagtcagagttcctctcgtgtctccaacccgtctctagcatcacccctaccttaggtaagaaccatttatagttagagttatccatttaatcctttttctatgcatgtatgtgcatgcatatggacaaatacacatagttttagaaggttaataaattgtatcattctttacatacaaaaagaacatgtcataagatatttctgtctgtacaaataacagtgttttaaatgcagcatatgtatttcatgatatagatacaccctttttgatgaacatttaggttattattattttagacggagtctcgctgtgtcacccaggctggagtgcagtggtgcaatctctgctcactgcaagctccgcctcctgggttcacgccattctcctgcctcagcctcccgagtagctgggactacaggcgcccgccaccccgcccagctaatttttttgtatttttttagtacagacggggtttcaacgtgttagccaggatggtctcgatctcctgacctcatgatccgcccgcctcggcctcccaaagtgctgggattacaggtgtgagccaccgtgcccggctggttattttaaagtatttgtttattataaatactgtggcagttaacatctatgcctgtaatactttatagtaccataacagtgatgttgttatggtgtagtacagtaggtgtatttacattgatatcagttacagcctggtgtaattacagttatgatgtaatgcctttagagagaggttggacagttcagttgctgtcccaaacctggctgagaagattacaaaagatttaaaatatttctactggtctttattattgaatgactacaccctctgaaaagtatgaattgagcattatgattgctcataggtaaaaggttagcaggcatttaatatgtgctaggtattttcttgtgtattctctcatttgagtcttataataatctcataaagaatgtgctgctattcactgtttatctggaactaagactgagaaagactgtggcttgcataaagtgacacagcttctaagaagccagttcaagatttgaaccctcatctgatgatcagtttgttttttctttccccattttctgaagctggttcattctcttaagaactgtaaggagaaaaatgatagaaggcagaatatctttgaactaatgaaatcatcgcatgagcagagaagcagagtgggcatcctgtggatttaggggagggagggggtggtaaagcctctgaacctgtcactggacttggaggtgtgattcatgacttcaggatagtggctatgctgagagaccttggtgtctgacagcaacgtcctgctattgtaagctatggatttactgtcatgctaagaaataaatcatgaccaggaaaggctgtatgtttaggtgctgctgatgcctgtaggccctctccaaacaggagaatggctctcagtggatgaattgtctcagcttcctctgagttgtaatttctatgtgggtcaaagggttatttttagcctgtgggatccctagctctttgaggagtggcctcgcttacaaggtcagtggagtgggatgatggtcgggattttttttttttcccagacggagtcttgctctgtcacccaggctggaatacagtggcgcgatctcagctcactgcaacccctgcctctcgagttcaagtgattctcctgcctcagcctcctaggtagctgggattacaggcgcatgccaccatgcctgggtaatttttgtattcttagtagagacacggtttcaccatgttggccaggctggtcttgaactcttaacctcatgatccacctgcctcggcctcccaaagtgttgggattacaggcatgagccaccacacctggcgatgatcaggatttaaggattgtttctgagctcttcctggaccctgtgttttaggtcccccaaagaaggtgtgaacagccttttggaatctgttttactctggcaaaataatctgtgtccatagattgcaggaggatgctgttggtgttataataatgctctcacatttaaaaataagttatcaagtgtatttgaggaagaaaactaagaaaatctggaaaaaaccccaccatcaacaaaagacacgcaaaactctaaaacttgtaataggataaatgatgttcttgtaatgaatgtgtcagcattttaacacatgtgtgctcagtgtgtggtgatgcaggatgtgtataacagaaagcacaaacgtggtctgtgtttacattaaatctcccacctccaagacacacacacaaaaggtcccacttgagtatgtgtaattacatctctgaatactcccttgatcctatttttttccttttccctaaacacatattttggttacttctccaaagatacatgatatatattagcctcactcagaaccacagggaacatactcaattgaatcacacctctatgagtagtgtataaagtgtaacattttaaaacaccagggaccagggctggcaaggtccacggggaatcctgaaggctggtttccagccacaactgtgctggaatgaaaatagaaaacaatgaggcatgtgcagagtcagcttttctttgtgtcacagctcagcagttttcctgctgtcctaaactttcctaaaaaaaaaaaaaaaaaaaaaaaaaaagctggggctaaggggaaatggtgcagttgcagttgaaatttttttttaatagtaaagactgaaaatataaactaacagctggtgctgtaggaacatgtgaaatgaagagtgaattaatggtgagaaatctcactgctctttgcttggctgtgaggacacgcgtaggaaggacttgtggaaacttgtttggtaaaatagaaaaaaaaggaaaagaaaaagctaagtaaccatcaagcctttttcaggagtgggggaaaaataaaaatttatatactctaaacttaaagctttatttatgatcattattttaaatatctgtaaatgcatctgtaaaaaactccagccaagacagagggagatgtgaattatcaagtatattgactttttttttttttttctgttatcagtagcatccttcagaaagtactgattaaaaaggaaggccattcccagttcttggtttatttgcctcatagcgcaccaagtcaaggttgagctggggccttattccagaaagcacaggcttcctttctgattggaaataatatgtattttgtttgaccttcagaatactcatggctttactggaatacatgggccaacatttgtcctggcaaggccagggcagtttaagataggtatccacagggattgctttatagagcaattaaaagcagtgggagggaggtgactgcagaaattcagacgtttgcatcctttctggcctaaaaatcaagtgagtaatttcaaaaagcagaatttgaaaacaaacaaacaagcacttctagaagtttctgtctgaacacttgagaattttgccaaggtcatagtgttctttattttttctttttccttacatgttactttctgaaatatgatcatagtgttcttttgcaactgatcttggtgtgaagagggggttacatcttatatattacacagtgctaatatgtgtaatattaacatttttttgaaagattgtcaaatatggaccgtggaaaacagtttccatgccgtttgaacgttatgttctttatgatgctttgtttataaaaatattgttagatagctagggatgtttactactgccagctggagttaggcctcatggtagctttttaaagtcaggctggaggtgaattcaaagcctaacacagagtttcaagttattgttcttatttgaagtaaatgcataattggagactgtattctgatttcttgaattcttagctatgccagtaattcttgtttcttagggccacagtttggttctgtcaaatgtgtagttgtagagatgataaatgagtactcagagattagatgaattcatatatggtgacattaagatgttttctttaataagaatacctattatatgggagtaagtgaaaataatcatgtcttaatgttgttgaaatcctgtattcatttgggggaaaaaaagtaagtactttgtattctgcttatgtaaagggatatgaaagaatgtatataactaaatttcttaatgcttcattttgcttttgatgtgcaaaatataactttactgctaggtaaaattatacttgaatattaacagttattgcatgagtttaaagtttcagttgagcccaatatatgggaaccacgcagtttctagtgattttcaaaatatagtcccataaagatgaaagagactcaatagctgaaataggtggtacacttgatttaagtgaacatttgctaacccaggaagaatcaggagccattccaacactgtagctgtgtaccatagatacaaaataatatgttatccaacttagtatgtatttgcttactgcagttgagaacgcaggagtggtcagtgaagtgtagggattagggaaaataattgagaaaaatgaggagaaagaaagaaaaatagatgttttggtaatctttgtcaaatgttttctcaaagaccaggctcagatttaaaatattatgcagatgtagtctttggcctctggtagtttctgataggaattcagccttgagttgaactttgagatgggttgttttcttttcgtttttttcttttttaattactaagtgaccaatctgttgtagtttgttgatctattttttcctcttgccatccttctgttgctttctccatgagctgctgtttattctggaatgttgaacatccacatttagaattaggatttgtgtggctctatcttaaccaggaatggaaaaaatccaacccagtctttcaattcatgggtttaagtggattcagagaggttctcatccacagtgacaggttcagaattcccacttctaaagcccccgtttcattaggtaatgaatatacaagctgagcccttccaggttcacactgtggaggcttctccactcctctgtcttggttggctttcttccttggggtgtttgggaagagtctgattacagccaacttctttccttgtcagttgattttataacacaaaccattaaagttcaaactttttgttcagcagattgatttcatttgtctcttctatagggatctcacttagagtttatagaattctttgctatcctttactttaattcattttggcaaggtatgtagtattaactccaggtgaggcaaccaagagaggggccctaagtcaaggaacttgttaatggcagagatgagcctggaacccaggccttctaggtccaaatgtagtgttctttcctctgtgctcccaaggttcccattgtatcctgtgggcttcttttttgtaacgtaaagtgggtagtgaggagaaaggaggttcttttctgttgatctttcatatacttattgatgttatctttatatttttatagaacttcctgatttaattaaacacttctcaaatgccatgatctcatttgttttcatgatgaccctgaggattagctaggacaggactatccctattttattttattttattttattttattttattttattttatttttagatggagtcttgctctgtcacccaggctggagtgcagtggtgcgatcccagctcactgcaacctccgcctcccgggtccaagtgattctcctacctcagcctcccaagtagccgggattacaggcccccacaaccatgctcggctaatttttgtatttttagtagagttggggttccaccatgttggccaggctagtcttgaactcctggcctcaagtgatccacctgccttggcctcccaaagtgttgggattacaggcgtgagccactgtgcctggcctcaaaaatgcctgcttttataaattgctcacagtatagtagagatttttacagtttggagggtgttggaggttaattttgttgaaggaagtaatttctctaatgtggaggaggtggtaatttagaagactatgttgtagaactgcagccgggtatatgtttacttttgtgagcgcctgttttatttgcccgtttatttatacctatgcattttgatagaaaaataaatatagttctgttttggctccctgaaatagtttttatattttctggaatttcctcacttattgtctttaatattcctaagttttattatgactcattttggtcatacaatagtagaagaagtaggtgtcggcctgtttgaaggggtttattaagtaatttggggaagtatatttttgaagcctataaatattaatttgtccctggtgttgagatttgtcttgtggttgtcagttgtgcatgttcttatatgttttggataggggagagtaaaaaggggttgagcatagtttatttttttctttggctcaaatatgtagttttaccataaaccacggaaagtttcctgttcttgtttgattaaaaaaaagtacacttccattcattgtttccatgtaacttcctatactttttactaaaaaaggttgaaatctaggataaattatgagctatctctcgggcaaagaaacgatttcatttcaggaaggagcttaggaagcgaaccttcttgagtatgagaaacagtaatagcccttggcatgtatgtgtgtgtgtgtatatatacatacatatacatatacatatgcctttccttacataataatgatttgcaaagagtgaatttggaccccgacttctaatcaacatggaaaggcagggaagattccatgtcatggctggattttagaaagctgcaaatggtattgtaccatagagcaggggtccccacccccaggccacggacctgttaggaactggggcacacagcaggaggtgagcagcgggtgagtgagcattactgcctaagctccacctcgtgtgagatcagcagtggcattagatttttataggagtgtgaaccctgttgtgaactgcgcatatgaaggatctaggttgcctgctccttatgagaatctcacgaatgcctgatgacctgaggtggaacagttccatcccaaaaccatcctctcctcctcggtctgtggaaaaactgtcttccatgaaaccagtccctggtgccaaaaaggttggggactgctgccatagaggggcctttgggtggccccgttaggtgttttctttgtgaggtggtgctttccagcctgccctggactctgtggttcatggtagatcattcgtactgacctggaccagggagcactggtaggagtatctgatttctatgaacagtgcttgctggcactgactcaagaaagaagacaggaaggaatggtgaatacaacttccattgagaaactagagtggaaaaaatgtgcaaattatgctaaaattgtaattaatctgggctgtacaggttgaatatctcttcatcctgaaagaaaaggggaggtcaccatgagaaaatgggattgagggaccataagaactttgtcatacctagttatacatttgtttttttctcttagaacttctgaaaagcttgaagccccagaagcaatagaatagagcttttagcatggttttgttgtgaactaaattcccaacagttcacctttagtgcataagcttaactttctttgatggtttgccattcaaattagattactgtggacagtgtccctaatattgtcactaatattatgatacagtatcagttttacagcaggtttgtgcatcatgaaggaagtcagaacgttttagtgagttacaaggaaaatagccatcaaaagtccatataggttactctgtggatgggttggggagccatcttctggtcttcatccagacttgattgacttaaaattgagtatataagagtgtaaaagatggtaagtgataggcttgaggcagagacacaggcctgcagccagaactggaaaaaaacccacaagtatgaaaagtataggcaaaactataaagcagccaggcacggtagctcacacctgtaatcccagaactttgggaagcagagatggacaaatcacctgaggtcaggagtttgagaccagcctggccaacatggtgaaaccccatctctactaaaactacaaaaattagctgggcatggtggtgagtacctgtaatcccagctactcaggaggctgaggtagggagaattgcttgaacccgggaggcggaggttgcagtgagctgggacggtgccattgcactccagcctgggcgactgagcgagactccacctcaaaaacgaaaccgaaaaaactataaagcacagaaatatgggaccatttggtagatatagtaactgaaatcacatcaagttttaataaactaattagtattcataatggcagccctacatcttcaagaaaaatatacaataagcgagtttcaggatgctcaaaatatttaagatggccaagaagaaattatgcatgtagtacattttaggcagattttccttaaaactgactaaagacacttacttttttgaaacaagaaaagacttagttatttggataatttgcttatgtggaatatctcattgccagtcaatgttgaataagtgaggcatttattgtgtggcggaaaggtggttctttgggccagatgaagtaaggtgggaagaaaggaatatgaaatactgagagaaggaattactactttaaataatagatgtagctttggtatgtttttctgtgcaaatcttgagacaaagccctttttgttggaggaaatggcatgcaagggattttattttcagtttgaccatttgcaagtattagagctgtctccatgggagaaaggtgagttccctctggcagtgtggtttacgaaggtttgcttgggaggaaaagagaggagctagttgatccagagtggaaaaacaccaaagcaaagttttctccaaaataacacacacggatttctgaaaaacagcagttactttcactgaatgtgacaaacttcaaaaaaaaaaaaaaagggaaatcagctttgaaacatcatatgacacatctgttttggaaggttgctttgtcagatacagatgtatgttttacagtatgttactatgtaaagtttcgtcttgagcaagctcaatagatgtttttctgaacaggtatctcatttatcccagttttaaatttttgggggagagtttattaaacaataatagtacagtactttatcttatttttaggttaaatacaatttgattgaattatacccttctctcttagccttttattgaactgatatctctgcttagattttatcctttcagaaattgcttattgacccgacacagcaaaatccaaactttttgatatatgtcatggcatatatcatgccaagatcacaaactccatcacatgcttttagcaaataaatgccagtttgcttcttgctttcatacctacaataatgcaaattattggtttaaaaagttaaaaatcactgattcttgctttattacaggcctcttaaattgagaccttggaaaagtattttcttgcaagagctgatgtttcctattattattattattaatttattttttaagacaaggtctcactgtgtcacccagactggagtgcagtggcactatcttggctcattgcagtcttgacctccctgggctcaagggattctcccacctcagcctcctgagtagatgggactacaggtgtgcaccaccatgcctggctaattttttaatcttttgtagagatgaggtctcactctcttgcccaggctggtctcaaacttatgggctcaaacaatcctcccaccctggcctcccaaagtgctgggattacaggtgtgagccactgcacctgcctgtgatttgtttcctttttatgatatctatgtgagcatcatattttcttttcatcctgcctgctagaaagcgcagagctaggtttggcactcaaatgatgtagtttcctttagctaagtgctttgatgaagtttctcttttgcatttttttttccagaacacatctcatagttgaagagatggtaataattacagtaatacaataataaaaatgagttgatcctaagaacagtcttatggggcagatcctgttattatccccattgtatagataaagaaacagaggcagggaatggctaagtagctgccccaggttaaaaggctaaaatgtggcagcgctgggattaaacgtaggagactggctccatagtccttagagaattagcagcttgggagtttggttgtttggcacatgaattcatcactcaacaaatgtttatgaacacgtgccgcatgccaggcactgtgtcaagcactgggagagaggaagtaaaagaaacacagtccttgccctcatggagtttctggtaagtagaggacacacaaacatatgcccaaataaatgaagcaatagatttataaaagcttatatttgctataaaggagtaacaggtgtaacagtttaagggacctctgaattttatcaggtgcaatacaaaagtgtagttctgggccaggcacggtggctcatgcctgtaatctcagcactttgggaggccaaggcaggtggattgcttgagctcatgagtttgagaccagcctgggcaacatgacaaaaccccgtctctacaaaaaatataagacatgagctggtgtggtggcacacacctgtagtctcagctattcgggaggccgaggtgggaggatggcttgagcctggaaggtagaggttgcagtgagcccagatcgcaccatggtactccagcctgggcaacaaagccagaccttgtccccgtccacttacccccaaaaaactgtggttctgaaccacagcaactgagccgagcacaatccttctgtctctctaagacccagtctacactgagtagttctgttgatggcactgcttgatgggcctgtaactgccacaagctctggaaaaaccaggtccacagcttctcagagccttttagcttcactgtgaaaggagcaagagcacaccagtgaccaggtgttcataatttctctgcaaatgtcagctctcagtttccctcctaacagaagcacctgaagcagcaggctagctagcctgaagaggaaggaatagagtttagtcttataattgggacctatatattaagctgaataatttggcattcagtgttaagcatttgactcattcctgtaaccaattgtgagtgccctgattatgtataaactccttaaagtaaatgtgttttagttcgtggcccagtgtgtacacatggctgtaattaacaatattttgcacagccaaaccaaaagtttgcagattttccttttttaatccatggtctcctatctgcaatcaggaccagtggttataggcgatgattcaactccccagcagttgtggtttcccccttctgcccttcctgaccctcttacagtttctcatcttgccacttgtctctgcttcagactctgcaccccagaccctggccaccagccctaacagaatgctcaccaggcccagagcatgccacatgcaatgcatgttattcctccgtgcttttgcacacattcttacctctctttctcccatctttttctttcttgctagacaccagtttgcaaatgataaaaaagagaaaattagtgatcatcttaggtacaaatcaaggtctgagagatgaacagatttggtaatgtcatccctcagggttaatgaggtgtagctttgtagctctgcaagtcttactttgccatcagatattgcattagtaggaattaagttgtaatttttttatgggataaagttcagtttaatattttgaatctaagtcgataaagcatttgcattttaataaagaagtgtactatccttcagttattttgtatctgccaaattcatagggtaggagaaaaaagatcttattttctcccatccttcaaaccttcagatttgttcttggtctctgttctgagccaattaggcagtaacatcccataaattcttatcccctccaaaatgaatgctgtagccagtgtctccttctgtttaagcttccttcttgtgagaagaatagggacaggtgcaccatattattggtcaaaagtaaatcagtgctcggtgtggtgactcacttccagtactctgggaggctgaggcagaggcaggtggatcacctgaggccaagggtttgagaccagcctggccaacatggtgaaaccccatctctactaaaaatacaaaaattagccgggtgtggtggtgcatgcctgtaattccagctacttgggaggctgagggaggagaatcactcgaacccaggaggcggaatttgcagtgagttgagattgcgccactgtgctccagcctgggcgacagagtgagactgtgtctccaaaaacaaaacaaaacaaaataccaaacaaagtaaatcagaagaactgttggccaagatgatgccaactgattgtctttatggattgatggaattccctggaggcagaaacatggcctgttctcgcctttgggagttgtacttccagaatgtgctcagagaacaggaatttttactctaatactgtgcatagtttaatttaattaaaaaaatttttttaaagagatgggggtctggttattttgcccaggctggtcttgaactcctggcctcaagcactcctgctttggcctcccatagtgctgggattacaggcatgattacagggagtacatgcccagctgtagttttattttaagtctttccagtgcaattcatagaaataatttctggggagtaatgctagggagtagtataagaacatcttatcttagatattttattaatcattctaaaagtttttagagaaaacagtttttgattggagaaaatgttctcattcatttatttctcttcccctcaagggactttatgtctctaatagtatttgaagtttgtaaagcgttttcacatatagtgcatcatttgatctataagtcaagcctgtcatagaataagagatcatggaatgcttaaaacccagctcctgtatctcctggttcactatttcccggtgcttctgtaatacaaggacacctcttgctatgtccagtggtgacttctgagacatgccactgcttcacttcaggtcataaaaaccatgaaacataacagcaccacttcctcacagggctgcagaaatccccctctgttggcacgtccagattgtatagtggtatcttgtttagatggaagagtatgtgccttttatagcttggcacttcccaacactttgagaatttggattcctaaagaacctgtgccctttgtttccttttgaacatttgaaaacacaattgaatacaggaaattctccaacatggttgctccatgatttcaacacaacaatacacaaatatgcactggcttttggcccaaaaagttggtggttgacttcttggaagagggttagtttgttaggaggaaggtttggatgtagattttgcttggagggtgaaagaaaccatgataagatatgcctaagagttgtgctgtagaaaaatctagtttttttccccctgagaaatccaaattacaagttttaggacttgtctacctttttcctactagggataagcttcagcctgaagccaggttttattgttgaaaaacccaggtaggagctgtggtagaagcgccctctttggagtttaatggtggtacattccaccgctccatccccaaggcgctgtagttccaatgaattgtaatttgagatggtacaaacatgagcatatgttatgtacacgtcaggcgtgtttgtgagctcagggcattccaggtgtttttttcttggagctttgtttttgcgtcatatcctgtgttggtaacattccttctcatgaagctcgattgaagtgaggcagtgctattggctgagaaatcatcctgggtgccctttcttacagattcttgcatcccatgggggtagaaaggattttcagcccaagggcagaatagatcctgtagtacccagtcccacaatctgtgggagtttgtccctctttgcagctgacagcatttcagaattccctgtgggacaataacaaaaaccttattagccaatggtgtcattagaataaaatctccccactgcgatgtcttggtcccagcctataatgttaccccttaattccctctgcatctttaccacttttattacagctgaacacacgctcctcattagaaccctgggtgatatggggaatcagagtgctgaaaattatgtggaataggtaccagatgtttgtgtcaacttggtatgcattggtatttagaatgcttgaggatcacatttattaaatgtgaaaattacttactatgtcttctccaaaacattaccccccccgccagtatttttgtccatgttgcatgaggtgtgatattagtaatttcttttggcactgattaaatttaaagtctgtgcagcaaatgcatctgttcccaaatgctttgtctgcgttctgtcgagttttggagctggcccaccgccagcagggatgtgggggttctgtaactgagattggaatgctgtgttgcagctaaaggacataatgaaagggtgagtccatttgatttttttctttaagtggaactgggaatttagacattgatgttatagcgagatcttaggaacgtttcccatgtgtccagataagcaagcattagtgaaaaggatggaggagggcatttggtaaaatgagaaacgagtttcattaagttcatgaagtcttttaagtcaaccaaaggtgatacgtgtgaaccgagcagtttattttattttagtagatatgaatgaatgtttacatttggcctatgcatctgttcacccagtcctgaggcgaggaactggaaagtacaaggcagaggcaggtggtgctctgccaggggaaaagtctggagctggagtctcagagacccaggttcaaatcccctattgccacttcctgctgatgtgtttcttagcctctcatgagctccagtttcccatcactctaaaatgagggcattaacactgtcttcacagtggcattgtgagaatcagaaacatgtacaagatgtgtggcccctagtggtgtggtaaccatacatatgaagagttaacccccagcttctcacacaaggcagcggcccagggagccaccatgtgcttcacagtgtggcctcaggtggcccagctgctgagcacccgagcggtgggggcctgctttgtgaaggaggctggtttggcagtggccttggcagtgtggccgtggtctgggccacctggggagtttctcaccagagtttatttgaatttgtgctgtcttcaggtcagtaaatatttttgtcagtagaagtagcatcttgtgggtgaagggggctgtgcctctgtgctggtggccgaggagagtgtaccaaacagaagagcagagcctgacttcagttcaaacaagacacgacacccggcaagattttgagatcagatttctcgagtaagccagcaggggaggattaaactcagctcacactttgagtccaaggaaaagttagatttctttgggagctacccttaaggaatcttgtactcgtcacataccagatgcccagaatgaactgaaatatccagattgggaggcaccagtgaggattgtctctggaggtgaatccatatggacattactgccaggaagcacttttctgaaatacacattctacctctgtgtggctcacaacagtttacttatagtgggttatagagtttctgtgaggctttggatgaagtatctgcaacatgccttttcatgatagagtatggtgtgaagtgagcacgcgtgtgtgcttatgagcattgttgctttcaggtgtgttctttcgtcatcgtccacgccctggttgatccttacgtggtaacacagcttttgctgtgctgctgataaggagcatcatcagagcatgtcactcacttggctcttgactgcagggaagagattgcgtagggaagacgggatgtgggttttcagccgtggccacaggagacactcccagccttttgaggctgccggtgagggcctacagtagcagctccagagctcacaggtcaccacaaaagtgagcagatgagtcagatggggtttcggagcatgttttcctggtttccaagccttcgtggctgggaggtgctatactcgggccccatggtggtcaagtgagaatctgagccactgtgttaactcaggcacttgtgctagagcctgtggggtggatcatgctgttcccaggtggaagccttcctgaatggagctggccctggcattgtgcagacagattgcggaaggaaccactatgaggccaagggggaaggatgggagacaggttcatgagctggctgtggcagagggaaagggacaggaaggctagggcctgacccagaagtggcaggatgaggctggggctgtggtgtgccaacggagagatagaggattgtcctgccacctggagagaggggattggccagaagagtgtccgggaagagaagacaaaaacagatttgtgtttcctgctttctgtgacagttgaaggtggggaagccccaactgggacttgattcttagcaaccaaaaatgccacctccttcatttcatggttggtgttttttttttctgccccttttagtataagagtgaggctttggctctcaggtaaagagtgaaagcaggaagtctgagacagacagtcccttattggcacaaagcccatgcagcatgcatcaccccatggttcttccccatttctcagcgataattgagtgtctgttttgtgccagatactgtgctggggtgaggcaggcagcagcagacagagtggttgggttctgttctttcgtggtgtttgcagtctttgggagcatgtagatgtgaaaccaataattgcacaaataattatgtacatctcatcacaggaagtgctgtggagagaaacggagagtaccatgagagtatgaaaaaatacagatctaacacagtgagggaggtttggggagcttccttgagagatcagtagaatgagcaggagtttgtcaggccatggtggtgggaaggaacagaaacggtggggaatgtgttcctggaggaaaccttgctattcagaggctcctttgggacaaaggttggcacttctgatgaaataaaagaaggcaagtacattaattagggtaggttaagctacaaatgtcagaaaacccaaaataacattggcttatataaaaaaaagagtttacatttgtttcctattaaaaaaaaaaaagcagttcagagctgatcccgtggctccatgttcatcaagtacccaggtggcttctcagttgctgtgccctcctcagcatgctgcttctgtctcatggccccaaaggcttgctctagtgctgcctgttacatccacgttccaaccagcagtcagaaggaaatggcagaagaactgacctccttcccttcatacaggaagctgccagctgctagcgggattgggaaacatagctttcgttctgggtggctgtgtgtccagctggcacttgaagaaaggagaatgatggctatagggagacagtgagcacttctgtgcttcaccagaatggccaaaacacgggagcaagtgtccgaggaatgagagacggggccgtggcaggaagcagggccagatcttggagggccttgtaagtcacgttgaggttttggggcttcatctggacagcagagatggagtgataagtcttttaaagcagagaaaagcaggatcagacttgggtttttcagatcagtttggctgctctatagaagacattttggtggagataagaattaagagcatcttgcagtaatcagggaacgagagacgatggtgcccatggagatggagaggaggggtcagagttgagtggccagagagagaatccattgggtgaggagagggaaggggtgatgttggggcacctcccccaggttggtgccaggtgtacgtaggaagaggctggtgccatttacttagggagggaatgaaggaggaacaacaggcacgaggggtaaagatcctgagttctgcatgttgagattgggtgtccatgagacaaaagtagatggtgaaggagctgttgaatattcaggcctggagcttagaaaaagaagtatgggccaggcatggtggctcacgcctgtaatcccagcacttcaggaggccaacgcaggtggatcacatgaggccaggagttcgagaccagcctggccaatatgatgaaaccccatctctattgaaaatacaaaaattagctgggtgtgatggcgggcgcctgtaatcctagctacctgggaggctgaggcacgagaatcgcttgaacctggggagtggaggctgcagtgagctgagagcgcgtcactgccctctcgcctggacgacagagcgagactgtctcaaaaaaaaaaagaaaaagaaaaaaaaggagaaataagtaagtctgagatggcctggagtcatttctgtaaagagatgagagttgaacccatggatgtgtttgagaaaatctatggaaaaaggatagtgcactccaggaaggcctggcaggcattttacctggaaggcggcgatggaacagctggtggcagaagagcgtctctccaagatattcaaaggaaaacttcatacaatcacactgcctctttcctttcttggccagagaggcttgttttttacccaaaggaaaccctctcccctgattcctacactgtgtctgttctcttaggagaggactactctaccccatacttagagtttaacctacgtcctttagcctgggtgttttcacagggactttttgtcccctcccttaagtcttaatttttttcacttgtacattctgtaccccttgcaaacttatccagttatgtttttcaggataaaattcctagcgggaagttgctgggtcaaaggatgtgtaccttttgtggggccttggataccactgaaaaattataccaatttgctctctcagcagcagtgtgatgctggcacactttttgaggaaggtttcttaaggcatttctgggcttaattttttttataagcattgcctccctctcccaacttttctttaatgaaaagtttcaacatgtagagatgttgaaaccattgtacagggaacatttagattccacaattagcattttgcaatagttgctttatcaaatatctctccatctgtcaatccatcttattttttgggaggtatttcaaagtaagttacaaaacggtagatctcacccctaaatctatgaccacttttttattttcacagaaagtgttggcacagtagcccaggcattgggctggatgttcaccgtacaatgcttggtcaccctttccctctcctcacccagtggattctctccctggccacttaactctgtccccttctctccatctccacgggcaccatcatctctcttgccctgattactgcaaggccgggcacttcaggaccctgcctcctgagagagagagccgcaaggagggccaagtctgaagctttgggtgactggggcaaccttgaaacagttacttaagcacattgagcttactttgctttctttaaaatggggttagtgctgcttccttgcaatgtgtcagaaggatatgcagcacctagcattgcatagtgggcacttaataaatgggagcagtctctctctctctctctttttttttttttttttgagacagagttttgctcttgtcgcccaggctggagtgcaatggcgcgatcttggctcactgcaacctccgcctcccgggttcaagcgattcttctgcctcagcctcctgagtactaggattacaggtacacgccaccaagcccagctaatttttgtatttttagtagacacggggtttaccatgttggctaggctggtcttgaactcctgacctcaggtgatccacccgcttcggcctcctgaagtgctgggattaccggcatgagccaccgcactgggccgagcagtgtctcttattacgttgtatgctgaactgttaaagataccatttcttatatgaccctggggatggtggtagataattcctgattttttttttttgtctttttggtgtaaggatagtttaatcatatgttgtagctttttttctttttcaatcttggagggaaaaaaattctatgaggaacttcgaaaaccaaatactactctattgtgtcagatggtcaggaacacactgttgagtgtatttaaacgtcaagccaagtaagtctctgtatttttatttttattttctgagatagggtctcactctgtcacccaggctggagtacaatagtgtgatcacggcttactgcagcctggacttccctgggcttaggtgattctcccacctttgcctcccaagtagctgggactacaggtgtgcaccaccacaactgcttttatacacacacacacacacacacacacacatatatacacatatacatatatatatgcatgcatatatgtatatatatgcgtgagtgtgtgtgtgtgtgtgtgtgtatatatatatatttttttttgtagagatggggtttcatcatattgcacaggttgcttttgtactcctgggctcaagcgatccacctgccttggccttccaaactgttggtgttacaggcatgagccattgcacctggcctccagtgggtctctgtaaagagtcgctgtcctgtcacttcatcagggtgtgccccatgcattgctttctcttttctttgaccttggactgactcatataaccaacccgtggctagagctctagcccttaaagagggtgtttgccctgttctggactctggcaaaacagagagcatagactctaaggcaagaagtgcacatcttcagcactgaaggcttcctggcactagttccctccctctttgggagtaccttattatttgatttgtttccattgagtttttgcccctgccccagtgtggaggtgagcagtatggtgatttaaggaagatcttaatgggtgatggtggcatcatgcagaggagggcagatcaaatagattgcaggcctttttgcagatgtgttttcagcctgttcagagctttgcacacatacaagaatggaactgaaaggcatttttatttgtgcttaatttgtgataattgtaaattcatggcaggaggctctgcaaccagttcagaagggtttcccagtgtgggtagctgtagccagtgtgtgtccccagaattgagtaggagtaggataatttcttgaagctctgggtgtgaagtataccagacatcccactgcggctgggaaagccggaggccaggagggcaggatgagggcagcagagggagcacctgcccatatggtttccccgcaccccgccaggggctccagggaatttacagtcagtacctcctgttgttgctctcgggacatcttccttcaccaccttatgctttctcagaaagcagctggccacagtccagagagtggcagtgactatttgagaaggcacatacttcatttcagaccagatagctattatcagcctagataatttctgtaagtcctgaaatagacttggcccaccaggcagggtgtctgcttctgggtgcagactggctggttctgaactttgtttgcaaccctggagggtacctttattatttagaagtcaggaagaacaaactggagtacattcaggcctttttcgtgggttctatctgggaggttgtggtgtagtgggcactgtttcagcccagtttcctgggtgattgaatggagacaatagcaccaagctcacagaagtgtgtgaggagtaagcatccagttccttcttcccctgggtatgtctctatcaatccagccaatgtgaaaggaggctgcagtgatgtcagggctgtagcagcctatttcccttattccctacagccaaatccaagtccctggaatggtgccctactcactgatctgagagggggcaattttttttaagctcaatgattcatttatacatttaacaaacgttttttgagcatctcatatatgccaggcactgcagatgaatgctgaggatacaaagatgagtacccacagccctcagagaggtcacattcgaccaataaagatggatgtgtacaccagtggctatcatgtaaatgcagtagtggagacaggcagatggattgcgggagggcagagaaagagagccttcctcagcttgagatgtttgttgtgggggcggagtgagagtggaagaggaatttgggtaaaggaagcaggcttgaatgaggacatggagttgggaaacatcctggtgtgtctggagacctttaaataagttgacgtggagtggggagggatgagacataggaaggggctagatcaagaagggcctcctgtgctctgtggtggagctcaggctttatttggtagggcagctattctgaagggacaggaacttcccacagagatgccaacggcaggcatttgctttgggaacacccgtaacattgagtgcctctaggttaggtggacagtgcctgtgtggaaggtggcatgcagagcttgagtcctcagactccgttcaggaaggtttgtaattgtctagggttggtaaagaagtagagatggagaggagtggatggatttaggatttaaggcttgactgattagaggaagagggaatgaagaagcaggaaccaagtatgaccagcactctactttttctatttgaggctctgctcagatcctacttcttttgggaggatttttctgacctctggcccaaattttgctgtacagctctggccctgatcgcctctacatgttacatcttgctctgtattgttcttaagtttgttttgctttccctaataaagggaagctctgaaaagataggatctgtatcttatacttttgttaagtgcaattttaggtatttaatattatttatgtatagtattattgggactttaagcaatttattttatctctgattttctaccaagagggaagaaggaattaaacacaaatgttaaatgggaagtgtcttctacccagaggaatgcattcatgacttgtgagtccaaaagggaatttaaaaaatcaaatacataccaaattatccaaaagaaatttaagagattgggattttagaagataggctagctttttggccacttagtcttggaacagtttacctggaaaggcatctctggtgggttggcagtggtttgatcacccttgcccctttggggcagaattaattgctgtttctgagtggcttgtgtttgtgattcccttggcaggtccagagcctggtgcactgtgtgaactgtcacctgtcagtgcctcccatcctgtccaggccttgatggagagcttcactgttttgtcaggctgtgccagcagaggcacaactgggctgccacaggaggtgcatgtcctgaatctccgcactgcaggccaggggcctggccagctacagagagaggtaggtgcaggtgtcagctctcagcccactgccactgagtctgcagagatgattttctggacagaagtccttttcttctcttctggggttcaacaaaagaagctcatgtatgaacataagagaacagatttaaaataccagctgctgtctggattgggcaactttaggatttctctgtctagagattggttggctctccccatttcctggccctccgtattggaaaaaaacgttcataagaatttcaacttttaggccaggcatggtgatggtgcacacctgtaatctcagcactttgagaggccaaggtgggaggatcgcatgagctcaggagttcaagaccagcctgggaaacatagcaagacctcatctctactaaaaataaaactaaaaaaaaaaaaaattagcagggtgtggtagttagcacatgtagtcccagctacttgggaggctgaagcaagaggattgcttgagcctgggaaatcgaggctggagtgagccgtgattgccattgcactccagcctgggagatagagcagaaccctgtttcaaaaataataataataatttcatcttttaaacatgattgtgagaaaccaaataaggtaccgttttctctgttgttgtgaaatgtctttcccatttcctcctgtgtcctctgtcttctttctttactttgtcatatgaacttattgcttctgcaggatgagtgaggggaaatgggaacactctggaataaagatggcggtactttgtacttgcctgaaaatccctgagcatagctccttatcactatctaggcagcttcccaaaggtggcggtgacattagcggagatggtgatgataaagatatatgctcatagttactcagcatttactctgccaaacactgttcgaagcactcatacagtaactccatgaatcctacaattatactcattttacaggtgacaaaacaggtgcagaaaacttatttgcgcaaggtcatcatcttcagagagaaatggcgtcctctttcctgtggctcaaaaatggcctagattgtgggtgaatggtcatcatttaagagtacagatttcccaacaagataacacagagtattctgtttttaagcttctgtgtgtcagaaatgttatcactcaggtattcgctctccagggagagagaaaccacaaaaaatcctgatcatagtgaagtataggaaaagtaatgcagaatggaatttatctttgagctttcttctggtcaagaaagttaatttccagagccacttgtttatgtgcctcagccaccccatccttttggggtggtaggaagaggagaagcacgagatgttaaggaaaagcaagctgattttaatctcatgaacgtgtgcagagttggctcatttcaaagacagatcatctaacctttccagcaacattggaaattattgttaatactcttggttgcttgccattgttgctgcaactcatatttcaggtcagatttctttatcccagtaatgtgcctttaattctgaactgatgggggagagtttgtggtgagagggaaaggaggagaggaggaaatgcagctcctatgaagcgttgctgactccagcaattctttagcagcgacaattactcattttatatatgcttctctcagaggaactcagagggaaaagaaagtccaagctgttacagaagcagcaacagcagaaaattcttgacgttaaattgtgcagtactgttgttgactctgaaaacaaattcgagtaagactactgaaacaagagaaaaatacctcgaggagtgacagcagagctctcctgcacttggttactatgttattcaaaatgggattcattttaggacctggcagtactgaggatacataacattagctggcatcagggacatagtgtgttcagtgaggaagaaaagaaagagggcctacaaagggtagtctcaaacttgtttaaaaacctgaacattattctctttcgatattagtatagtatatgtatgattttgggccagtgatttgaagatgtttctgagaatagacaacagacggacctttaagaattagatggttgtagttcaatactgtttgaaaacaagattttgggataactgatttttggagattccatctggctctgcgttgctcacatacggcagatctcagagtagtttgcatatacaaagtgagcatagaggataacatcagaatgagggtcaggacgagagaatgaaagattgtttgtggttggtaagatgggtgtgtataaggattaaatatcgctcactcttttgacatatgactatggagaacattcccgcagctatgcaaacagtttttaaaaatcatttgaaccacatgacccagcaattccactcttaggtatatacccgagagaagtgaaaacacatgtccacacaaagacttgtctgtgactgttcatggcagcattagtccaaaagtggaaaaacccaaattttcatcttctgatgaatgggtaaataaaatatggtatatccatacaatggagtgttactgagcagtaaaaaggatggcatactgataggtgctacagcatggatgaaccttgaaaatccactaaatgaaaaaagacagacacaaagaccacatatcatatgattccatgtatgtgaaatgttcaggatacagaaatttatagagacaaagtaaattagtcattgcttagggctagaggggaaagaaggaaatggaggttgactgctaaacgttacatgtttttttaaaaaagtggaggccgggcgaggtggctcacacctgtaatcccaacactttgggaggccgaggcaggtggatcacctgaggtcaggagtttgagactagcctagccaacatggtgaaaccccttctctactaaaaatacaaaaattagctggcatggtggcgggtgcctgtagtcgtagctacttgggaggctgaggcaggagaatgacttgaacccaggaggtggaggttgcagtgagccaagattgcgctgctgcactccagcctgagcaacagagtgagactccatctcaacaacaaaaaaaaaaggtggaggagatgacaaaaatgttctaaaattttaatggttgcacaattctgtgaatatactaaaaactgttgaattgtaatttaagtgggtgaattttatggtatgggaattgtatctcaatgaaactatttaaaaaaaccgtttgacctgctgacatgctaattagtctataaagtttacgttggctcaattcacttttaccaagattgcttactccttcaacttaaactcacctaatgctttttgttattttcaatggataacttggtttttgtagatatgtcatgatatggtctatgctaaaaataacagctgatctgttttgagggtaatagtaggagggccagaggcagcctttgtgcagtctctaccaattttttttttttttttttttttttgagacagagtcttgctgtgtcacccaggctggagcacagttgtgtgatcttggctcactgcaacctccacctcccgggttcaagcaattctcatgcctcagccacctgagtagctgggattacaggcatatgccaccgtgcccggctaattttttatatttttagtagaaatggagtttcatcatgttggccagtctggtctcaaactcctggcctcaagtgatccgtccgcctcagactcccagagtgctgggattacaggtgtgagccacctcacctggcctctaccaaatattaaaggcaaatatttttcaaaatgaaataagtgccgttacttacaaattagcaaaacaattaccgtgctggctccaagctgtaattgactatgactgaagactggagtagttggttttcatgatgtcatccttaaatgtgagggaattactaaatcagccccatttccccttggcttgttattggtgcaagatcagtatcaagatctattataaatcaccccatatctaatattttactattaataaattcctacctcccaggtgccttaaagttcttcagctggggagagatttttaattttcctgtgtagaggcggtgacagagcctacacccaaaagtagtaactgcagcaggttgacaagatttagggagacagtaacgcttaagttggatgaacagttttataggccagcagagaatttgtatcagaaacacacttgttacaacagtacataaaaagccctcagtaccaaagcaatgttttgtcatcggcctccctgctgggttctcctcgggtcagagtagacctattgtatttttcatctgagaacacacctctcatttgtaatcattggtttcggaaacaacagccttggaagcgaacaggaaactggaaaatgactttctggcaacagaggacagcagaagagcataaacaatgctgagagatcagatttatcttttagagcaagtgaggaccagtgtcatggtttccatccccatgaaaaccagctcctagtaccctctgactttgaagtaaaatgcagccgcccccttgtgtcggactcccgagtttaattgctcagggcgtttcctgattcctgagaggggttacagcaccattagaggcttgtttacagtaacatactttcattagttgctggaatggcaacaattttgtttcctatcatctaatttttacttgtgacctgcttttatgtggtggtgtgtcttttctatttctgacctatctaattgcttgcttattatgaaaagctgctgaggataagtcccaagttagccattacatatgtgtagaaaagatatggacatttaaatttatgcatttgttttgacattaaaggagcaatgggcgtgccagtgcctggctgtaggggtggagtggggatcaggaggctccattaccatgggaaaggggccaggtttaataacttcacccgtcaaaaagctcataaccctatgagcttctctgcctcattccaaaagaggatttgggatgagcctccagcaacaggcataccaacagtgtaagcagaaatacagaatgaggaccaagggaaaaagaagggtgcagcttgcgagccatttgggtttatgtggttggtatgattgtgtttgaaatttggctccaggctttttggcaggcacagacaaatgggatgtgtggttaatcacacatgtggctccaagtcacttttactttgtaccttctctgaggattggcataaagctgtcccttttttggttctttttgagggcaggaaagaccacagtggggagaaagagaaggaagtaaacactgtcaagtgctaactgctcgacttgcctcttaacagctctcacatcccccaaatgacaatactagcagccgtagtggtgaagactgcgtgtctcctgtgggccagccacctgccaggcacttgtttggttctgccagtcttgtcgtcagcctgaaagggaggcttggtggtcactgtttttgcagaagaggatgcttgggcttagggaggttatacaaccagatggtgagttgtggagccagcccccgagttgtgtctgttggattctacagtgcaagctgcaagcttttcccatactccagctagttgtcctttccttttagctcttacttggttctgggctacagaacctgctagtctgctgagtctgctttgttagacagccagcaagtaggtctgttagtgagggtttgggttctgtgcataggtttgtaataactctttgcagtgcttggagtcctttttgattcccttccttgcagctttggggcagtattaagttggtctgtgtgtggcagtgtctctttttttccctttcatggtttaggattatcacaccacatgtcagtaattataaaatgcagggctgagctcaggagccattgtgctctatgtggctgctaatccccatgctaaatggcaccaccaaggggccttttatgttcttgtctgttttcatagttaaacattccccccacccccaggccttcagctgtgttcacacaaatagctcacctgtcctctgcttataatttactacgtcttgtatccaaacttgttttaactgtgtggtaagagagaactagcatattaactgactcttcttgctaagaatgatatgcaagagcttcagtattcagactttgccatctgatttgacatctttttgcttacattgaggaatttggcaattcaaagattgaccattttggagatctttatctacctacctacctatctatatgtaatccttccccatttccacaatattaatacacgaacaccttttctctttttccccctcgattatcgagattcagataatacagtgcttggggaggagtgggtgtgccttgcccaacaccactaaaagaactgatacaaaatctcaaggctgggttttgggagagtacatatgtgagagcaaaaacattaaactagctacattcttttctctatctggggcattttttaccctgctgctattcataaatgacttcctaatgcagtcctgtgcatatgcagaaaaaacaaaaaacccagggctatttatgtttgagataccttttatgtggtatgtactaagcaagtgtcaaaggaaacccctcacacacagacactgtatatcagtgaaatttggtttctaaacaaatacattccgcatataagcactgcctggtgtttgtttaaaaggaagctgttctggaaatcacccagcttgacagggaagattacctctgaaatggtcatttagttttccaccagtccttaacagatactgtcatgcattgcttcatgacagagacacattcagagaaatgtgttgttaggggattgtgttgtgcaaacatcatagtgtaggtacacaaacctagatggtatgtcctactacgcacctcggccatatggtatatatagcccatggctactaggctacaaatgtgcacagcatgttactatgctgaatattgtaggcaattgtaacacaatggtaagaatttgtgtacctaaacatgcctaaatgtcaaaaaggtacaggaaaattatggtactataatcttatgagaccaccgttgtatatgtggtcccttgttgattgaaacattgttatgtggcccatgcctgtactatttctctctctctctcttttttctctgtctctccccacctgcccatttcctctctcctttcttcccttccccatttatttgagtattactatagaaatcatttcattacctacaaaggcaactgaatctgtctgtccacataggattggagggcctgaatgaataggacactcatattatataaaaagagttactcctttacttgaagacactcaatgcaatttaaacaatgacaccctgctaggtcgtgtgaaggtgccagtccaggcctggaaaggggagcagggttagggacagcaaggcaatgcatctgctagctgtcacaacagaggacaatgcaagcgagagctggcactggtcacactagtcaaggatgatgtctaacactttggggcaagatgttcaatctaaaattccagctaactctccaataggaactctccaaaaatgcagtcttggacttttagaaaaagtgaaagcagaaatcagagaggtaatagcaaacaccggggtttaggaaacaaaccaggacacaaggctaagctaagaagttaaaacgttcctaccaagatgcaggttggtcacgtcacttaaatcctgtcattcgtcacagtaatatccagatgctgtaaagttgccccaggaaagtacagcccctgccccggcagagggactgagcctggttggactcggcctttttagaatgaggtaatgccgatttatgttctatgctggctggacagattgtaaaaacctgtcattattgcctcttcccccagatagagactgccttgacaccccctttttttttcgagacgagtctcactctgtcgcctaggctggagtgcagtggcacgatcttggctcactgcaacctccgcctcttgggttcaagagattctcctgccttagcctcctgagtagctgggactacaggcatacgccaccatgcccagctaatttttgtatttttagtagagttttagtagagacggggtttcaccatgttggccaggatggcctcgatctcttgaccttgtgatccgtcagcctcggcttcccaaagtgctgggattacaggcgtgagccaccgtgcccagctgaccccttttaaaatttgtccagcagcagcattttccaaccagtatggtgttttgtctttatggaggttagggttagaaccctgacctgtactactgttgccatggtaactgcccttggctttaaaaaaagaattatataatttcctgaaagtgttgttagacaatgtttttacaagagcactctctgcatttaaaaatgtgacattttgctcttagaacttttgggagagtattaaaaaaaagcaatagacccaagtcaggagcagctctgcaaatctgagatgcagatgtgctgattgggcaaaggcccagtgcatgcgtgtgcagcgtctccagttttccagcttgagccttctccttgccattgcttatctgcttcttgacattctgtttgagagtaaaaggaaacttaactgctaatcgctgatttaaatacttaaactctgcagaagtatttattgcattgacttcaatcactccttccacggtattttctaaatatttctgtgtaagtttagacacgtttaattatttcacttttctttcttccacgatgaagaggccatgtatgacttggcccctctgatgcctcaggtcagcttatttctcttttccttcccctgctccactggaatgagtgaacatctgtacgtccttctttcccttcttccctctctgtggcctgagctaatctctggggagaccctgatgatgcccctttgaacaactcaagggctgctaggactagagggtccctggggtccacctagccctaataccttaggggaaccaggccagagggtgtagcggtgacatgttcactattaaccaagaacttggtgctagcactggactagcccctcggggcaccaacttctgttgcagagctgcctctacacatctgcctgccccactcttgctcctccccagcttatgaagcctccagtgctgtcaagcactccctttctggcacctccctcttggtttcctggttctcattctaccattccatctgtttttctgtttctttctcagctgctcactctttcttcttggggtttttttttttttccccgtgagacagggtctggctctgtcgcccaggctggagtatagtggtgcgatctcagcttactgcaacctcaagcgattctcccatctcagcctcttgagtagctgggactataggcgcacaccaccacgcccggctaatttttgtatttttttcaccatgttggtctcaaactcctgagctcaagtgatccactcgccttggactcccaaagtgctgagcttacaggcgtgagccagtgtgcctaacctcgggggttcttgactgaggcatagcccttggctttctgttttcctctgtctcctctccctgaggtggcttgtctggtcttaggattttgcttgtcacttccttgcttacaactccaaaaactctgcctgggcttctccagtggaactacagtcagatggctgaagcatcccggctcttgggtcccatcttgagctgccaggtgcctcagatatggactggaggagtggctgtcactgtggttcgctcccatgttagatacagggctagtctcagctctgccactccccatgtgtgaccctgggtgagttacttaattccctaagccctgtttcctcatctgtaaaatggagatgttaatagcacttttttttttttaattattactttttgtgagatggcgtctcgctctgtcaccaggctggagtgcagtggcgtgacctcggctcactgcaacctccgcctcctgggttcaagcgattctcttgcctcagcctcctgagtagctgggaccataggcatgtgccaccacgcccagctaatttttgtatttttagtagagacggagtttcaccatgttggccaggatggtctcaatctcttgacctcgtgatctgcctgtctcagcctcccaaagtgcggggattataggcgtgagccactgtgcccagctagtagcacttctttagagggttcactgaccattgagaaatgtctctgtggcacttagggccggtataggtacagtcaactgctagctaacagtaatttttattctctctaaaatagaatttaagaaccctcccaggccagttctcctgaccctagtgctggcttttcaatctggcttccctgacccatcaatgtcaccagtaccatccatcttggaacttttgaaccatcttgtatttactcatcctctttttttttgtctttttttttggagacacagtcttgctctgtcacccaggctggagtgcattggcgcgatcttggttgactgcaacctccgcctcccgagttcaagcaattctcctgcctcagcctcccaggtagctgggattacaggcacccgccactacacctggctaatttttgtatttttagtagagatggggtttcaccatgttggccaggctggtcttgaactcctggcctcaagtgatccatccatctcagcctcccaaagtgctgggattagaggtgtgagccaccacacctggcctgcccattctctttaaaccctatatttggccaatcaccacattttattgacatttcctctgcaattgcccttgaatttctctgtttttctccacttaccctggagcctccttaactggtctcctgggactggcctcttcagctttagaccctgattctttctgtctagcttgtgaacctcttcataaaaccaaacttctctaaataatgctctcataatgaatttgtttattcattcacaggcctgttcaatgaatcactattaagaacccactgtgtgctaggtaggtgctctgccagattcttactcatttttatgtctttagcacctattagagttgagagagaatgaatttaatgaaacatgacaaataatatgactaatatattttaaaaatttgcagaaggccagctgtggtggctcacgcctgtaatctcagcactttgggaggctgaggcgggcagatcgcttgagcttaggagttcaagaccagcctgggcaatatggcaaaaccctgtttctatcaaaaatacaaacagccaggcatagtagtgtgcacctgtggtcccagctatttgggaggctgaggcaggaggatcacttgagcccgaaggttgaggctgcagtgaaccacgatcgcgccactgcactccaacctgggagacagagcgagacgctgtctaaaaaaaaaaaaaaaaaagtacagaagcccaacaaagggtgtgttcattctctctggaagtgagggaaggattcccagaagaaagaacatttgacggagggcttaaaagtcaaattagtgttgttgagccaagggatgggaggactcaatatacacagagtgggcgccaggtgtggaggaaagttcttcacctacacggtgtggctggtggacagatcaagggtgctaggcaggactgaattctgcctgctgcctgtttgtgtttttaaaatagctttaatgagatataatttacgtaccataaagtttacctgtttaaagtgtacaagtcagtggtttttagtatatttatagaaatgtgcaaccagtggcccataatctaattttacaacatttccatcaccctaagaagaaaccttgtatctattaacagtcactctcccattccctgtgtgtgccccccacgacccggcactagcccaaggtagccactaatctactttctagatttatctgttctgcacattcatatgaatgggatcatgcaatatgtatcttttgtgtctagcttctttcacttagcgtaaagcacttgaggttcctcgatgttgtagcatgtatcagttgtttcattcctttttattcctgggtagttttcattgtgtggctataccatgttttgttaatgcattcatcagtccgatgcctgtttttaaagttttattagttttaaagccacacccatttgataatatgttgtctatggctgccttctcactactgtggcagagttgagtattgtgtcagagacctgcatggcctgcaaagctttaaatagttactattcagccctttgcaggaagagcttggcaattcctgtaatagaggatgaagacaatgaagggggtaggctggggctgagtggaagatgagactggaaaggccacgtaaggatttggacttaatcctgtggatcggcttctcaaagtgtgtgtgctgtgtgaagcccctgcatcggatcccttgatgtatagattcctgagcctccccctgggcttaccagctaaaccccttgccccacgcccttattcttaattccacctggacttctttcttcagtctctcaattcttgccactttggaagcccatgcttaggtcttagctcttcaccaaacccttgcctgattgctttaccctcctccatttctttcttttctaaacatcgctctgaatcttcttccccctaccacaacctgtgccttcccacagtatggaattatatgttttattgtattacttgctgctgaatcgtgtgtgttaattctgcacactcagctggtgagtggactgctttcgggcaggaactaggtcttgggtctttttttgcattatgcaaattgggttattgcatggcaccaaggatgttatttagagtataactgaaagtcttcttaaatgactttccttttgcatagtgcatctttatttgctttgcattctattagtggacttagtgtttggtccctaggcccctcaacattggagctaagcaggtgtcctccattttgtatgactgctttgatttacttttttaattaaatctcttttaattaatcttattttttactctaaactgcagatctttgttcagtcttttccctagcccatttctaaatctttgttacattcttctttactctgaggggttttagtcatctgctagtaaactagttagtcctttccgtcagctgggtaaaaagctataaatggttttcaactctatgcagctcccttgggttgctcatttgatctgagccaggtttgaagttgggccattgagaatgatctgtcctcatgatgtagggggtgactccagccaattcttaatattgctggaattaattaactttgattcctctaactgaaagagggcattttactctaccgtgtattattaaataccttataacttgatttttttgattttgttttcttgctcagtgagtacttaaaatatccctgccgatatagtaatttgttccctgtttaatatggctttttcctttgtttactctggactcaagtctttgtagcttgttttctaagtcagctcaaaagttgctggtcattggatttggcagccttttcaagctttacccaccagaatcctacaggaagttgtgtgtcggccagaagagtctgtttatttagagcgtggtgtccagcagaagcaatccatttatgagggtctggtcttaaagacacaggcatctgagtctgtgtttggaagacctgctgctttggcttccattgcagccatgttctccatgctttcctgtccagcccgccggggcacctcagtggcactgctggctgattgaaggagtccttgtctctgagctccttggccttgtctgaaaggctgaaatatcaaggcccagatattagacagggttctagtccaaagcaccctacaataatgctttgtatttatggctttttttttcacctgaaccacagagtccttcagctgaacctgaaatttgtacaactcttggaggatgaggggcaaattacaggtatgacttggatacttttgaagataagagagctaatgagatgaggtgttactgattctcactgtgaagcaaggacagagcccagctttaggatccaaggtcactaccatagcctaactcttgcccggagctgaagtgtccccttgtgcccattatggcttaacttctatttgttgatacatgtgtacacacatctgatccattttgaatttgctccagcaagtcggtgatgtggctgtcggttctctgtgcctagcactgggcttgccacaggttagggactgcatgcctgtggacccgtttacgtggaagctgcatcgatgtcttcttaaaaggtgagtccccctcccagagtgaggtgtggcctcactaccagtgatgtgagcacataccgaggtgccttgggggagaggggcagagaggtatagcaactgctgagaggcctgagcaacaaaaggtcgaaagtgagctgtcgtacctctcagccctcgccatgcccctggggtcttttaatgacctacagttggattttttcatgaggtggaagttatattgaaatttctgcctcagaatagttcctgaagagcattgactctctgggagtcttaggtaaatttaacacttaatgaaggtaaaaacaatcctttccacattcctctgctcctcctctcaacctcaggtcagtcgatgtgcaagcagtgctttccttgggaggcagcagtttctgaaggtaaaggagaaagccctggtccaagggagccaaaggtccgttgggacacacatgattccgtgttgggcacatgggcatgtaggtgtctcctagccttgccaagctgtcttaaattcgggcatcttccaaaatcaaaggcaactgaagagcttaatttccaatgatgatacattttgcctcagtcatctggccccaaaagacttctgggggccgatcaccctcccttctattctgaacgccctcatcccctagattgtcacttggtgcttttggccagggggctctgcttcttccttgctgcgagttcttcctgctgagcccagcatccccgtgagggctttcacgcaggcccttcattgctctcggtatgttgtcagcccatgtgttgcagtttatttttgattcctgctttcataaggtttgaagattccactcatttttccagtggttgttaagatagtgagaatctaaatgaaatggtaatattaccattgtgaacaattatttttctaaaagaatcttttgtgttcatttttaatgctgttaagatctaattcccagtattttatttggaagctcttcaaatttcccaaatcataaaatctttcaaagcctactccaagttactttttcttgattcagctctcctatttgcatttaaaataaaaaggccagcctatttccaaatatggaaatgatctatgtttattagagatcagcaaagtgatatgggcccttgacttgctgtgaggttttttttttaaatgtgttttagagcaatgtacaagggcaatttttcgtcctgttttgtcatgtgttcttaaatacatttcctaaacactttctctggcttggtgctattactgtgtatacgtcctacatatgtttcctattttttatgactcatacttacggtactcataaagatttatcctttatcttggctctgagtaatgagcccacttgcacatttccagcagaactgtgggttagggattttacatttcattctgctggagaggcctctggaaggcatagcacaggcagcgcagcatgttccttgtaggcagtactcacttctccctgagggaacagttagctcagtttttgtgaatttactaatttttgttctctagcttttcctttccctttgccctttttagccattttgctgtttgagtgaggccacacaagagcatgaacagatgaaacaaatgctctactcctttttgctgctgagtaactgtggtggaggaagaaatggaaataatgaactgaaacgatattattacatgtggcaacaaactcaggcaaggagtcttcttgggtccaaataaacattcagacccatgagactatcataggccatgggtggcttcattatacttaaaagggtataggacaaggaccacagcttacggcatggcagcaaggcattcctccttgttgtgtgccttgtgactgttcacacatcagttcatcagttcacatagccatccagagctctccagctgatggctcaaatgccaggagatgagatctctgtgtgtgtgtgtgtgtgtgtgtgtgtgtgtgtgtgtgtgtgtgtgtgtagttctctagtttaaaagccttaggaaggccgggtgcagtggctcacacctgtaatcccagcactttgggaggctgaggcgggtgggttacctgaggtcaggagttcgagaccagcctaaccaaaatggtgaaacccgtctctactaaaaatacaaaattagccaggcatggtgacgcatgcctgtattctcagctacttgggaggctgaggcaggagaatcgcttgagcccgggaggcagaggttgcagtgagccaatatcatgccattgcactccagcctgggcaacaagagtgaaactccatgtcagaaaaaaaaaaaaaaaaaaaaaaagccttagacccttgcgggaactagtaggcaactatgtaggaatagttttcatggtactctgtctcataaatatgccccatttacaagaatcactgctctcagggaagcccccagatgtcacttcttatcagatgtcttaaaattttccagtcccaatagcaagctgccttgtgttataattgacatattgtcttaccagattaccagggttacagaattgagagagttaacagaagatcaaattctcatgtaaaagggaaaagctttgctcactgtttatccacacctgtacgttttattgtttttatttgtggtattcctgactgtgataggctaaataatggcccccaaagatatatccacgttctaacccctaaacctgggaatgttgcctttatatagaaaaagccttagcaggtgtgattaaattaagaattgtgagatggaggattatcctggattatctggtggcccctaaatacagtcacatgtatccttataagacagggatttgatgacacagacaaaagggaagactgtgtgaccatgcaggcagagattggtggtctggaacccacaagccaaagaatgccagcagccacgagaacctgaaagaggctgggaacaggttctctcctggagcctctggagggcatgtggctctgctgacaccttggttttggcctagcaatgctgattttggacttctggcctccagaactgtgagagaatagccttctgttgttctaagccacccagtttatggtaatttgttacagcagtatgggaaatgagcacacactcacattagtttgagttccatgctccctcctgtctccagtttgtttactcctgtgttccccagctctgtaaaggacgctaccacacagttgccagggccacagtccttggcattattatccatgacttcctgtgtttgctcagatgtcatatccaatcctatttgttctaccctaagaccatattctgaatctgcccacttctgaccaccaccttcggtctgacccaccatcacatttttacttgagaggcagtgggcctctggcccatccctcttaggagtgcaagatctggggtagagcgccagtgttggaagcctggctacactgctcatgagctgtggggctttgggcaagtcagttaacttctttatgcttcattttcctcatgtgggcataatcatagtatctacttcatagagttgctgtgacgattaaataattaaagcatgactggtgcttagaacagtgcgtggaatatcatcagcactccataaatgtcagctgctatcattgttagcaattaagatctattctctaagtggcagccagcatgatcttttgaaagacttccgtccagtcacgaagttcaccagttcagcttcctgccatggttttttacatttcaatgaaaatgcgcaatccccaccagagccctgaatgatcttttcccccttctcccagcactctcaccattgctcactgtgctgcagtgggccctgacatcttgcctcctgtccttggcatgggctctttgttttgcctgaagtacttctcccagttactcatgtggctgccttcacccagtccctgctttgccattacctccactgagaggccttcattgaccaccccatttaaaatagtcatagcaccccacaacagacacactctcttttactgttttactttaaaatgtaacttatattaccacctgatatttatttttaaatatgttcactgtctatctcttctgctagtatatcatcagtatagatgttttatctttagttggtattgccaggaattagaacagtgcccactacatagtaagcagtcaagaaacatttgtgaaataaacatttgcatgaataaataagtatgttgatgtagcagtttagcaaataggttaagtctagaaattctatatatggaagtttctcattaattatattttttgaagatctagttattgatattggtatgtatggcttgggcataaagtaatgtttcttaaaccaaggcttcaaggtatagaagacagcactggattgtgagtcttaataaaagacttccctcttttttggtcttccctctgttgtgatcttttttgtttaaacttgagggcaaatgtgtagacccatttggatctcagtttctttttttattttctgtcaatataaagacattgagaaaattaatatttcaaaataccaattgagaattagagtcaaaagcatttctggagttgttaaactacaaaatatccttaaagaaaccctcagcattcagtgaataaggaaccacctaagagctgaaatgtaaactaagggtgtctcatgtcttcttatgtgtgttttttttttttttttaacctagattaagtaggatttacagatctgggggcagatctggtctctgaatacttgggaaaatgcttttgagtttcattgcttatatcttactgccttgcacagtaaaaatttcatgattttccaaagagctctactgtttcgtcaggacagagtacatgtgaatctttccctgtctttcttttatttattgaaatgcagaagattagaagaactaattatttcagtttgttgagtggaggcctctctccacataaattagaaccaggcagttggacagtcagctgcagctgcctttgtgaactgggcaccggtgcaaagcattgcaggagtgaggagacaggcagccctcggagctcacggtcaccgtgcatccagggacaaagagcaacacctgtaacagaaagtacggagacgtagaaacatctcatcgccctaaatacacgagatagaaacttaaccaaatagatgtaatcaactacagctgggctgagataaacacgttaagtgctaagtaatcaggcatgttagggggatgtggggctggggctagggctggggctagagctggggttggggctggggctgggggaaggcattgctggaataattggagccaggtgtgcttgcctggtgctgctttttggaggtgagaaattggaaaggtttgaaatggggatgtggtttggcagagggctgaaaggagaattttccaagactaggggaggagactggtaaataaaatagagccgagttgagtatgaaatatgttgaggacagcaagtaccttggcagctgtgaaagcttcatctgatggttttgcctgttggtgttgatgctgggagaatggtcttcagctgaacaccacaggtcttcaaagccaggtgaattgtgacagcctgtgacactggaaggggcagtgtagacaggcctctgaagataaatgtttgtccccagatttccccactacagattgggagaaacctctagctttacctcacaatccagtgatgtcagctgccttggaagcagttccttgctttggcacttcctatgttcctatttttttggaaggtacctgccagggaggaaaggcagcgagcacaggtgattgagtttttgttcagagatttggggtaacctcagagtagatgtggtgttggggtcaggtgtggaatgaatgtggtcttcccaggacctttgtttgttagattcagaagtctccagaactacggtgagatttggggagcaaaacctgagcttgtccaggttagtggtgcctgaacaggaacaactagcaaagatgttgatgtttgtgctacctttcggccctcgtctttaatgagctccaaatcccaaaggtgaaggaaaagcagacaaatgacagaacaaccattagttcctcatgaggaagccaagtgtttggagggtcatgtatgcagctgccaccaatttgtcaccctgcttgaaaatccagggacctgtaggcaggaggtaatggcactacactgatcagagccaaagtcaaacgctggtaggcttctttccagagaattacaaaacctggcattttatttgtttttttcaacacccctggaagggagattctgttagctctgttttacaggtgtggaaattgaggctaagagaggttaagtattctacccaaggtcatgagctgggaaataattggtagaacctaaccttgaattcacaacacacttcctatagatggagttgacatgcactctgagtggctctgggcaaggtgggctttcccaaggcttaggcatttattcaataatgaaatcattatttattaagcacctgtttgtaatgtgtcaggcacagtgccaggcactggcagtcctgaccccctacccttgagaatttgccaaaggtaacaaaaacacagtggatagtgagttctcccttgctcccgctcccatttagatgatctcaagctctttactttgcttaaatgtgggcttagatgttgcacccagtgttgcgtgttgacttaatcatatgcaggtaagtctttgagctgcaatgaaacagccatcaggtaagagttaaatgtgaatagctgggctgtcatctataggtgaagagcttagaaagaggggcaggttagggcaccctgttattaacatcagctctgttctatacaaacaattctcttactggattacctgtgccaaaatattgctgaatagcttggaaacaggttagtattttgccctttagcaaaacagacaaaagaaagaccatggagttgaatttggaaaggaatcttggaaaatgaatgtttcagtacaacaatgtatcattcacatgcccagaaattcagcactgcagggctcctgctggcagaatcaggtgaactctgggatgcattctgatttggtcttgaattcttgcatgtcttgagtaggttgaaagttggttatttttgttttgctggcagtggcctttacttagaagtgcccaggagatattcttgggatagatgccaacaggctttgtgtcttttcccttcaattttataaaaatgtaaatgaaaggatttcccagcaccaagttgtggagctacctgggtattcaagtgacaggaagagttggttgttagggtggttaggaagggcttcttagaggaagcgtgcttgaactgagacctgaatggtgaaaaggcgtgaactatgccgagatctgggtgaagaagaggccaaataaagggcccaggccctcagcttggaagcagcttgttggagatgagagaggggccagtatggctggagtggagttagcaagggggagagtggtgggaggtgcgattggtcattgagggttggatcacgtggggccctgcggagtaagaagttgtttcttggcatttctttacatttctgtgttcttatctagtgattaaaagagctgaccctaaattctgaagacttggggagtccgtgtttgctaacaacggagaattggttctataaggagaaatgcgaatagttccactggcaagggaagtagaaactagattactagagtggatatttgggctctagtcccaaccatgccataaccagctacagaacttgggcaactcatgacctctttgggcttcaatttccttatctataacaaacatttggagtagaatgtctgtaaaatctcctttctcactagaagtcaatgattttattatatataaatttcatttttggttttatccttttgtttctttcagacttttaccagtgatcttacagtaaccaagtccactcactagttctgatttcactcttttctctattcctttgcttctggagtagccagtgaagtacttggaaaaaaaaatgtcaggagggaaagagagaatttcataactttgcacagtgtactcaacagtgcatatttaacacattgcctgttgccctgaaagaattcccaatcaccgcatgagtcgattgtgatgaccgagacttgttctcagactagtgatgtagggtttaaccaaaaaatgccattgtccttactgaggaggatttatcccatcaaaacggcatttgagaacctgacagtgggatactgttgtttgcatttactcttttttttaaatcatattttgatttattggaaacttatatttcaataaaaaaaacctgctcatctttcagtatcaattatacaactctctcattgaaaagtatatctaggccgggcgcagtggcttacgcctataatcctagcactttgggaggccgaggtgggtggatcacttgaggccaggagtttgggaccagcttgagaacatagtgaaaccccatctctactaaaaatacaaaaattagcctggctggtggcgcacgtctgtactcccagctatttgggaggttgaggcgggagaatcacttgcacctgggaagcagaggttgcagtgagccgagatcgtgccactgcattccagcctgggtgacagagtgagactctcaaaaaaaaaaagaaaagtatatctaaaagaaattagcaagaccaagtatattaacttgtttttagactactaccatgtcaacacttcctattttaaaatgcactgtaaatcatggtttacccttaggattagctttgagtatttcattatttgttttgcttctgccaaatgtaaaagactaagtgggcacactgacccagaattaaagttaaggaaagcaaagaaactctctaaaacaaacattatttaatttttcaagccagcatttcaagacattttcacttgttgaaaggagaaagcacttctattttgttctctagtattcactttggcaggctaaactaaactttttaaaattgttccttttaattgagtacacagatcattttagtgtgacatggcatttatgaaattgataattcagtcacatcaactcatttattgagatacattcatttctagagatcttttgttttttgagatggagtcttgctctgttgcccagactggagtgcagtggcgcgatctcggctcaccgcaacctctgcctcctgcattcatgcaattctccctgcctcagcctcctgattagctgagattacaggcgcctgccaccaagcctaactaatttttgtattttttagtagagacggggtttcaccatattggccaggctggtcttgaactcctgacttcaggtgatctgcccgccttggcctcccaaattgctgggataatgctcatgagccactgtgcctggcctagagatctgtcttgaagacttttactgactctattagttgctgaaagaaccataggctctagatttataggtggccatagagatagagtctaaccttttcatttatggggagactgaagcccaaagtaagatacttaagccaaaaaaaaaaatcatttatttatttatttttattatttttagagacaaagtttcactatgttggccaggctggtctcaaactcttgtcctcaagtgatctgtccgcctcagcctcccagagtgctgggattacaggcctgagctactgtgcctaaccccctttttaaaatgaatgatatgtcaggatcttacattaggaggaaggcaaaattggggagcaccggggtttgtggtttatagtgaaagttaatttcctctgtttctcagacaattaactttttttctccttgagggcaaacaacaaatgattattttctagaaatcagacaatcctatttttgttctaaaatttcatgccaacaatttacttactttcttctttgaaaagaatgagagagattctgacctaaaattgtctgaaatgtgtactgaagatgctaatattgtattggtaggtcttgccaagatttaagagggcatctcagaaagacattgtacaccattctacaatggtaacttgttttcaccttagagatgataaagtagagggatagataagaggcttaattcagctcatttcttacacagtagagaattatggatagaacttacagacttttacataaaataatgtaaccaggaccagaattaccaggccctataagttgttccttatagaaatgctcaaggctcctagctcagttgcttaattcattgatagtttatggttataccccaaactcaacaagtgtttattgagggactatgacctggggacaaagccaaggaacaaactcctcaagtctaggagatttagggttgagggctagagtttgatttttctcaccatgcaagatattccttggtaattcagcaacaatctaaaggtaccctttagatcctaaacaaaaatgggatttaaaattgttattagatttatgaatgatatgttttcttttgggcaagtaagtcaggtaatggaagttcatttagtgaatcagtgcagtaatgtggttaactaagtgacacttactaagccagaagttaatgtactcattatctatcaggaagcaaatcagggtctatgtctctgaaaagcaaatgatcgtctttcattaactggttaagcttggctttcaaggctcattgtgatctggctccagtaccctttcaacgacattcttctttattcttttttgtatttccttagctccgtctgaattaagtattcttcacacccactcatgctgcctccactgccctcctccttgtctggaccccttagatccacctttccccattcaccctctggcccagctgaagtgcccccttcctgctgcccacagatgtgtttgtatctgcctgtccctctgcccccatcaaactgtgaacttcttgagggcaggtattgtgtctgactcacatttgaagtcctttcattacttagtggtgcttcccaaatataagtttatatgtgctattagtcttcacagtttgtgtagtattcatatattatttgcattatttaccttttttttttttttttttgagacagagtcttgctctgtcacccaggctggagtgcagtggcacgatctcggctcactgcaagctccgcctcccatgttcatgccattctcctgcctcagcctcctgagtagctgggactacaggtgcccgccaccacgcctggctaatttttttgtattttttagtagagacggggtttcaccgtgttagccaagatggtcttgacctcctgacctcaggatctatccacctcggccttccaaagtgctgggattacagacgtgagccaccgtgtccggcccataatattttttcttaaatctactcacttaaaaaatgactttagcttcatcctcaacttcctaaacatgaaatcatgtttttaattcctgtaaaaatatatatacataaagtatatcttaaaacattcttattatctccacactttgggaaggattgactgagtaaagtgctttacacatagtagccattcagtttctgaggaatgaatagtaaatgcgcaaaacataacatgagaacctcttttccctgttagtttagtaacttcacgcttattaacctagagataaaaggaggagggtgcagctagaaaagactgagcaagcccgtaagccaagccattcattcctgtctgtgaagcatttaggtgttagatattactaattacctcttatgcattgcaaactgctgggctagaggggcctatggaacaataaattttgtggattgcagagtccctgctgacttactgagtgagcctctgctgaaactccagaaattgtgtaagtggaccccttccccacaaaagattcagaaagcagcgcactatacatgggacacatcctagagaaaaggggtgtggtaagtatgtgtacacatcacatggttgttgttgtatttctcagtgttcctgtttggggcagtttaagttacagatttctcactaccactaagtgttttttaggaatgcattgtgtactgccaacataacagaggtctgaaggatttttctataaatttgctaatgggaattgtatattttttaacctaatttttgaggatattgtaagattactcaggtagaccaatttgagtttctttaaaaagaacaagttcctatatattcaagctatagttaacatagttaataattaaattaatcatactaataaatattgaagcctcttataaatccatgaagagatttctgttttagttactatactctatatttgctgcttctatagagtgtagaaatagtatgctgtagtttcttatttattatgtaaactgcagtatagatttagggtggcagatcagagactagaacaggtgatttttttcaattggtgtttaataaagtttaggtaattttttcttaaatctgtaggaatcagtctatgtaagttcagcatgggataaagtctatttagggttttatgagaaaaatcacccactcttttttttttttttaatccagggttgggatcaacagttgttctagcatgggcagggtaacttgatataatggcatacatttttaccctggtctgctcttagagcaaatttgaaatggttgttttggaaaatgtgctatgagtttctctccagacctttgcaccagggcaggcagtccagcctagcaaatctttggcacttgatgcgcatctttcataacagaactttgatgctgagactcagtgtcttgaaatcagcacaacaaaatggtgcctgaggagcagtgtttactttgatcattcttcaacttctgtgccccagcctttcacagagcacaaattgctttaccagagttacggtgctgaagcccacgactgtttttgtagtctggttgctgtggtgatccttagccttccatgaaactcccatctctagggaaatagaaacctttgcagctgtctcggcctttttggttttgtatctggtggaggtcttcaccgagcttgttcaagcctgagagtgatcggtttgtgtcagagtaaaatacacacatggaaacagggcatccccttcaggatgtgttgtattaaaaaaaaaaacaaaaaaaacaaaaacacagctcccttatccttctctccaatcatgtggggcctttgaagtatctccaagtctggctagagtgaagtgagccttggagatgttgttggtcatgatagtgctgtgagtaagctttgggagcgtgactcaggaagtggggtggccaggtggggaagaaagagagtgggggcaaaggggaaggttaacagggcccgtgtgtgcccagagagaagttggtttaggaggagaatgtgggccgagtccaaggatgccagcagcttgatgtttagaggactatgaggaaacccgttttgacttgaagcctcaatggaggatggtatagacaagagcttccttccataggaaccaagggaatggagaatagcagctgtggttttagtgggtagaagtaataatagctaacacttagagagtgcttaccagatgccagtcactgttctaagtgctttcgacaaatgacagatttaaccctttgacatctgatagaatagatacaattattatccccatgttacaattgatgaaactgatgtgagtagagtcttaacatcctcgaggccctagggtgggtaggtggagagctgagattccaacctaatgcctggctctgagtcactgttcttaaccaccaggtcaaactgcctgtaatttagaaaggaaggcagagtgacccaaaggattgggttacgggagatgtggccaacttagaagaaaatgtagatcttggaagagatgaaattatgctttaaaatgtgtgtgttgattcatgtattagtccattctcacattgccataaagaaatacccgagactgggtaatttataaagaaaagaggtttaattggctcacaattctccaggcagtacaggaaacatagcagcttctggggaggcctcaggaaactttcaatcgtggcagaaggcgaagggaaagcagacacatcttacatggatggagcaggaggaagagagagtgaagggcaaggtgctacacatttttaaacagccagatcttgtgagaactctctcatgagaacagcactagggggatggtgctaaaccattcacgagaaactacccctataatgcagtcacctcccattaggccccacctccaacattggggattacagttcaacatgagatttgggtggggacacagatccaaaacctatcaatttcttcattcagtcattcattcgttaccaaatattaatgtaattcctgtaagtgctagatactggacaaggttctaaggtgataaaaatacaagtcccaccccatgctctgagatagtttatatgtacaaagttaatacaaggcagcagattctggatgctgtaagagatgggtcaacaggacataggtcagtaatatcctctggacacaaagtcttctattttttttttttttttgagatggagtttcgctcttgttgcccaggctggagtgcaatggcatgatctcggctcaactcaacttccgcctcctgggtttaagggattctcctgcctcagcctcctgagtagctggaattacaggcatgcgccaccacacccggctaattttgtatttttaatagagacggggtttctccatgttggccaggctggtcttgaactcccgacctcaggtgatcctcctgccttggcctcccaaagtgctgggattacaggcatgagtcactgcacccggccaacacaaagtcatcttaaagagcatggctttttttttttttttctgtgatccaatgtgaaaatacaaaacagtaattaatgcatttatccctccttccagaaagaattgagaagttactttgctgagtttgtatatagtttccaggagtaaaatagttcctgcctcttactgctatagagcagcttcccattctcctctatgtcccaagactaacacccaagattaaagatgggggtgggtaggtagggggagagacagacagacagacagggagagacattcattctacttccagcactgtcattttctagccatatgactttggcaagaacaccaatttctttacctttaagatgggagtaattagatattacgcagagcacttccttttgatgagagcagcaaatctcaacaggagccatggatctacctattgtctttccttaggagatgatgatgatgatggttattactactgctgccaccatgatttttaacaataatccaagtgcggtgtttttgaatgttcatgtcttagtaattactcctctctggatttctgatttctgctagcaaggtaacactgtactcctaaagaattccttaccagcttcaggttaatatactttctaagattgtactttagcccaggggaatccaaatgccatcctttgctgctgagagcatcttaaatcgctacctgactacaactgcattttgtggggttttgtttgtttgtttttgctattacaaattaactaactttaagatgctgcttaaacagaaatccttattgagatcttacagccataataggttcattgtccaacgtgcgtggcaagtcaatacactgagataccaggttgcagcagagacagaggtttaattgtacagctgctgaactgggggaaaactcaaatccatctcccacaggagtttggggttggagtttttaagggttttgggtgggctgaaatatggagattgttgatgggtcgaagagtgcagggtaaagtcgtgggacagggggatgaagaaactgtgttctcatgctgatttggtggttcctttgtgggagtctttaaactggttggtgtcagctgtcccgttggaattcaggatctgctcatgcaactctcaaacaaaacccttaggattctaacatcagacatcctatctatctataggagcaatggggatgcaaatggtgagaatctagtgctatgtgacttggttacaagaaactaggtcaaagagcagcatgttaatgcttaattatattttctgtccggaattcttgttaacccagtgaggacagcttcaatctctgactgcacgtagcaggtggaatgattactccagtactcagattttgtgggaattgagttcctgctatgcttattttgtaaatcagcttctaatgatcactctagtgattctctttattatgcagtttgatacatcacagtactgatgcacaggccattctaacattctgttgttggtaaagacatatacatgtgagcatactggcttactaaacaggtatgtagcaaagctaatttgaagcccattataaaatgtagaaattaggctaggtactgtgtggctcacacctgtaatcccagcattttgagaggctgaggtgggaggattgcttgagaccaggatttgagatcagcttggacaacatagcaagaccctgtctctacaaaaaaaaaaaaaaaaaaagaaaacaaacttagctggttatggtggtttatgcctgtggccatagctacttgggaggccaagacaggagattacttgaggagttgaaggttacggtgagctctgattgtgcaactgcactccagcctgggcgacagagtgagatcttgtctcaaaaaaaggagaacttgagaggaaatacgtttgtatagcacatagttatatggggctttggttacatattagtgttaaaaacaaaaagtgatctgaatggatgtatttattaaatgtgacagggaatatatatatataaaaagcaaactttccctccattttaatcaatttgcaaatattgagtttcttcagtttgtctaaaattttaatttctaatcattctaacacacttaattgcctacatgcaaacccgtgtaaaattctatgcctctaaaagatagtggaatatttgctcaaaatattttatctttgttatctatccctaaggaagaaaacacgctccaaaggttttttacattttatgtgtttttatttgcgtaactgtttaagataacaaacattttctattttcttttctttgccttttatggttcccatggatggcccaagtgccattctacgctgtcttacacacagagaggatgatgatcagggtggcttgtcctacaaagcctgggagtggccttggcatgctgtccagcataccttccaggaagcatctccgtcatttgtttcagtagctggaatctgcttatcttgactgtgtgttaatgttctgtttactatatacaccccaacccccttgttctggccagaaaaacaggtcaatatgactctgtaattattatcctagtcacatttcattaataacttttgttcgttccttcttttattccttctttcagagaacttgtggactgcctactagatgtcctgccctgtgctaggcctaaggatgcagaaatgagtgtgactcagtttctgcccttgaagaatgacctgaggaatttatactgtgacaggggggacaaacatccaaaccagggcgtccgatcttttggcttccctgggccacattggaagaattgtctcgggccacacataaagtacatgaatgctaatgaaaactcatgaacgaaaaagaaaaaaaaattgcaaaagaaatctcataatgttttgagaaagtttacgaatttgtgttgggcctcattcaaagccatcctgggcagcatgtggccgtgggttggacaagcttgatctaagcagttcattatagtgccaggcagaggcagaggtagaaacaccagtgctgtctgagagagctctggctctgtctgagggagggggaaagattttactggagatggcattgtgagctggacccacaagtccatccggagcactgtggtgcactttaggccagaatcctgcaaggctgcggtgtgttagtgatgtacacagtaccccattcacacaacctatcttaatgccaaagaatgatagaaaagtgcctgtctgtgtcctcagacttgcatcagtagtggcctgctgagggcactagcagcgttcctccacccgaaccacccacacatcagggtctccgctttgcctgcctctcttctccgcagccgggggagctgtggctgctctgggaaggaagggcctgggtctctggaatctccttgcaacggctcccaggacccctttagaaggtcatgacctgtagtttcataaatactcctctgtttatatgagctcttgcccctcaacccccaacccaaatttagttcccagtatttttccagggcatacaaaatatggagcagagcttatttctgcatcccgtttcagactttcattttaggttttttttttttttttttttttgtctcttttgtggttatattagatgattttcagaggctctcagggaatcctgaatcatgtccttgttggggggaagggagattagttttgaaatagactgacagtgcccctctcagcactttaagtggtttcaagacaaaaccattgggaaagagcttgataccatttgaccaaggagaatggttagttgagtgccccaggtcaggatggggaccctgggtgtgtgtgggggggaatgtgtgtgtatgtcaagatttcttgaattcagcaccaactgattaatattcttctagaaattcagagaaatataaaaataaaaaggaaaaattttaaagctccacacccagttctctaaaaatattttgagggaatctttttatgccaattcccaaatggtgaaggacaagcaatggtgaataaaatatcagctgtaggggttccttagatcagaatatactttaaatactgcagcagcaactaagtaaatactgttcccacccctagcagtcagttgcacattttagatccatctggggtcaggtttgagttcctaaaagtcatattgcccaaatgtcagtgaaatttgagttcagtgggaccctagtgtcctgaaataggtttgtgcctttccatttgtgggtgcaaagtgtgggtgctgggagacccagattcaggatgttttcagttactactaacattgttgccaagtgggatgtctccttacccctgaagaggggacagatgatggctatatacagaccagcatgtgattttatgggtcttggttgtaggcacgctgttggagttcttttcttatcttagtgtaaactgattattgaatcatccatttcagagaattatttggtctggttttagataataagagtttccctggtagtgttttggatgacttcattgcttcatgaacagcccacaggggctgttctaagaatcagaaatgttgaaatggacctcactgacacgttagcaaaattggacagctgttagactagcatatcagttgccttgctcactttgctttttcgttcgttttaatgaaccccagaagtagggggtctaactaattcatattctgaaatctctatggtagaaatgccttgcatctatattatgaatcttgggaaattcaaaacaattttcataaggaatctttccataaagcaagtagggtttccccctcttcctgtaattcattttcataaagtaatctacagagtttgagacaatagatagtttttgcttatcaaagataacctttggagaacccagaagccttcactataacaaggtccagaaaagattgtccttgttattttctgctgataatgtgagcaaagacgttcttcccaagtgagagatagggaggtagtgtttccactcagaggctttgtgctccttagagttgtccttgactttgggcaaagttgtgttcagattccccagaaaaacactcagaagatctgctttgaatttctttataaaattgtatgtttgttgcattgcacaggtaactgcagaagacctagtatgaatagatgttgtagaacaggttagaccaattaactcttttccatttaggggaagaatcagcaatgtatgagggatggtgttacataagggatgtggcagatcagatttgcttgcattttctcacaccatcaggaataccgaatatccagcactgtttgaaaccagcatggttagaacaggaactcttggattaggcttcatggaccagtttgtggtcaaagtacgggtttcacgagaaactgcatgtgaaagtttttttagttctgagtcttcatctattaagttcttctgctgaaaggatgacatcttaagaccagcggtgtaatttgtagtttaattagatggatccattttgttaccattgttgctcttagaactttcttactcttttacgatggggttcttaatctgggttaatgggtgcctaacggggagttcatgggccctgcaatgaatgtaattccctgacattgtctgcaaaagtttgtgtgatatggatgttttttgtttggtttggtttggtaaggagagggtgcacacatgcattcagttctcaaatgttccatgactcccaaagatttacaaagaagccagtggtttcgagactggtcattgctgctcctttgagctgcatcccctttggttctaccagccttcacagcttgcatggtcccagtgttcaattccttattacttatcagcccatagacaaagctgttaacctgtatttttatgtgtaaatttgacataggattgatggtcaactctttaaactactgtttggatttccaagctggagatttctggatactctttgtatcatttcttcatgggatatttatttgctgtagtctgcctcagctcggcctttagaccatgagcactggagagtgtaaccacaaaaagcttcaggatattcttatatttgtaactgtagtctaccctgagctataattgatcctaaggaggattttctttttcttttcttttgtctttttttttttcccccaagcctgggagaaattgagcaacttagccaggaattctttgagatattgctgtgtgttctctctacatttctggaagcttttataccatggttcttttgttagctgttttggttgtcctttatcttcccttcagcaagatttactcaagcgggggaagcatagaaaagacaggttgctgagggattaggtgagcaggcacttgcaggactcattgtccctgccaaatgatcttttaaagaaactattgggtatttttctttgaatttcccaattgtagtgtgaattcttctttgccaaatggcttttggggctctgcctggaccctgtgtgccagagtcagagattcatcttggccagacactgccacatattgaagagggagctgtttccaggaaagctcagagagctgtggctcctagaaatcttcccttgattgtatgagccaggcctcagcacttttgaccatctggaaaattttggacctgagcaccaatatctgtctcatagatctttttcttctcatttcatgagcttttataaaaaattcttgttcatttgaaatacatacttactagtattttgtagtatatattttgaccgaaacttctgcatatctatgagctctaagaagaattgtatgcctgaggactgcaaagaaaatcttcagaagaagggttgatgcagcccctgcagatatacattactagtctttgcatcattatggtactcagtaaatagtcttgaataaataaatagagaaaccttttactgatacatgctattagtgaaagagtgttgctttgcagttttcaggtacactggaacaaatgatgatttcatccctccttcattctccatagtgtgtgtgtgtctctttgttcagtacagtttgaatctttgcttctgctatttctatagcatctcttcttctcagtggctatcaatctgtttatttctagatgcggacagcatctccaaagtgtgctgtgaggtagagtctttacaaccaaggagcacattactttgctgtagctgtacttgacatcactgttcatctagtactttgatttagtgctatgcttatgccagatataaaaatgatcctagctgtgtgcagaaatagctcatgacagttggagtattgcttatttttgtatttttttgcaaattagccagctaaattcctttgaacctttttttcccctttaggtaacatataaatatatgaatttgctgtgataagtcaatatttattgtgtgtgtttacttcccggccttttggctaagatcaagtgtattatcgtgtctatgttaagcacagttttttgtttgcttgtttttgaaacagagtctcactctgtagcccaggctggagtgcagtggcacgatctgggctcactgcaacctccacttcctgggttcaagcgattcttgtgtctcagccacctgagtatcaggtgcctgctactatgcccggctaatttatttttgtatttttagtagagacggggtttttccatgttggccaggctggtctcaaactcctggcctacagtccattttggaaattaagacatgcattctcaagctagtgaacaagatgatgcaagttattcatagaatatttttgtggcattgaaaagcagagaattaaaacattattttgacatttgctgagtgcttaccatgtgctaaagcctgggttttgaaagataatgaaagtttactgttttatttatcaatgacctgagagcatactatgataagtgacattggtcataagtggtccctacaaaaaaaggtagaagtatgttgagatcacagtgggctggcagccattgggaaaatgtgaaatagtccagcatttagtgctgtatccctgatggttgtatagacacagatcgtggatctagaccatgtcatcctcatgaggattctagctgagatgtactattattcccagtgcatcattcagtctgtgtctttctagcctaagtccttttttgtcctgtccctcccttattactttatggttatgtttgatgagttcactctgtttaaatatgtgattcttgggtcttgcctccccgctctgtatggaaagccagtatgagacagactgtatgaaagtatctagtcaatatttccttatatatccctttgttctcctatgttcatgttgccctgggctcatgtgtgccaagaggactttgttgagtccatggtttgcagctccattcacaggtgctttttggtgatgttaatgacaacagtgatgacctgcaatagtccttgatctgctgtcaaaattggttacagtttttgtatccatcccatggttttcttccctgttttttttttttttttttttttgacaggggctgtatacaatcactctttattctgtgtgtcctctgtgcttcatttctttggaaaagcccttcaagctaaaagctgagacaatgaaagccctggcagcctcccttggcagccgctttttctcagctttcggcacttttctttggcagaacccatttcactttatagaggttggagcttacctggaggagaagaaagtcatttctctggagatccagagggatgaccccaccccagggggattttgttttccaagtttcaccttagtcatttgacctaaagcttaaagcaggcctaagggaaggtaacttttgttccacctttgctgacttttagaaagaaaaaatgtgttctgtttatttgttctttggcagggagctaaatcatgctttggttgagattagtgtggttgactaatatgaaatagccattttgtagtaaaaaatggtcaaatattggcaatatcatctggttcaacttaatgtatcttattcatagaatctgagctacattatagcttgtttctgttgatagtgagttgcaaaaaaagtattccagaggctgctctgagtgattttcatggaaagccagggctaagatttctgccctctttctgttgcttcctaggtcacacttcacctgaatcccatctcctcagtccacatccaccacaagtctgttgtgttcctgctcaactccccacaccccctggtgtggcatctgaagacagagagacttgccactggggtctccagactgtttttggtaagtgcttaaacctcccccaaactgatccttagcacaaggacataatggtccttaaactttgccaaacttttcataaaggcttactttcactgaaataatgccagagtccaaagagtgttaaatttggaggatgcacttagtgatatttggatgatgacatagataagcattcacagaaagcagacacacccgcccatcttctgtgggcagaggctggggtctagtgcgcacattagagcaggacctgtcgtcatactctgtgtggcctgagctttggtttcagctctgaaaccccccttgtggcatcaggagccctgtaaatattgtaactggctaccgggtgtgtggtccctgaccacaaaatgaatatgcacggacccatactatttgtatataacacaggcctaattcctgatatgaggatctgtttgttgagaaagtgacacagtgagctccaaaatgaagtcatttgtattttattaaaaaaacaagctggaactcagctcttgtcgaaagatccaaatattacctactatttgtaaatcatgtccctttgagtttgccagaacattcaagtgtgctagttgtggagaaatcgatgggttgtttggatggaatttttttggtgtgatatcatgtctgatgatgagcagcactgcaacttggtagttgtaactcacattgtctattacgagagctgcaggctaatgtcctaactgcggtgcctgaggccttaaacctctcttgcccacaagcatccaaaacaagtggagtccccagttaatagttttcctcttgcctcatgaataaactttgcccagttaatgtctctcaatccagatctgtagtttctttcccctgtgtttgaagagtacttctaaaaactcaaaggttcttgttgaataatgtaagaatccatagtcaatacaattattataataagtacataaatgaataaaagggagaaaaggaaaagctcatctttatagtaaaatgccaactagaaaatctagaaggagcaaaggagttagaaaatgatcattttgcaaccatcataataaaagttgaccaggcaagaattatcaacagatgctaaatctagcagagatggagggagttcaggaagtagtatatttagatattcttaaaatatctttcatacaaattacttattaattacacataaaaaatagtgactatataccttggggatatcccatgataccttaaccaggtgattaaaattcatatcagcaatgtggggcagatggacgctgtgtgcctataaatgagagagaacacagcatcacttttgtggtatttttgccagaaatgcatataacctgaatctaatcatgaagaaacgctgacaaaaccaaattgaacgacattctataagataactggcctataatcttcaaaagtatcagtcatgaaagacagagaaaggctggggagccattccagattagaggagacaaaaagacaagacacatgtgatcctgagctggatcctgttgggtagggagtggggcagctgctataaaagacattagggggacagtggattgtattttatataaataaattataattgagcctatagattaaaatattatatcaatgttatattccttgaatttgataattatgttgtttttatgtaagagaatatccttaggaaacatacttaatactctttaagattaagggctaaaaggtcagatcattcaggaaaaaaacatgttgtatagagaagaataaagcaaatgtggcaaggttttaaaaactgatgaatctagttaaaagggtatagtagagtcctttgtactagcaactttgctgtaaatttaaattaatttcaaaagaaaacatttaaactcaaaaggtacatttacaaggtgggcattacaataactttattgtagccttttctgggaattgcaactcttattctatattaaaaaggccaaaaatcaaaaatcagtaattatttagttgttattactagcacatttatttagcacttaggatatttcaggtcactaaatgctctaatactttaattctcacgatagccttctacagtaccatagtgtagatcctttcttatagatgaagaactaagatttagagaagttaagtagtgggccaaatcacatggctagttacttgcagagttggtactcaaacctagatgggacccattctacaagctgttatgctaaactgtctgccttcgtactcataatcactgtcagtctcctctaattaaagttacttgtgatagtaatactaatggctctgatcataaagtcatatgcacatttagccctcatactgtagagctatactgtccaatactataggaaatagctgtgcgtggctacttaaattacagttcttcagtcctgcttagccacatttcaggtgcttagtagctatgtgaggctagtggctaccacagtgggcaggttatggaggcattatgagcaaaggcagtgcatgtcctggtttagatccaagcagtgaccttgggcaaattaatttctctaagccggatttttctcaggccctgcatcatagggctgttatcttgagtaagtgagatcacatataaaatgtttatagacatcacctgctgttgctgctcttatttatttctagtcacagtaaagagcatgtgggacgggtgttgaatttgcatctgtatttatgaaatatctagtttggctggccccagatcaaaaggggttctgtttctctgggctataggtccagatgaaagtgtgggctacgtatgtcatagttgtacttatcgctgcctggattctttcttcagtctgccagttcatgggttttgacggaaagtgtcttactcttagttattaatttgctttaattttgcttaaaatctgtaaaaactgcttcttggtcatcagtttagacactaacaatgaaagaaggtggccgctttagtaaacaattgaacgtcagccccatttggatcaatcccatgtaaggagattgcagatcaagtaatgagcctaaaattaccaacacgtgggaggcagcatcaggagaagtcaaggatttaaattccaggacacctgaactctgctttgttgtccagcaggcttcctttagggaaaacggtttttttcccgtctgcacatttcttcttggcctggaagagacgatggaacatctgttgttcattcacgttctcacatcagcagacaacgagtgatgcaagtccttgcacaagctgggccactctccttgggcaggcttttcccttcctctctgtggcctgaaatgaattttagtttctcctcatctccttgatagcctttgccacagagggtctggtgatcaatagaaatccagtagtgtgttctctttatccatttgtatagttaagagttaaagtttggggataagataactaaattattttatataaagtgttcatcaaacacttcagagggcccacgggatctctggaaattcaggcttcaccgttttcatcactgtcttctccgaggttacccagggagcctaaaggagctgtggaaagcgaatgggtctcttgactctcagtccacgatgcatgtatccttgcctgtttcctgatatgctgctggatggtttgcatttctgtctcagagctgtctactgtgtacgtagagttacagaacttttaactgtttttttttaaatagggcaatgagaaaagttcaagtaatagcatctactcatttatcagggtgacctttttatttaaatggacatgtctgtgttgttatgactgcccaaattaaaaaaggaaaactttcataattagttaggagggccttatgttacccaggacatcgcagccacccttgagggtgactgaaaacatactttaatactagtaataaaggcatctgtctttttctgtcaaatcatttcagtccttctcaccccctcacagcacaggcaagaagggaacgtgtcaggcagggagaaagtgggatttggttttctctgcaggtgcagctcctttatctggttattctggttacctaggaaatatgagtgggatgaagagtgatgctttcaggctgagtttcaagtagtgaatctttgagtgtgagtcacacacacacgtgatgaagttgtaataatcttatagttttccttttgcagggtgtatgggtggcccagagaacaatcagaaataaaaatcatcttaccctctcagtgtgccatgttgaaactgcaaataatctcttagaaggatcacataagcctgtttttatttatgcattcatttctacactgaaaaaaaaagtaagataacttaactgggtgatgatgcctgaaccttcaacctgaatttgctaaaatgagagccacagtatgaagttgtctttaaggacatactacaatttaaatacacggtttctagagaaaagacacaaatggccaaaaaacacatgaaaagatgctcaatatcatgagtcattagggacatgctaatgaaaaccacagtgagatgccacttcacactaggatggctttaataaaaaaggcgataacaagggttgtgaaagctgtagggaaattggaacacgcatacattgctggtgggaatgtaaaatggttctgtggaaaactgagcaaaacacatgtccccaagaacttgtccacaaatgtccaaagcatcattattcacagtaaccaaaaagtggaaacaacccaaatgtctaccaacagatgagtggatgaaaacagtgctatatccatataatggaatattagccataaaaaggattgaagttctgatacataccacaacatagatgggtcttgaaaacattatactaagtgaaagaagccagatgctaattgtcacaagttgtatgattccaatttatataaaatgtccagaatgggcaaatctatagaaacagaaagtagattagtaattgccaggggctgatgggaggggaaaatggggaatgactactaatgatacgagatttcttttgggaggtgacaaaaatgttctataattacatagtggtgaatataccacaccttgtgaatacacacagaaacactgaattgtacagtttaaaaggctgaatattatggtatgtggactgtatttcataaaactagtaaaaacttgctgcagcacttttttttttttttttttttttttttttgaggacagagtctcactcccttactcaggctggagtgcagtggtgcaaacatgcctcactgtagcctcaaccttctgggctcaagcgatcctcctgcctcagcctcccgagtagctgggactacaggtgcatgccaacatgaccagctgattttttttggtattttttgtagagatagggttttgccatattgtccaggctaatctcaaactcctggtctcaagtgatgcacccactttggcctcccaaagtgctgggtttataggcgcgagccacagtgctgggcagggactaggtttttaaatgtatctttttactttattccatgtacctgatttttttttctttttttctttttttttttgagagagggtctggctctgtagcccaagctagagttcagtggcatgatctcggctcactgtaacctctgctgcctgggctcaaaccatcctctcacctcagcctcccgagtagctgggattacaggcatgtacccccacacccagctaatttttgacttttttttttgtaaagatggggtttcactttgttgcccaggctggtcttaaactcttgggctgaagccgtccacctgccttggcctcccaaagtactgggattacaggtgtgagccactatgcccggcctctaattttttttttttaatcttgctttatttgtattccaaacttgagcattctctcctgcaaggtctgtagacttggagccctaggacaagcagacgttttcaagatgagaccctagtgcctggcttttaataacctaaaatacctagtccagaggccttggccagcttacttatgtcaggcttagtcactttgcatgctcataaggaaaaaagggtatctaagattagaagtttcaagaaataagcagcttcttccaacctcattcactctcgatattactgtgctgtgatctatttttttctagccatttatcattaaaatcagagagcaaatgtatgtgaatgtgtgtatgtttgagtgggggatggggcatagaaggggattttggtctttgaggtacaattgctggagctggcatataaaaatagaggatgcccaattaaagttgaatttcagataaataacaaatcattttgttagtgtgcccatgtagtatatgggacataacatatactgaaaaagtattcattgtttacctgaaattcaactttaactgggtgtcctgtactttattgggcagctctactcggaggtaattcaggtttttgtttccagttaacaccctggcctgggtgttaggaggcctgagtactagtcttggctctgccactaactagttatatacatcatcgggaaaaaaaatcacttaactactcagacctcgtttcctcatttctaaaatgaggggatcgtactagctcatctctaaagttcctcccagcttttaaactctgtgattctttgatagtacgactgctagatgttatatcccaatttaatttggaacagaaactggcaaattgagcattgcctcttcagcaaatccaagtaaatatcaaggcagggcagttgcaataaatgacagaaactaaactctatgctattagctttggattaaaaacaaatcaaaacttaatcctaatgaaaaatgtaaattaataaatttaaaaccagttttgtattttcaagaagcggggagggatgggtgaagaagctggagctgccaacatctagtttattccttttacttaaactagaggcattaaaaaaaaaaaggtccaaatattttgggcctctgccaccaaaccacaggcagttctctggtctgcactggagtttggatgactgacaagactcagtgaaaaacaagtgctatttgttttcctgtgcctagtatttaactggaaatcagaaggctaaatttccaatcagttgctaaatagccccagatgtgtgctcagtgcagcactaggaagggacacgcacagcccataccaccgtgcatgtccagctgttaccttttcatgaagccaagtgatgtgtaactgagggttgtagtgtctgtccaaaaacgccctaagaataactcagacattcaagtttgcttgtggagaagggaactttttttaaaaaaaattctgtattctattgtgttacatttaaaaatctggaaataatttttttctttgctaatttccttctttcccttctttggcagttcccccacccccatgtttagaaaaaaacacagaattagcataccgggtatgatggtttatgtatgtgcttgttcattcatccaacacacagtttttagtgcctgactgtgaactgtgctagctgtggaggatctagggaaaactggggtgaattgcctgtcgtcagggagcttcccattgtgtgggagagctgattgaaaaattgggaattgcagtttagtgtgctaagtactattacgctaaataatagtgaaaattggagaagatgagaatagtagaaattggagaaaatgagaattctcttcttccaaatgcaatcaaggcagcttcctgcatgaggttggctctggagaacagcatgtggcaaatgggtcaaggttgcagacacaaacacagctcttggctcggccagaagcattacccctgtattccagggacccggatataccagtttgtgttttgcagtgaggtctttccccagataaattctctcttgaagggagattaaataactaaatgtttcaagattgctggtggttcttcttctttttttaaatgtctcttgtggaatgactcattgtgtcctgtgggatattccaagtggttgtgtaccatgcatttttattccggagtctgctcatctgttggttttgtggcttgtccttaagggccttaattatatgggtcttgatcctctcatgaactagggtcagtcaactaccctagttcaaacaagtcattcctgtttcctaggaataggagtttttggccctattgtggccattgagctcttcctaaatgtcactatggcaattagaacattggaaagagcccagtttcaactggtaaacctggtccagaaggggtttttgaaagactccctgggatttattctaacttgctaggttaaggctggtgaatgttgtgagtgagtgaatggcccgtggcccctgggagatttgcctgggtgtatttttcctgaggaagacctactgtccaggagggttcacgcaagtgtagacttttcctggctctggctggacttgcgtcatgtctgtgtgcaggcatgggttgcagccctgtgaaggctttgctttcattcaacaaattgaggtcaaataaactcactttcactgaggaggcaaggttggtgtttcttcgtgtggagtcccataacgtcttttaaggctttattgtctaaggctaatctggtaatcagatgcatctgcccttcccaagtgttgggcaattgtatcaaatgtcacatctctggtgccctttgttgacgtggtggccagcctccagagagctgttcggtagaaaaagtgactgttttgttaaggaaggttgcagaatattttatttccatgtaataggaggggaaagaaaccccaactgtctaccaggagactctgggaggctgacttgaaggctgtggctgtgccttgttccgctcataaattatagacagtgatgcctttggtaagggttctccacaggtgacctacactctccatctcagaaagcaactccaggatggtccaactccttcctggacacaggttgttgggtttatttgaggcaaattggttcttgcacctcgagtccacattatctaactctagcttggaagctacttctgatttcgcaggggaggaaggagtccctttagccttctaatttctgtgtctaggatagaatttgcttttctcaagatctgcttttgccttttgttcctaacactgtatccttagatgacccagggtctttgttgcaactgtgggtccttaatgccactgtgctagggagtcaccattggtttgcctctgccttgtcccactgaggtggtgaatgacacagtgtatacctggaagtcagggggtcatccgtctgccacctctagcaaaagtctcacagtccatttgatctctggcctttccatctttatcacagagagcctgttcttgagattctattggttctgggtgatacagatggcagagtgatgttcagagctgctgtttggagccaagcctgccccaatccattaaaacagggtttttatatccttttcttgcagtttgtataagaaggctatggtcctgccgtagtgaggaatgactcgtggcctgtcaacctcagcatctgtcagacaaatctcatggcccaatgtgaggatacatacacacatatgtgtatgtttaacaagcacttctagtgtgtgccgtgtgtgaggtactcttctgagtacttacatgtatgagcttagtcttcataataagcctgtgaagtaggtgcttttgttgtctttgttttaagatgaggaaactgagacaaagaggttaacatgtacctggtcccatagctagtaaacgggggctctaacccagggacagtgcttagtaagtactcagtaaatgttagcaataataataataataataataataataatactttccagaatggtaaatggggacctcattgggaacagtcacactgctgactcgagggcatgactatgattttatctctaactctggcctccagtctggagccactcatgactgttccaagaacagggcttcagaattgaacctatagagccaaatcagggcatcgcatcaggtgagcaaacttcttgtttcagcaaagtgttttatgcatgacttatttcagtactgggatctagatcatatcagtatttcacttgaataaagattttaaaactgtttcttgacccctttcccaagagctttccctctggggtcccagttggagcgtttctggatcagctccaccaggatgccctaatatctacatctatcctgaaccctgtggggaccgtttgttaattgatgctaaatatgtgcagttcaaccttctttgctttgacctaggagaccaccttgatcatcttcagagacttcaatgtagactgcaaaatgggtgtggcctgcttaagagggctctgcctttgcttcagagctaattttaggaagctcaaggaggctccaaccacagttatttcgggctagaggcctcacctccattcttgccctccaaggaaataccctttagaactttttttcccaaactgttgttaggtctgtggttcctgggccagaatatgcagctctgtttctcctagggcttgcaccagccattcccaggagctatcagtcagcatttatctagagaaacagaaccagtcggggatatatatatgaagagatttattacaaagaattggcttatgccattgtggggacaggcagggcaatcaaagtccgtagggaggccttcaggaagggcagctcaggcatgagcggaagccgctgtccacaggtggaattttttcttcctcagggaagccttgggtgtgctcttaatggctttcaatggattgaatcaggcccacccagattatctgatacaatctcccttccttagtgccacctgattatggagtttaattgcgtctacaaaatacctcacagtaacgtgtagatgagtgtttgattgcatagctggggaagatggcctagatacgttgacatataaaactgaccatcacagaaatttttaagatccttgagcaatttgttgttgtttactctaacttgacttctagccaagtaattatttcgttgctttaactgtttcatttctatttctgtctgtcccttccattccgttcctctccactctgaccagcacagctcctgagattgctggggaagaggggacagagagggaaataacccaccaggagaatctctgcaagcagcagtgaagggtgggagccccctgctttgcctcactgcttttccttttcactctcctctaagcctggagaatgttcctctgtatttgcctacccagacttggtagaaagcttgccctaagacacccaggtctttgctgacctgtgagccagtcagttccctcaccaacgggagatgacctttccaggcagagtgtccaccttcccacagtggaaagagcatcatttttggagtccagcagacagtttgaatctgcactcatttcttgctaaaggtgtgtaatctggcactttatctaattgctcagagccccagttgtttccactatcagatatgaggattcagaatccatgtgacatgcacttaggaagtgtgcagcctgagcttttgtgattaatatcatatttcctagtgttttattaacatgaggctgagggatgtgcgtgtctaccctacactactgatttctgagcctggtagctgactcttccacagcgatggaatagaaagagctctagagtgagaaaccaggtctttggttctattgtcaaccctgttgtctgccagctgtgtgccttgggtagatcctttagcttctgtcagcttcaatttccttctctgtaaaatggagttgagattatcagccttgatgaaaaaaaaaactctataaagagaattctaggaacatgtttggagccaggcatttgtaaaaatcagtttttgctcttgaacttgacttggctgattggatgtaacttagaagaaaaaaaaagagagtcttccctcctgtggggttctccaggagcacatttggaggacaaaattagataaaggaatatggcaagtaatagtaatgataccaacattttattttttttcgtgaaaaacatcatttagattgaaatgcactttgaatttgggggtaagctcttccatcaggctaacattggcagatgaggaagggtaaagttaggagtctgaagaattttttgtaaagctggacaggattcctgtgtggcctgggactctactttggaaaactatattagaaagcagcttgtgcttcatcagtttggtaacttgtggggacttagtttgttttttagatggaaagacatcttttgcttctctttgtgtatatacacactcacatgtactgttgttctgataacgtttccatgggagatgagagtattgcttttgtactggctcatgttcaagtttgtgcatgtttgtgtttggagggcagcatctcagagctttcctcttggacgtgtgtaaacatgcagggtgttaagaacatggggcggtttcagtcatttaggttttttttatatttcagcaaaaattaagaacaggatgatcatcatgaatgttttgagaaaaagtaatagtcaaatatgttttaagtcattttattggaagaaagtaatctggtttggggtactaaataaaatcacccaagaatttttaaatggctgcatggatttgtgtttcatgaatgcatgattggcagataccatcatcacatggctcatgaatatgtagctttgcaaattatgaacctaggttcacaggcatggaagttattatttctttgaaatgaagcttttttaaaaggcattgagtcatgatatatgttaatagaaaacatgtttcggattgcatttcacatcacatggcttcagaggaaataggcaagtggggtcctcccaggaattgggtagggagaacgtgtgattttcctcttttaaaatgcagggttcagtcttcatttggaaggtaaatatttcagtgctgttccagtatgtttgtttttgctggactttgtgtgtccaaaatacataaaagcataatctttgtaatgcctttctgtgtgggggctgtgatgagttctagggccaatctgtagatcccacttaaacctcaactgagattcttgaggaatacctattctcctttaccgtgtgtcttttccccctggaactgagccagcaagttcttggcatggcaggtgtttctgaaatatcagtgtgtttttctttgctttctttgttttccttgttttgctctttctattttcctaagcaggcaactccaaaaagagatttgtttgtgcaggagtcaggaaaagggaagaggaatactgaaagctgggagtagggcaggacagaagagggggaggagtctattttcattgtgtaagtgttgaacttccaccaatgccaaagtcacggacatgtgtgcagttggatgtgcgagttagagcagccccaagggcctgtaacctgaatagcaggcactcacccagctgataactcaagttccaaatggaccacagctgagttgtaggggatgtgtgtgtgtgtgtgtacgcgtgcgtttgagattcctggaacagatttcctctgagatctcaacaggctttttcattatcattggggagctatggtttctcttatttcacaaggcccatttcttccttttgagatgtgcaaggagatgactccatccatgacttggctttacactctccctcttggctttttatcatcagtgcagaggagagattcttgctcgttcttcaaacaatctcattcgagctttataaagattattggagtttaaataatattcatatctatggcctagaacaatgttcctcaagtatgcgtcagaatcatgagtggtagagggaggattataatgtagtttcctacatttctacctcccaccaccctggagtctgcattttaacgtacttctgtctgaggatcagactttgggaagcgttgggcttgagatgttttcttgacattgatttatgttgagaccagaccaagaagcagatggatggacatgatcagttcataaacatgttcctttcttagggtcaaattggaggaggctctagagaagcactgtccaatagaaatataatgccaacaatatatgtaattttaagtcttctattggtgcatttaaaaagtaaaagaaggctgagtggctgggcatggctcctcgtgcctgtaatcccagcactttgggaggccggggtgggcagatcacctgaggtcaggagttcgagaccagcctgcccaacatggtgaaaccccatatctactaaaaatacaaaaaattaaccgggcatggtggcaggtgcctgtaatcccagctactcgggaggctgaggcaggagaatcgcttgaacctgggaggcagagactgcagtgagctgagatcgtgccactacactccagcctgggtgatgagcgaaactccgtctcaaaaaaaaaaaaaaaaagtaagtaaaattaatattaatgacactttgtttaacccagtagatccaaaataatatcacttaaacttgtaatcagtcaataaaaattaatgagatagggatttttcttgtgctaagtggtatgcattttacatttatataacacaggtcaatttaaccagcaacatttcaggttcaggtacttgatggtgccatgtggccagtggacactacattggataacagctgtagagcaatgatgccttcgctaaccccctggcagacacgtggttgctcatggcatttgttcccatttctccactgctcctgaatatgacctcagaatccttctcggcacagaaccttaggcaggcactgccagttaattggacatcaagatttgttttatttatcaaacaaatacttaacaagtatcttttttgtacccaacacttggggtatacccatggacaatgcacactaagatcccagcctctgaaggaaccttctagtggaaggagttgggcaataagcatattatatggcattttagaaggtgacaagtactgtagaaataaaatgtaaagtgagtttgggaaaatcagaattcctagagtggggctgggtggtggggttgtaaatttaaatgggcccattgagaaggtaacatttgaatagacttgaaggaggttgaggtgaaacttaagatgagacttaatatccacttttgatctagggtggcctgaagtttcctcaagacttcatctgggagcattctttttggggtaggggtcaaggaggcaggaggatggggatgtgtggcactatccacagcaagttcctctcctcaccactgaagactaaaccaacgttggggaggcccagagagaggctacaatgcaacctgccaggtggtgagtcagctgatgtgctaagtgctaaagcaaagaacctcagtgccaggaaaatggtgtctgtgctcattagctgggacttgtacacttcactcaggcttgggagatcaaccttgaggcttccgtggatccgctgaggactttaagagttaaagcttaaagacaggtgtggaaacaaagggctggttgcctctttggcttttttcatgtagttttggatgaggttgttgaacctgatccagaaaaaataataaacttggctgtggttgcctagccgtaagttcttataataaaactcccagcaattggcagatagagtaatgttctgctctttaaaaaagtctggtagcataacctgaatttcaaatacaaatgttgtgcatggttcaagtagggaggagcattcaggagagtccagggtgcacctcagcatcccaggatttgtttgactgtaaagtgcttcatggttccccttcaacaaacgtttactaggaattgggacccttggagcccagtgctctgttcattcccacaggaagacatttgtcatgtcagggaatgttagaggattgggttttaattagcaagcaggaggaaagttcattgggttgtggggaagacatggaattactaaatatgctttaataattggtttttaggtggagttattaggtgaaaaatcaaatcattagctttaaagcttggccaaaagctcatttcctgggcagtaagggaagcaatgagtttgggtaatgggaatgaatcaattatggtgtatcttttcctgtaggtaacaacattgagctttcattcaacaagcaattattgggtccttgcttcatgcccagcactatgccaggcccaagggattcagaatgaacaaggttttttcttggccctcgaggtgttgctctttgtcaaatgagggtggcaggtatgctgataaatagttgcagtccatgtgagagagggatggactaaaggtctgtacagtcacttgtgtgcagctcattgtgaggagagtagggagcctgggaggcttcacagagcaggtgatactcctgggaggacacagaacggtttgccatgggagcaaggtaggatagacgggttcaggcagggtgcagggtgtaaaaagacccaggagtgtgtggcagcatgatgtgttctacaactgtgagtagttcttgggtatgtgggagggtggcatgagatgagggcgggcagaggcacttcagtcatgcgccatgttaagatgcttaggtgccattccgctttatcatgtgtttactttttagaaggattacccaggtgacagtgtggaggaggggtagaaggaacaggaatagcggctgggagggtagaaagttactgcaacagtttggttgagattataaggacccaaaatgggacagtgttgtggcaagcctccagggataaggtggaagatggggcatggaataaatagtctcctcctctggcacacagctcctccaaccctcatcatctctgaagtgttaagtacctttttgtatgctggtgagatgactggtggctggggctcctggatagcctctggatgggggctggttgccaagggaaccaaccatgtgattagaggttagaactttcagcccacccctctgaaggaggggagaagggctggagattgacttaatcatacatgaccaatggttttatcagtcatgcctgtggaatgaaggctccctagaaatccctgatctgtggggtagggtttggagagctgctggttggtgagcatgtggaggtgccggggcgtgggggagtggcgctctccgagagggcacagaagctcctcaccccttccccgtaccttgccctgtgcatctcttccatctggctgctgttcttgagttgtatcctttatcataaatgaataaacttaaaagtatttccttgagttctgtgagccattctagaaaataattgaacctcagggtcatgggaacctatgatttatagccccactatcagaagcatctgaagaggggcagtcttgtgggactgagcccttaatctgtgcggtctgacctatctccaggtagatggtatcagaattacatcgaaatacacagcatcaattggtgttctgagttggagaattagttggtgtgggaaaaacacccagacatgcgatgtcagaagtaaactattgagagtggtgtgagcatagagaaaaataggttgtttttctcctatacactcttgcagttatcttccttgcagtgatgattgcaaccctttctcatattagacaaaattattttccctacatttcttatgtgttttgctattctctttatatcctatgttcttctacaagccagactctgataagggtgctatgccatgaaaattaatgcagtgtctggagcatggactggtagactagaggaatgacctggaaatatcttgtcttcatttcagcaaatgatatgatttgggtctatgtccctgcccaaatctcatgttaaatagtaatcctgtgaccgggcacagtggctcaggcctataatcccagcactttggaaggctgaggcaggtggatcacctgaggtcaggagttcaagaccagcctggacaacctggtgaaaccctgtctctactaaaaatacaaaaattagccgggcctgatggtggacgcctgtaatcccagctacttgggaggctgaggcaggagaatcaattgaacccgtgaggtggaggttgcaatgagccaagatcatgccattgcactccagcctgggcgacagagcgagactccatctaaaaaaaaaaaaaaattgtaatcccagctgggtgtggtggcttacacctgtaatcccagcactttgggaggccgaggtgggtggatcacctgaggtcaggagtttgagaccagccttgccaacatggtgaaacccgtctttactaataatacaaaaattagccggatgtggtggcacacgcctgtaatcccagctactcgggaggctaaggcagaataatctcttgaacctgggaggtggaggttgcagtgagccgagatcgcaccattgcacttcagcctgggtgacaagagcaagactccatctcaaaaaataataaataaaataaaataaattgtaatccccagtgttggaagtggggcctggtagtaggaggtgattagatcatggggatgggaagatttcctcttttgtgctgttctcgtcatagtgagtgatttaccacgagatctggttatttaaaagtatgtagcacctacccactccctctcttcctcctgctcctgccatataagtcacgcctgcttcctcttcaccttccaccatgattgtaagtttcctgaggcctcccagccatgcttcctgtacagcctgtggaaccatgagccaattaaacctcttttctttgtaaattacccagtcccaggtatttttttatagcagtgtgagaatggactaatgcagcagggttcttggcgggttgtagcatgatgcccttacaaagatgaggaaggttctgtgaggtcccttggtagttggctgaacaacctggaaccccagcaaggactgctaatgtgctcaggttagtgtgggagtgtacgtatgagtcacagacttcagccttgtcttggtcaacctctcagggatttagatgaaagtgcagaaggtgtgctataaaatttaattatttatagctaataaaataaggatttttacatggtctcttcagacttgaaatatgggtctgaagaataactataagactttgcatttattttgggagaattatgggtataaggataggatagaaaagcctcgaactggtgaaaagaccttggggggttaggtaccatcatctctaccatccttcctggtgtgagtgaccactgtttctcacctgaattattccggaagtctactaatgatctcctgctttttgtctccccttagactcaacatagcagccagagccatcctgcgaaaacatttggtagatgtttcaatagtccttacaacggtctacaaggtcctgttgggcctactggtctcctctgggacctgtgtcctaccaaccttgcctcagccctgtgtcctaccaacctcctctcagccctgtgtccagccacactgacctccttggtcttccttcaccatgtcagaccttacacttgctgcgtctcaactgtgaatgctccttgccctgatgtttgtgtggtttgttctttcgtctcctttaggtctttaacttctcagtgaccttattgtgctcctctggctgtcttattagactttaatctccataagggcagggaattttttctgtcatattctccactgtgtctctccactgtgtctccagcatggagaacaatggagtaggcaggcactccataaatctttgttggctctatgtttaaagcatagattagtttattaggctgttcttgcattgctaaaaagaaatacttgagactgggcaatttataagaaaagaggtttaattggctcatggttctgcaagctgtacaggaagcatagcaccaacatctgcttctggggagacctcaggatgcttttacttatggaggaagatgaagcaggtgcaggcacttacacatggcaaaagcaggagcaagagagagaacgtgtgtcgggggaggtgccacacacttttaaatgagcagatctcacgtgaactcaagacgagagttcacttattaccaaggggatggcctaagccattcatggggggatctgcccccatgatccaaacacctcccaccaggccccatgtgaaacgttgggggttaccattcaacatgagatttaggtggggacaaatatgcaaactatatcaattagtaaatatgagatcatagcagggttcagctgatgccaaagctaatgtggatgcttcatgcagtgttcacatatatagagaaagagatttattataggaattgtctcatgcaattatagaggctaagaagtccaaaatctgcagagccagtgccccagttccagttcgaaggcctgtaggctgctgtagcaccgggaagagctgatgttccagtttgaaagccatcaggtagaattcttacttgtgagagagtcagctttttgttctattcaggccttcaactgattggatgaacccatacatgtcagggagagaaatctgccctactcaatgtactaacatttaaatctcatccaaatgcatcctcaccaaaatacccagaataatgtttggccaaatatctgggcacctgtggcccagtcaagttgacacataaaatgaaccatcacagtatgcttctcagaccatacctggagaccttgaatcttgtcccgacaccgtctttcagagactatcctgttgacgctctgacaaccagggtatctggggcagaactgaagaagctaggggtgttgccctgaaaaagcaaacatgtgattgaggtcagatgacacctttaaacacctgaagtcttgtctcatggaagaaagacgaaggaattctttgttctagtaggcatggctcagactagtgtataaaaaatgaatctaacagaacagaaatctgctgtcttgggagctagtgaggtcttctttctggaagggtgcaagcagaggccagctgtgaccaggagtcagaagtcttaagttctggtctgggcctggtgcatgactctctggccttgggtaggccattagactctctgaggtttccgcttttctgctgtagaggtcaccgtagcctgcctcacagttccgcaaatcagatggaaataacatctgaacaataccttctaaaacaacaccttctaaaactcagctgtagccttgtcagggtcaggagagctggcagtcaggaggggagtgctagctcactccttgctgaagctgaaaatttccactgacctgcagtcagggacacctcactgcagctttgctttcttcttattggaatgtgcctgaggagtggcagttaactccagttccaaattcctcagccctgagtgtatgaagcttattgctgctggcccgtgaggacaacaatgcctggagggagcagagggagttgttcctcctccacgaatcagccccatcaccagcttcatcacggcatcgctctttaattacttcaggacacaattcggagttgccgttgatatcttctgtatttgtgctgtttgctttcttgcctctggaatgcaccagtgtgacatcccgctttccgctctgaaaaatgtactctgtgtataatgtatatagggttgctctagtttatggccacaacatgaatgagaaacaagaagcagaacatccagggtttctcgtctaaacattcagaactgtgctggcagtgggacaaaggcctctggactgttgtgggttttggtgacagccttgataaaaatgcctttttagtacaagtgaaaggaagattttactacagtgcaaaagtcaaaaaattagataaacattgttggaagttcagtgttgatgagtagctaagcctcagagaagttacacttaggtgggcatggttattttttggcaggaaaatgacctaggatttttttcttattcaggcgacgtcaaaacaaggttagagctacatgttcccctctggttttgtttataactggcatcaggacattcagaaatgatcgtgactacacttgacagcactgatacgtagtaagtgtgcagtcagtggtagctgttgtgagtagctttggtttacaccgagtttattagtgattaattcagggcttccacagagccctgtgtagttctacacagctaccactgactgcacacttactacgtatcagtgctgtcaagtgtagtcacgatcatttctgaatgtcctgatgccagttataaacaaaaccagagtggaacatgtagctctgtaccatctgtgtggcccgggcatcaggatatctagaaacttttcaggtgattctagttttcagcttgcaacattagtaggtcatggaatcaattaattgaagtacttttttttgccagcgtttttagaagatacgtttatataattgtatagaaaatattaatgcctagcacagtagctgggaaaatataattttgtgtgtgttaaaaatgctgctgtgatagaaccactaataaaatccctgccctcgacttgcttcttagtcttacttcagaaactgcatgcttttcgttatgaataaatggttcatgtgaaatttaatacaagacatttatagttctatgacctgagaatttgtgagccttcttgcccacattttgaggtttcactctgacattgaaaaaatcagttattttataaatgctagccaacaaaaatggcatgcatattttcaccagcaactaaatttgattatagcacagcaacaagatgatgattttcctcctttggatgtgttaattacacatataccatgatatgctaggtcagcagtggtctaaatacattcagcaagaatgaggtacttgcatacgtcatcctgaaagttttattagatcagtttaacagcctcttgacttcattatctatgggaatttgggggtcttacacaataaactgttacaaacattcatctcactcttatgaaatagagcaatgtgatagaaaggctggcaacctttggccatttttatctcagtgctgaggtgaacataaaccaagaggactctcgctgtttccctattgtgatgactctgttggcagatgctgcaactgtggaagacctgaaagtcgtgatcagttgctagcaggactttgggatcacttgtcttgatcctgaagctttttataagcccacgagaacattcatcaaggcttcccacttgacttgaaatacattcattgtaagattggtcttcaatttagatttcttggaaatagcagtgataattcttacgattactcaatgtgcaatgcagtccgtcctcacaaggttctttcagagttcagagggacatcctgcattggtagttttgcctttgtctgggaggactaggcttgggattattccttgaatccgctgcttaaaaacgctgatctgcttgtataacaaagggaagaggttcgatttacaagcacttcgatttgagaagtactttctctaattatgattcagctccggtgactgcaccatgttaaatacgcaattctctttcctctaggtgtctgagggttctgtggtccagttttcatcagcaaacttctccttgacagcagaaacagaagaaaggaacttcccccatggaaatgaacatctgttaaattgggcccgaaaagagtatggagcagttacttcattcaccgaactcaagatagcaagaaacatttatattaaagtgggggaaggtaaattttatgtggcttcagttaatgactgatttatgacaggcaattgttttcttttctgaaaccaggtggttagggcaaggaatcacagaattacagaatgttggacctggaagggacctgaggggtcatttggccccaggcctctccaccgccccccatattccctcccttcttttttcctcctggggaagcaggcctggttatggccaagtgaaacacagggaggagcagggggagagaggagaaggttgttgtgtgggatttagaagacacccatgcacagaagtcaaaaaaagtaagtggaggtgagaagctgagggtgtgggaaggaggtgatgactgatggagtggaagagctggcagaatgaatgggtcagcaggtggcttcctcttacctgtgttctgcaaacgtttgaagcctgtgtcagtttgtggtgctgagacataggttacattttggacaatagcaaaggaaaagtatttaaatatatttttagtacaaatgactattacaaggacaaattattggagaaaagaagtgtagggtcttgataagagattgcctatttaaatttccttgcattgcaaagggatagaaatatccagaaacccagttttgaaagccttttttaaaacaaaaacaaaaacaaaaaaccttctctttctttctcattctttcattctttcattcttttcctccctccctccctccctccctctctccctcccttccttccttcaacagggtcttgctctgttgcccaggctggagtgcagtggtgcgatcagtgctcactgcagcctcaacctgcagggctcaagtgattctcctgcttcagtctcccaagaagctgggactacaggcatatgccatcatacctggctaatttttacaattttttgtagacacaggtcttgctgtgttgcccaggctggttttgaactgctggttaagagatcctcctcccttgttctctcaaagtgctgggattacaggcatgagccaccgcacctggccagacctttttttaaaagtcattattttcagttgagtatatttggaacccccataagttactaggaaataactcttgtgaatgggtccttgttatagctggctgattgtgtgaacactgcgtttaaggtcttcagcatccagctgctttctgttaaattctacagcagctgtcacctcctcatagacaagacagggaagggtgggttagtgaacacttgatcccaactcttatttggatctgggctgctttaaagtgtgtgagagacagaggcaggaaaggtggacgtggacgtcggagaggatgctacgtgcagaagccatttcaggggccttcacgtgcatcccacttaaccccacagtaaccccaggaggaagatgtcatttccaccattttacagagggcttagtggagggctaagtgaacctgctcacatccaagttactaacaagtgacaaagccagaacacaaacccaggcttcctgactcttgagtttaatgcttgttgcctgagctgtactttaagtcctagccaaataagcataactcaaaaagggaagtggtccacctggatgaacatccttgtttagttgaggcagagagaaggggacttagaggagggctgggctcaaaaagtctaagtttgtttctgtactctcatgataggtagctaataacagaggtcaaatcccattgagacaaaatgaaaaatttcttttaataaagactctaagccctggccagcgggccgcgtttctgaagcagaattctagtagcatgaaagaatgttgattaccccttggaatttgttagaataagaaaatttgttataataacatttagaatgttggactgtgttctctcggcagtgcatgagcttctttctaagcacagtagtcacttaccctgagagccacgggttgtcacttaactggttcagcctgtgcacactgggtaggggaagccaacttaaaggaccttgtgtctggtgcagtaaaaactgttaactccttggtaacaccttcggaacccctgaaacttgactccagccaccagttgagtatgagtcaccgggccatgccgtggagagaggagcagtagggaaaggaggttccttggtgaggtcagtggaccataaagtgatatgtttatcaccacggctcagactgcactgagcaagcttcatcccccacttcccagaatccgacctggctctacctttcttgtacccagcgatcgcaggccatgaggcctggttgctctaacccgagcagttctcagagtgtggtttttgccccagcagcatccgcatcacttggggacttgatggaaatgccagttctcaggcccaacccagaccaactgaatcaggaactctgggggtgggacccagcagtcagtgtttcaatcagccctttaggagatctgatgcttgctgacgtttgggaactgctctcatctatatacccagaatgaaagaatttaagagttttgctcttatcccagctggtcttgctgcgaggcttcaagcaacattgacttaccaccagagcctcagtttccacagcaggaaaatgaggtgtttgcattaccccccaggttcattcctgctctcagagtatatccttctgtgtctcaaagtcatttgtcaatctttccctaaaatacaaataagcatgtgactccccctgcccccaaacttgccaggtttctacccgggaattcccctttgtggtttcctttctacttggcactcggtataagttttgatgccaggcattcggaaagtcattggggagcgggggagaaaccacacacaacaaaagtggtcagcttattcaacttagtgacaatggcttctgggactagagcccttaataacatcaacttttgaacaattagacctttcctagtggcttcacatgagtgaatattttgttatttgtctcaaatctcacatcattgtttgttaattcaggaaacctataccatatgcccactatgtgccagatacaagccaggcacacctatgaactggatatgccggccacaatcccaggagggccctagtctcttgagttccagactgtcctgtccctggcccatagacgctctttcttaattaaatttcaaccttgccgttccaatatcattttccatcctgtgatgtgggggaggcatccgcagggctgcagctgcacggtgtgcatacctcatttgctcatctggcaaaaccctcagcagatgtggagggaggctgctctagcagcctgagtcagtggagccttgagcttttctctctgagggggaggggaattagaggagactgcagagtgcaaacccaatgctctctcgcaacgagccgacaaacagaggctttggtcccctttgttctggggtggtgctgggggtgctgtggtggccagagccatgatgccccagtgtgtgctgcggacctcagcacaagggaggttgcacaagtggggagggggagggacagtatcaacccagtcttgggaccccctggttggattccttactccaaagtgagacttccatgtggacttgaaccctggcatcctgtcctcaaaatggaaaaggcagaagtctgttttatagtagtgccaggcctctgattaattatcccttctgaaaaaagcatgctacacctagaacttccttgacactggtcccagctgtcacactgccagcagtttctttcaagttctgttgaaatatttaagcccgtggatggaaatcccatcagccgccgtgctgtgtaaatggcatgtgccgttgtgggagtgtcttcagattctggtacttgcatcactttcccgggtggaggtggtgagcaactctcagcacagtgagataatgtttgcgaaagcactttgtaaactgtaaagtgccatataaacttgagttgtctgtgttcagattgtgagaaagagtgaaagtctgccttctttatttcccccaaattcctacctttcatcttcagagtataaagtgctgtgaggaatacatatgagggaaagattaattctacatggggtgtcggaggattaattaggtggttgcttctcctgatagttgaaataacaaatatccaaggaggagtgcatttggggatagaatggattgaatgttaaatacgctgaccatgaaatacataagtattggatttttagataggagatgcttggtagacagatgacagtataagtcaactgctcagaaaaggagtcatgatctaggtacaggttgaaaccatgggagtgattgagatcacctagaaaaagaatgagatagaaaggggattgaggaaggagctgagaagttcttagccttggtttatattggaatctactacgagcttttcaaaaaagaaagctccctaggccccgcctgggtgttctgaatcagattctctgggttggggtctatacagattctgagcagaggaggaaccagtggaagagatgtgaaagataggtcagaggaaacagacgaggacaggaagtatcacagagaacatgcaaggagaagatttagccaaaagaggcccctagttgggggctagtcaataggcggtcactggtgaccataacaggatgcatttcagggcagtggttgcggacttcacagacgaagaaccatcctttgagctcgtggttccctgtgtctgccatttgctcagtttcactgtcaccctccttcctttgaatctggttaccgagtacctcagtggtttgacagattgtcctgtgcctctttcagatcaagtgttccctccaaagtgcaacatagggaagaattttctctcactcaattaccttgctgagtaccttcaacccaaagcagcagaagggtgtgtgatgtccagccagccccagaatgaggaagtacacatcatcgagctaatcacccccaactctaacccctacaggtaagtgagtctaagtgtgtgagtgtgacaagagatgaaagtaaagatcttccttgacttgaggcagggagaggtgtagcccgtcctacaccctcccctacgcaggagggaagggagccattgatgcttcacgcaggagggaaggtagccattgatgcttcaggtgtgcttcatcagatgtgtttcacagaagctttgaagaacagagtaaaggcaccagtggtatattttatattctgcatctgtccctagatcccagatatttcagatgaattcctgaagcctgttccaaacttctgggtgttaattacaggacacagtcactcttccttcatctttatcacctctgactaaggttatccctgataggaaaattacaaaatatgccctattaatataattatcatcttagtaaccttctgtttttaataaagctctgtttgtggtgtccttagagcgcttaggcactcagagctgtttgcgttaaatctgtgtgtgtgtgtgtgtgtgtgtgtgtgtgtatgcgcatgcacgtgtgtggtggagtggctcttcatggtgccataccaaagagccattcgatagaacttgcctctcccttgtgtgcttggtgtgtgtgtgtgtgtgtgtgtgtgtgtgtgtgtgtgtgtatgctggagtggccctccatggtgacatacgaaagagccattcgatagcgcttgcctctcccttgtgtgcttggtgtgtgtgtgtgtgtgtgtgtgtgtgtgtgtgtgtgtatgctggagtggcccttcatggtgacataccaaaaagccattcgatagaacttgcctctcccttgtgcgcttgttctccctctcagcttcctacccctggattggaaattcgaccctccctatcaagaataattagggaattaaagaaaaaggagaaaaagtaggttcttttcccacatgagcctgcatttcaccctccttcctttgcatctggactagtgacttgaaaatttaaatgtatattgtagagggatttcgaggtgaaaatgctaatcggggtttgactttcaaagcgtgtaagctacagatcgttttgataagattccactctggccacttgaagaattttgtagaaagtgaaaagggaatgggaataggagcagtctggtgaatgtgcttcgacgtcaggcctgaggcttcattggagtataccatgcattttatgctttacaagtgtgtaaagctgagatggaaagaaagactgttcccttaaattcagaatgacagggatgttattgtttagtaaaaaattctcttttttacgaattcttagaagtttgggttgtgttcatcaattttccagtaatcacttggttgaccatctgttttctttattttaataaccttatatccagaagtttgggaaagtaaatgcagatacgattctgtagcaattgttaatgacttaagcaaaccttatataaatcaagaaattctttagccttttgtctcttattttactctgaagtttcctaatttttttttttaccaccatgcttcccttatcccaacaccccgcccccaactcaccaaactgccacctacttcagttttgaaggaatttgagcatattagccaaatgggaatcctgtacgtcgaaggtgttgaaggttgaaaaagcaacaatactgcttcaaaagtaaactcttctggttcgttcaagtccacttcaaacagtggctgcattaagtaaccacctcttttccatcaaagaagagaaaaactttagtgactaattatcagcaagcatatgtttctattgttatgtaaaacaattttgttatgtgtgcagtaacaatctgttttgcacatgtcattggcctgggatcaactccagctttttaatcaactggccagacactagaaacatgaagacttggaagaggggagatagttgcaactttctggcatgtaggtcttaactttgcctttgtcttccattcacagtgctttccaggtggatataacaattgatataagaccttctcaagaggatcttgaagtggtcaaaaatctcatcctgatcttgaagtgcaaaaagtctgtcaactgggtgatcaaatcttttgatgttaagggaagcctgaaaattattgtaagttggtggagcatgtcttttgttttgtttagataaatgacaacaatttaagctgtactttataagtgttatttttaaagttcctgcctctttggactctctaagctctgtcaattatttttcactttgcaaaatagcatgctcctataaaataggtgcggttgttcaaacatggccttggattaagacggacccaggtctgagtccaggtaatcccactgtgacctttggcaagtcccctaacctctctgaaccccagctccctcatttgtgaaattcctgaaatacattagtatgctttccactaatagtaagtgtaaagtaatgaacacaattaagccttcatattgagcatcccacaaggacctcagtgtcatagtaccgaatatcagcttttattttggagttaggtacttagagaaagtatggactattaggctgaccccagctcacatcattgacttttctttttgagttaaatacgaaatattggcatgtctttttgcttgcttccaactcctaagtgtgaaacactgatagaagaatcacagtaagtgcgaagtcagtgaaatgatgctggacaagtctactccagcttgttcccaaggccctctatttaatagagatgtacgcacaaggcttagcccattggcatgatgggcaaacagcagctggtttcctcaaaagttgaatgttgaaacttggtaaagtaaatcttatctcaaatatgcttaggcaataactatttgactgaattatattgaaagttaaagaaaaatcctcctccctattttttaagaagataattatctctttagtatctcttctatgggctcaaattttttttttttttttttttttttttggccaatctctcttttagttcctgcactgagtaagctgaagtgggttttatgttttcagtattttgggagagggatgcccttggttttggtattattcattcattcatggcaccttccatgtgataccacagtgagcaaagccaacagttcccttggcaacgtcatgtaaaagcactcaccagaggcagcaggcaaaaccactagcacacatattttaattttaaagtaatcgtttctggttcccgtgggttttttttttttttataactttgctaggatcccagtgagccatcatatgtaatggtgatacattaatttgttgtcaagcccaaagcctagccatgatctgaagtcagagatgttttgattgccttctctggcatggcatgaggggtgttggtgacctaggctgtctgctgcttttgctgcctggcacaccggccaaatgtttttaatttcagaataacaaaaacaggaaagggaatcatgctttgaaaggcaaaaacatacggtacattttaattccctgctggagttcttgtgtaaatattctttcagccttgacccttcgatggctctttccctgagtatgtgtgcctggtccatggcagtcctggagttcactttgaatgtccccatctctcatatgaatcagaaaggctagaaatgagattgctcatcccagtgcaagatctgtttatgttcctctccttggctgtacgcttgttccaggccaattttggacaatgcatgacaacattactaaacaattaggtaatgtttcatgatgttcttttttattctcccaaccagtttatgctttgtgattttctaattccctgtttcagatgtgaattctgactgtgctgtgagggaaaggtacctgctcccacaaaagtttaaattactatttagaaagggggcaatggtttatagaaaccttgtttctagtatttcctttagagacagcatagtgaaattgaaagaatcttgactttgtgccagacagggctagatttaaatcccatttccaattactactcctagtagatgttgtgcagtctgactgatgaacacggagtctgtttggtcacctgtgaaatgggtatgatgatagtactcaccttgagtttgtggttcattagctgagttcatttgtttgttcatttatttgccaaatacttgttaagggcctataggatatttcacctaaagcactggacacagggcctgcacatgtaagttctcagctacatgtgttgcttctgtgagtcttaggttctccttctctaacaggaatggtaatgcctatctccttatattttggaagagaaataagataatatatgcctagcagagtgcctgccataaaaagggggttcatcttccttccataaataactctttcagagtgtctataggaacaattagggcacttctctatacaaggtgaaaagaaagaaagatgtctactaagggaattgtaaggagtctgatggagtaatttaaagaagagcaccattaaatatggatgtcttatgcatgtgtgtgtcgggggtggggcatgggcagaatgtgtcctccagatggcaaaatggtcaaaagaggtgcaaagagccaggcagtgggcaagaatgggaacattggaggtgtctacattgccttgtccagctctggctcttttctcaggtcctgtgtggaccatgcataatcacttttatggtaggaagaacctctaaaacataaaaaaatagatggaggaaacctgttagaggtttcctcttatattatttcatgtggcctcaggacttcagggttgatgatgggcagcttgttcttagagaatacatttttaaaaatctcagtgggcatatgcactacgctctctggccattcccttccttagtcctccctcccctataccatcagtccagatgtaaatatgggggagtgtggaggcacttagacttaactccttatctttcatgaagatatggctgggaaagatggtggtggtttttggagacctccttgtacacctgcatttggcgtagctccactaaagctggaaaaagcctagggacttccagaagtacagtgtgagaatttgctcaaagctgggaaccaacttgtctgccattgtcccaagccttgctgctttacaaatgtgtagatagatgttgagtcttttaagttcccagacataatcaaaatgagatgtattgacagctcctagatttaatgtggaaaggtgcaaacagctcattccacattggtgcaaaaggacaggtggcagttatgatgatagtgttctggaaatacgatattttctcagctgtccaacaacatgaaagagactagggcagatgagggcaagcagtgttgtttaggccaattgttgtgattccagccaatcaaaatgacatgtagctctaaaaggctggaagaagctgtacctaagaaactactgttgactgaatgcataaaaagttctaagaataaattggatctttcatgatctcattttagctctttccttccttccttcctctttgtttctttcctccctagcccttctttaccctaaggagtttttttctgaattggagtaagagctaaaatattctgaatctattaaactgagtttacaaatggccgcagaagttggttaaagttctgtctggttcctttgcatatagaatttgtgactggtgagtctggcagtattcccacacataagcactttaggtaatagaaaaatatactgaatgagatcctttaagatttgagttgaaatatatgtggcttcagccaatatcccacaaccacataggccaagagaacttagagcctgtgaatcttttagggttttacagtgggaaaggattaatatttagtcatgttaggggcaaacagaatgggaaacaaatgaggaatttaggaaaaatgctgcatgcatgcaggagaaaatcactgggcatggaaattaaagtgatttttatacagcacgaaaatggtgtaatctgcatgctggaagggctttccagccctgttggtgcagttgttgaaaatatggtaccttccctttggggtcccctctgcagcatttagctctctcaccctctgagaagagcactgccacaggagtcagcaactgatgtataaatttaccttccatgtccttgttgaataacctggttgagtagagtccatttatatcctttcccaaaaatatttctgtcattttaattttgtaattgattatccagtgaaagctagtcttttttttttttttttttttttttttttaaggcagggtctccctctgtcacccaggctagagtgcagtggcatgactatagcttactgcaacctctaactcacgggctcaggtgatcctcccacctcagcctcctgagtagctgggactgcaggcaaatgccaccatgcctggctaattttaaaatttttgtagagatgggatcttcctgtgttacccaagctcgtctcaaactcttgggctcaagcagtccttccgcctcagcctccccaaatgctagtattataggtgtgaagtattgcacccatccctgaaagctaatcttaagacctacttgtattactggataaaacagtgatacttaaggggagagtaacctaaattaattaattaatatttagaatagaagatacaagtatattcagttagtagaattggcaaatgaatacagttatagaattactaattgatcatacattttagatgaaatataaacattggttgttttaccatgtggaatttaatagtttatatagatgggatagtctccacactgaagtacagtcttgagcatataatatggttcagtcagtgagggaccacatatacgacagtggtcttatcagattgtaataccatatttttactgtaccttttctatgtttagatgcacaaataccgaccatcatgttactactgcctacagtattcagtgcagtaacatgctgtgcaggtttgtagcctaggagcagtaggctgtaccatatagcctaggtgtgtagtaggctctaccatgtaggtttgtgtaagtgcactctatgatgctcacacaatgactaaatcacctaatgatgcatttctcaggacatatctccattgttaagtggctgtaagtgattgtgctatctttcattgaaatctaggggaataggaagtggaagcatgggaatttgagggcaatataacatgtctgtttgtatactttatatgtcattttaagtaaaaaaagggaaagtttattatacatatgtactgtgtgtgttaataatttaaacattagactaactgtacagttatagactaggcatacttagtatgtaactacttacatgtcattggatgattttttttatcagcataggcaatacaaatagtatgatcaagcagcatacgtagatgtcttttagtcggctattaaaggtttttcacatcatcgttcttagcccaaggaaaacaggggtcaaaagaataaataattccctcatatacaatatagaatctacttatttaagatatttaatttttattatctaaagtactgtttaattttagactcatgagtgatttttttgctatatcttcaggctcctaacagtattggctttggaaaagagagtgaaagatctatgacaatgaccaaatcaataagagatgacattccttcaacccaagggaatctggtgaagtgggctttggacaatggctatagtccaataacttcatacacaatggctcctgtggctaatagatttcatcttcggcttgaaaataatggtaagttagaagttttttaagttatgtaaaaaataccccccaaatgaagcttttccagtgaggaactgtcatttcagcttatatgttgctgtttttctcttgtacattttaataatttgactactttttatcagaaggcttaaaattacctagacagagattttgaggaaactgtaatacagattttcagtgacatagagttgaatgcatattcagagaactttgttataggttatctttagtgtgattacattaggttcttctctccgagacacctaatgaccacttatggctgagaatacagaagagttaagactgcaggaaagaagttcatggtaaaaggctgtatcttttaggaaaatagtcacgaggactcatacttgagtgttcatacccagaggatggcaggagttactaccccagctgaatggggtggaaagcagagggtcaacaaattcttgaggttttctggagtcttctagctagcatgacttgaaaccctagttttctgatccctagacctgttcctcagctcatggtaccaccactgagtgaaatgccaatagaataaggattaggagtacaggttcaagccccagctctaccatttagtcactgtttggggagaagttgcttcacctctgagccacagatttttcttcagtaataaggggaaaataataggacagaccttacagggttgttgtgaaggttttcgtgaaagtacaaattaaaaaccctacaaagctatgacttattttggacccttacagctctagcgtcctttccaaagaatattattaaaggagagataatgtccaactatcatcttcacttccagcttccactgagatggatttgacctcaagtgtacatcagttggccttagatagtagatataaagaatactggggaaattattatttttttagttgttagaaatacgacaaaatattgagtattgattgtatggaaatacgtctctccctttgaaggaataaatgtatctatgcagctatttcttatctttcaagggaatatgttccaaaaggccaaggtgcccagatacctgttaaaatttagctgtcaaaaagaaggtggtgaagtaattttaacataccaatattgtttcaagacatcattagagaaattattcaaaagactctcttgattcaaggaaagtattttagtggcatttcaatggaatattattgcatcatgtaacttaaatcacagatttttctagcttggacagccttagaaactgtctattccattggttctcagtcttaggtgcacattgcagttacacatggagagactaaaacatattaatgattgggtaccaccccagagagtctgagtttaaattgtttggggtacaacctgggcgtaggaatattttttaaagctcccaagtgattttcatgtgtagccaaagttaagaaccactgatcatttccaaccacttaatttaaaaaattggaaaagcaaatttgaggcacagagaagcaagccgcttgcctaaagccactgagctagttagagagaacaccaggactagaattcaggcttctagacttctaatgacctttatgcactgcttattaaaagtcattttacacctgcccattctatgctaattcctcctgttctgcctgtaatgatgttggttgtggcctggcatcaaacactgctgatgttttgccttcttctttcaccagcagaggagatgggagatgaggaagtccacactattcctcctgagctacggatcctgctggaccctggtgccctgcctgccctgcagaacccgcccatccggggaggggaaggccaaaatggaggccttccgtttcctttcccagatatttccaggagagtctggaatgaagagggagaagatgggctccctcggccaaaggaccctgtcattcccagcatacaactgtttcctggtctcagagagccagaagaggtgcaagggagcgtggatattgccctgtctgtcaaatgtgacaatgagaagatgatcgtggctgtagaaaaagattcttttcaggtcggtgcagctgattacaggagggaagagaggctacctcctttcccatctggccctagtctgcatctgtaatttctccctatctctttcatttttgaactccggaggcttgatactgttttctcagttggatgggcctacttccccttggctgtgattctcacctggttcctgttgttctcagtgacagggggtgggggttccagatccttgtgtgtcaatattttgctattgaatttccaaggccaacagatactacccttgagctgttgagaggtgggcagctgggaagagatacttggggaaggggcacgatgcaggcctctcatcgcctgtccttggaagaccaggcaattgtcaattgtgtcaattatacaacagaactgcctgtgggcctccaaccatgtctttggtggttgttgttttaggccagtggctactcggggatggacgtcaccctgttggatcctacctgcaaggccaagatgaatggcacacactttgttttggagtctcctctgaatggctgcggtactcggccccggtggtcagcccttgatggtgtggtctactataactccgtgagtgttttccagaacaaagctttgccctttgccagagcctggctgtgtgctcccttaaagttagtcttaacatttctttgaagatgaagagggttttcaccccaggcctgaagaaagccaagtgtcagttctcaacaaaatggatgtactttgaccctgagctctttggttttatttgttttattggtgagtctttgggaattggaaggcctgttttctcaccccccgtttccgtctcctgatgacaaaggctgcactgtcaaggtgattatgacttctctcagtgcccaagctcaactggcccttataaggataaaattttaaggccctgggctatatgaacgagcagcacctctgcacagccgggttaaccagatgtgtggtctctctggcctcatttgagtctcgtccagaagtaggagaacttctccctccttcatgaataaaaatccaaaaagagaatttaaaactcaaaaaggacctttaaggaattattaagtctctctccacctctaagaaagaccatacattgaagaaactctcctacttttgaagttacttggagaaagattccacagatttcccccaatgataaaccgttgcaatagctaagctgcattttccagaaatctttcttctcagttggtcaaaatcttttcagattaaacccattctcttgggtgcagagactaggcagtgaatattaaaagaatttaaaatgtgaagttccaaaagaactttaaagtgctgattttgcattttgggttttacttttaatggtaaaaataaggctcagagatccctgtgtccacctttgacacagggtgggttggggtgggagggggggtgtcttcttagtgccatatccagctttgacatggggtggctgagctgtggctgctagttcgaccccatccagagaagagaggctagcaatcaggtgctctggtcagcgtggttcctgtgggaagtgactctcccatgaacccaagcatattgttcctcagagaatattagactgttggagcagcaaataaccctaagatgagcttattcagcttcttcatttcacaggtgaggaaactgaactccaagaagttaaaaagacttgcttttttaaactccagggatgggctaatggcagagccaggacgactgaatccaacttcctgacctcttgtccactaatctttcctagacaccaggctaggccctgctaatctccttttgttactcaaataattaatttattaacctttgacctcctgataattgcagcatgaattttcgttcagttatccagtgtctacagatataatgaatgtcatatattactgaaatacttgattatggcattttaaaactggggtccaagttaacaccaaaagtggctacagtaatatgtctgttaagaaaaaataaaaaaaaaaaaaagtcagttgcttcaggagagaaaggcatgtaatgatcccttaaagttcctttttttctcacatatttttcttttctttattatgatctttgagtttagcaatatcctagatgcttcctttaattggcgtcagtactttctttggaggacctggtacagagagaaaggcagtttgttttttttttttaattttcttcccatcctactccctttggagactgttttagctgttctcaccaattataattgtttgtagtaattttcagacttactatatatttctattttgcatcatgttcagaatccaagcatgtgaagcaaaagaaattaggatttcatttatggcgtcatgacccttgggtgaattttctcatcctatttagaaataatccaggaatcataatttcaacctatgtcaagatagattccgggaatatatctgcaggtggatagcgaaaaaggtggaaaaaaaagattcctggaataaaacgtattcttttccacatccatacaccatagagaaagatttcttagggaagaaatgagcaaaagttagaggggtacaagagcggcaatgaagagatgtgctccatagtaaacattaggtccttcgctgctgactccaaccaaactttctacaactcttaaaggatatatataaccaaacattaggtccttcgctgctgactccaaccaaactttctacaactcttaaaggatatatataaccaaagcttcttgtattcgccaactgctagtagttcttagagtttataatataaagactcttaaggggaagccccttctcacggtataggcaagtctcttgacaactccattcaactccattctagtatctagtgttttcccaccatttgaaatcatttgtaattattcaatatggttacaacataaatatttatttttcacaagagaagatacaaatattagtttagcttttaacttgaacctgcattgggtttctccttattcttcatcactttgaagatataattcgaaaaagcctggatgttattttattattttgtcttaaagtcagattttcaatttgcatcagaatgattacatgagtgtttgtgtgaggcagaaccaaacacacatggtttggtgtttttataacattggctgtgctttctttgccttttagattgtgatacaggttccagcccttggggacagtagtggttggccagatggttatgaagatctggagtcaggtgataatggatttccgggagatatggatgaaggagatgcttccctgttcacccgacctgaaatcgtggtggtatgtgtttgttatcagtagggggtttgtggaaaatgctgtctattttgttggctttagttagggactatctgaaaataaaatcagatgttaaaagccaaagctcatgaagctacagggccttcatccttcatatgactgtcattaatcttcctgtgggttgttatttccagtttaattgcagccttcagcaggtgaggaaccccagcagcttccaggaacagccccacggaaacatcaccttcaacatggagctatacaacactgacctctttttggtgccctcccagggcgtcttctctgtgccagagaatggacacgtttatgttgaggtgagacctgaaagttagccttgaccttttaggttagtgctgggctatagttccttagacatcagctaaaataccctgtacagacctcttcctgtcctacctcacagaccttcaacaggtctgatgagggattggctcagagaacgcttccagactgacttctgaccaaagcaggaaatttcaagatttaatacattatgctaagtgaagacagtattttgtagatgaatgttaacaaaaaaaaaaattggcaagtgtgaattctactggtaaagccctgtcctttgcttttggaacagtagttcagtagttgcagtgttagagttaaccatggaatatttcaaaaccacctcatatgttatcttttatttctttttttttccctgcacagtccccttagcccccagcagggcagccaaatccctgtgggtccatgccgccactgaaactgacttgttatcttttaaattgcactcacttttaagtgaaatgctatgtgctattataactcatgacatttttttttctagatcatgatctgagtatctgtataaacttatttaaactatttcctatatataatgttaataatcatgtgcaacctaaatctggaatctggagtgactacacaatattaggcagtggcggtaataatgaaataacaacatctaacatttgctgcagatttattatgtgccaaacagagttgtaagtattgcagcagttagttaactctttagagccatcctataagggaggctaataatatcttcattttatggatgagaaaattgaggcacaaatttgtctgaggccacacagctggtactagtggagttcagattcagtgctcataggccgtgtgactccagagctctgactgatcttcgctggatacgactatcacttatctccaaagtgccatttgaaaggggagaaaacataacgtcttatcaatgcaaacatccaggttcagagagtggattctagaaaagataaatgtccttatggcaccaggatgtctgctgtttcttgtgccctgggtacaacctttcatgtttcaaccttagtgtttcaagtgggcatatcatctgttggtcttatgggaaggtcctcatctaatgagctggttttggtgctcagctgcaagctcagcttcatagtgggaggggtgagaagcttaaagggtcaaagtggggtacttccatatgttaaaagtgactttggtgcacgtgtttctgttttggaaagacacataactctcacattcgcactgactctgggacagagcccgctggcgctagatgttgttttccttgatcatatggattctgcccctcccccattctgagagttctctttctttgagcacaccttctttctccattggggaaaatatactgccttctacatgcttttcctaagccaagatggctgtttttctcttgcttttctggctgtacagttcacatgggcagttggtcaacagcaccctattgcgctgtggatttcaggggtgctgcataattgcagattgttcttttccaaatctatgcctggctttgctgatttatgctaatcagtggtcaatcttcctcctgtaccttaccctggatattttgggttttttcccccatccttcaaatgctggcttacttgaagtgtgttattggtagttttttttttccattcttgttttcccatttataccttttcatatatcacctatatttctcatagtttatcctctattccctctacaccatacagtccctttcataatccaagttaacagtgttgccacctgttcattggtcatctccaggtgactgttggtcacataatggcagttttcttttggttcatttgtcttggggaatttacaaacccagttgttaataacccaaaattttaaatctagaatactactattactaataggtagcatttattgacactctgggaactgtgttgtttgcatgtaacttttactttgctagttttcacaattatgatatcttgtgggtattcgtgttctcattctgtaggtgagtaaactgagtctcggtgcccagcacgtgagcaggagagcatgtaatttttatgagctcgtctcactacaaagcccgtagtccttctcctactcacttctggtctaaaagtaaaatcctttttagtaaaagatttgctgataatttatatatataaactatatatacataaaatatattaaaaaataatatatattttttccctctgctacaaaggtatccctttttgggataccttagacattctgccgctacatactttcttttgagattagagaagagatttgcagtccctctgttacacattttggcatgtggtttctgagttcatgttaaacggcagtttttagtaatagcacatatgtaatttgccacctttccaagatagaatatcttgtttttcagaagtattgcaaaaatactgaagtgttagtatttacagaatgtcaccacagtgacattatcagaatcctcttcattagcattttcactgttgagtgtcctgcagttaaccaccacgtaggaatctttcacaacagtgctgcggattcaaagccccatgtgatgtcaggggtttcccctgggtatctcagcgtggaaagtctgtttctatctccatgtcttttgaaatgattctgcggctgttggtctatgggtaaggactagctgtttctacaagtgtttaagtttattttgatcctaaatttagtcaaagaatgaggcatagcagggaggggcagttcatgcagtgatccacgtgtcaccaaatggagaatctcctctggtctggggattttagctaagttcaggatagttgaggtttgaattctgtttacacttggctaaacattacttcctgtttctaaggaaaagaaccttaacaaaatttggacgtagcccatacaagtgttttcaaagggggaagtataaatgagtcggaaacgtttccagattagatttcccctaaactacccctgggcttatggagcgaagggggagtacttggcaaggctgatttggatctgtgagcagctgggacactttaccaggcccatgatggcctccaggttgcaccgtcactgacacccagcgccggagccagctctgccttctcgccgatgaagcaggactctcatcaggcttactctgactttttgcaatttagaagctcagtcttcctgcctaggttaaatagattttgccgctgaactctattttttggtcagtctttaaaaagagcttagcttataagtgttgtactattaaaacattagggactttgcctactggtgttttatttacttcggaaaatccactttaaatgcaaaatatgtttttatttttagctctcagaggactcattgggaggtggaagagacttactcatcttgtatttgaatctaatggactaatatttgaaagaaataattcactgtcatcatctatatcaaattgaagtggaaaatatctttttctttcaacgtgtgtgtgttacttttgtaattagaaagaaggctataactatgttatgaagataaagcagcgtgtcatctgaagggctgtcttggcatatggtccttgtgcctaaagtgaaagtgagatgctaactcatttcctaattcatctttctgttctttcataggtatctgttactaaggctgaacaagaactgggatttgccatccaaacgtgctttatctctccatattcgaaccctgataggatgtctcattacaccattattgagaatatttgtcctaaagatgaatctgtgaaattctacagtcccaagagagtgcactttcctatcccgcaagctgacatggataagaagcgattcagctttgtcttcaagcctgtcttcaacacctcactgctctttctacagtgtgagctgacgctgtgtacgaagatggagaagcacccccagaagttgcctaaggtttgtgggccttcatccattcggatggttattttggcatttttaggtgaggcagaaaagtttaatcccaaggtcttgcaggttgaggttttttgttttggaactgcccaactgaaatattaaagtcactattagcagggaactgtgagttttatggagtcttagataataaatcctgacagcatgattttcttttttccatgcgtgctacttagtagtaccttacgagtgataaatcaagacgcttttccatggagggagatttctggctttatctttgcttttcagatagtttgcaggccaaaaatacagcaagccgaaaggacaagttcattgtgagaattaatttttccaggtcctgctgggactggcattgtcattgttttttaaccttttctgtgtgaaatataaggttgacttgtctcagggagacttctaggggaaactaacaaatattttagcttttctcagtttcatatcagttcatcatatttgcctcctgtcactctccagattgaatgttctattgccataacaaaaagcagaaccatttgaccttggtggaatgcatttgataggggagatctgcaaggttaactatgatacccactaggttggtcttgtatatgaaaggtatcttctgccatagttttgtttctgtgatctgccataattatgtataatttcatatgtgcatttattctgtggctatctcacacagagtaaactgatttccagtcctttcgcagtcatatatcaatgtctaaaaggctaagaatcaagcagtattattaataatgtatgtatggaattttctcatttaactcacagattttaagtcttaggtatggaggtaggaggaaaaaccaccatttccaaatagattacaattgatctgaattccttgcatcattatagtcccctgggcatccttttctctgataacacccaagagaattttgtttgcatacgaaaatagagcagatatgatcataatcattggggagcacatatacagtgatttagactatattcctaggtttgcttttgcggcggtgatgccttagccttgtaggcattcaccatcagggttggggcttagtggacagtggtagagagccatgaggagcttcatgtgtggctgtgggaccagctgcttcctgtgggcagaagggtaacgtttaagggttagaggtcttggaggggagacctagcagttaccagggatctttgctgtggctttggctgttacttctctctgacctggcctggaacagcccagcttcatgtgtgttaatctgggaaaattaatcgtaaagagagttctaagcctcaggggatgacatgatgggatataaccctaaacctcaagtcgccctttacccccaaggtaagataacatggaaagagcctgggactgagaaggaagctctgctgccaccaatgggactttaagccagtctctggaccccttagagcctgtatttcctcataaactgttataatcatacctggcttccctcctgggtagaggagcaaataggacagtatgtacaatgacagccctttatctggcagaggcttggatgagctgttaccactgtctttctgtttgctgcttataggtaatattttcacatttctattattttctgagtgctttctgtgacaatagagagcgccaaagaatcttctaggaagagatctcagagattgttgagaccaaccctgccctttgctgatgaaaccgagacccggagagcagagtgtcttgcccagggtcacactccactgagttaaatgcggaatcatagactcttgcttaactgaagagctcaataggaaagtaacagtaaactaaaacaggaaagcaaaatgcaactcttttcagtcatcatgcctctccacagaaaatttgttgtttttctttacaagagggctcttgttaaaggcttttctctttttgagggggtaagagtagggcagtgagggttgtcttataagaagtgtctgactggcatgttgctcagagcagcaatgacagcaaggcctaaagtctttgctcttttgtgtttggaaaagatggaacttgattagctttttgggatgcctgctatagacttaaaatgatggctgtattaatatgtcttcttaccatagaagctgtcatttactttagagttatacctattaggctgggcgtgggctcatgcctgtcatcctagcactttgggaggctgagcttggcagcttgctgggagttcgagaccagcctggtcagcatagtgagacccctgtcactactatatatatattagctgggtgtagtggtgcacacctgtagtcccagctactggggaggctgaggcaggagtatgacttgagcccatgaggccaaggctgcagtgagccatgattgtaccactgtactccagcctgggtaacacagcaagaccctgtctcaagaaaaataaaaaagaactatacctattgataaatatagacaagaaaacaaagttattttaaagaaaaagtgcggagtgtgatcatattttttcaaaacagatgtagtgggcctgagcatgctcattaataggtttgaagcggctaatctcatggcctccacaacctgggcacagcccccaggatctgcattttgaaacattaaaagcagatgaccctggaaagtttagttttacatgagcctataccaggattaaaaatgaaacaaactcagcaacatgattatcttattggagaaaaatgtaaaatctgtcaccttcataatgcagtatagacagtccccatacaaccattctgtttttcaatctaagtattcaataaattatgtgagctattcaacactttgttatgaaataagctttgtgttacatgatttttccagctgtaggttaacgtaagtgttctgagcatgtttaaagtaggctggactaagctgtgttgttcggtactttaggtgtattaaacacattttcaacttagtgatattttcagtttacagtgggtttgtcaagatgtaacctcatcataagttgaggagcgtctttatgggaaatttcccacaatcaccaatcacaaacatgaaccgtgtatatgaagcccagcttggtgaggaccaacactaggcatatagtttttctgtttttcaaactaacactaaaatgtttagttttgtgagaagaaggggagggggaggacaatattgagaagctatccagtgatatttgcatcttcaggtacaaccaaaaatccactgggcctgctgtcatatctcccaggttatttggtgttctctgaaaaacacccaccttcttgcttttctgtagtgaacagctgtgtgctgtctgataaaaggccacaggacagctgtgcaggtagagctggtgaaggcacttttgagtggcccctgattctgtgctttgttctgcctgtctgcagtgtgtgcctcctgacgaagcctgcacctcgctggacgcctcgataatctgggccatgatgcagaataagaagacgttcaccaagccccttgctgtgatccaccatgaagcagaatctaaaggtgtgctttgggaggcacgatcagagcatggggcctgagctctgcttgttaagaagacccaatagtgtaaatcaaagtccagctttattcacaagataactaaagggccagttagttactttagaagaccattttttgcccgaagagtcttttctttagctggttctcttacagccattatggcttagttgtaagtaatctatttgaaaatgatttcctctgtaaaaagaatcaggtctaggttgttcctgtcataaggtcactctcccttgcattcaaatatgcttccttgagtatgcaaaaaagggttctagttagtcccatgtcccgggaattgcacacaatccacagttcatctttctgtgatctactgctaaagtttatgctggctataacctattgtattgctttatcaaaattgcaaatgcctttgagaatatgtgaacattattcatcttaggtgtaacagatgagaaccactgcccaaatgcatcttaaaattcagttttcagaattttgcacaatcacatttgttgcttggagccaagcatgcctctttctccacaagcaggaacattcagcaagctgtatcttctgtgagaaaaggaaggctgtgccctaaggggtgtggcatcagtacctgagaggacaggcagggcagagccagacctggcatgggtctggccagccagagcagtagagaggcagaactgggccctaacaaatgttaggagtggatatgaggccctgtgggcggtgagaagagcatctgacaaggacccgcatcacagctccaagggttataaacaagcaaggacacaccaggcagctgtcagcatctgaggggtggaaccaaatgtcacatgggatatctaggcaattacagttgtcaccatctagtaacattgatatctaagggtgtcaaactgagagaaggctgggagagtgaaagtggattccaagcggggttagatatttcaggattagagctacaggctgcctctcgccactctgaggggcacagaggagcctgggcaccaagggccttgacaaaagccagcacactgtctggctccagtttcagggtattagctggaaggcctgctgggtggtgctgacaccagatctagggtttggtgtggccctgggatggcattcctgatctgagcatgttggattgggatttggcaagactaggcagcaggggtgacccctggacagtgggcagaacctaccagaacagaggcatgcaggtactgtctagtgtcttattggttgactaacctctgtgaaaacagctgtgccattccaattgtgtatctggtggtggcatctgcccccttcctatgaatgaatgtgctccctcaaaatggcagaagagtataggtggcaggcacactggattggagctgggagcctaaggcactgcttttagctttctctgctaactggctgtgggacattggagaacccccctaccaccagctctttgggtttcattttctctatctggaaaggagaggtttggactgggtgacttccaaaaggtcctttcagttgtaatactcaactatgctgtttgaagaagcaaaataatctttaattcatttttctggccgtcctaaagttgttgtgaagtgtacatgagatgttctcggcaacatttttgttgttgtttgttttacttttattgattggttttcaaccatttgaaagttataatagacccagtctttatataaatggatggtccaaatagttcctttttattgggttcaggagaaagaaataagaatataaattgtgttgcagagtaatcacaattgggcagcagctggctccattttgtactatgaaagtgattttgttaccagaaaggagtcccaattcagaccccaatagagggttcttagatttcacccaagaaagaatttggggatgagtccacagagtaaagtgaaagcaagtttattagagacgtaaagaaacaaaagaatggctactccatagacagagcagccccagaggctgctggttgctatttttatggttatttgttgatcatatgctaaacaaggggtgggtaattcatgagctgtcctagaaaggggcaggcaattcccggaactagggttcctcccctttttagaccatatagggtaacctctaggctttgctatgacatttgtcaactgtcatggtgctggtgagagtgtcttttagcatgctaatgtattatacttagtgtataatgagcagtgaggacaaccagaggtcactgtcattgccatcttggttttggtggtttttggccagtttcggctggcttctttactgcatcctgctttatcagcggggtctttatgacctgtatcttgtgaccttctctcccatcctgtgactgagaatgcctaaactcctgggaatgcagcacaataggcctcggcctcattttacccagccctattcaaggtagagttgctctggttcaaatgtctctgataatttaacaataagagcagctacctcggattccatctgttactcgtaactattttgagagaggtaattctgctagtaattgaaggcagcggcttgctttttcccatgccagacaataattaggcattaatattgccgcagtataacttccagcaattcatccattcttcttttgagcctggtgacatttttctaagtaatttctcttgcaaattaggtaattacttttatttaaacttagtataattgtactgaaagttcaatgttttcttgtataaaagttcaagaggaaagttttaccaaatatcaaagcaattttatgagatttgctaattgagactagattttagttgagaagcatgtgggtgaagaaagtttattacttaggtttgttaaataaattgaggcggttaaactgtaggccagcttcccaggggctgtatgcaaatttgctttctaactttgcgcttactggggtaagttttctggcaggtttcagctgtgtgtgactcctctcaccttttaagtttattttcttttgactctaaatcatttatcctcaatgcagaccactggagtctgtgctttctgcctcaaggtgaattggaatagtcatttgaaaagagactgtgggctgggcgcagtggctcacgcctgtaatcccagcactttgggaggccgaggcgagtggatcacaaggtcaggagttcaagaccagcctggccaacatggtgaaaccctgtctctacctaaaaaaaaaaccaaaaaaattagccaggcgtcatggcacacgcctgtaatcccagctactctttaggctgaggcagagaattgcctaaacctgggaagcagaggttgcagtgagccaagatcgcgccactgtactccagcctgggggacagagcaaaactctgtctcaaaaaaaaaaaaaaaaagaaaagagactgtgaccatttgcctaattgcattggtttatttgaataataacaggtcacgaatgtccttcctgccagacagctttatgtctctttattgtagaatctgtgactttttgggtaaaaatttcctaaccaatgggacgcttcactgtgcttttactacacaggtgctctttgaaggccatgccaaaactccagctctctctggtcatttggttcatcttatttttcaacacttggattttctgggacagcagataaaggctctggttggcaacttcacagctgggcagagagctgctctgtggccaccactgccaatagcattgacatactttagtgtttcttctgtggacaggaaagtaggcaatcaagactataaaaatgtttctggattcctcctctgggccactgtttttaatggaaccttcctgagcacatctttgccacttttgatctctaagtcccttgggaatcagtgttgggttagcgttcttttaccatttaaatttttaacaatagatgaaagtttaaagctgatggtgatgatagtgatggagatgaggatgatgatctaacatttgttgagcatttactttgtgcaaggctctgtgctaaatgctttatgtggattattatattttatcctcatagcacctctgtatagtgataacttggccaagggcacacaacatataaatggtggatctgggattcaaattcaggcactgtgattccagagcctgtgctcttaaaccctatgccttattccagatggaggttgattctagtttttactgaaaactagaatcatgtgcatctatgtcttcacacccctcttcctgccccacttctcccttttctttctttctttctttctttttttttttttttgagacaaagtctcactctgtcacccagactggagtgcagtggcgcaatctcggctcactgcaacctccacctcctgggttcaagcgcttctcctgcctcagcctcccgagtagctaggattacaggcacctgccaccacacccagctaattcttgtatttttagtagagatggggtttcaccatgttgcacaggctggtcttgaactcctgacctgagatgatccatccacctcggcctcccaaagtgctgggattataggcatgagccactgcacctggccctcttctcccttttcataccatatcacattagtattcaaggtaacaccccaaataccctaatgattatgaactaaaaggaagatgaaggattttaggaaaaatgtctgttcacccaaaggattaagatgttgggaaatgtgtaacctgtttagcagagtattaaagttcaggagaagttctgtgattttcagtagtaactcagaaagcccagagaacataaatagtttatgcatattatggtttatgacaaaacatttaaaatagttgaggtggtgccatcctaccctattttctgaaattttgaagtataggcatattagtgctgtttgccttggattctgtgaccgctttttacagcatttgagaacacttgggcttatacagtaaaaatgattacaccacgtcggtgatgattttttttaaattgtgaaagagaggagtaaccatttctctgaaacagtgcacatacacagaagagcatggatgtggatgtcatcaggagcaataaatatcattccaaaatttgccgtgatttacatacctatagatgtgtttaattcttagcaagttaaatgtttgagatactgaattttctccgtattttcaccacctaactttaaaaaataaaaatgcctgcatatcttggatactcagtaaatgttaatttcctccccttcctctcaacctctcagcaaactagaggttttttgggaagggagggttgaggaagggaaagttgtgaacgtcagttggaagttgatccaagagaggcattactttttggaacacatttgatctttccagaataaaaatactctaaaggaccagccaggttttgtcctcgagctgaggtcgaggtgaggggaaactgagtggaaagatggtagaaatgcttaattgacagaccagggcattcattctctatccaagaagggaaggagggatatcatatttttttttttaacatcgtgtattttacattatttatttatttaattttgagaaggagtttcattctgtcacccaggctggagtgcagtggcgcaatctcggctcactgcaacctccgcctcctgggttcaagtgattctcctgcctcagcctcctaagtagctgggattataggtgcctgccaccacgcccagctaatttttgtatttttaatagatacagggtttcaccatgttggccaggcttgtctcaaactcctgacctcaggtgatctgcctgcatcggcctcccaaagtgctgggattacaggcctgagccaccgctcccggccagtattttacattttaaaacctttttattttgaaaaatttcaaatatatacaaaaatagaataagtctcaacaattgccaatttatggtgaatcttgttttatcactttctgtcatccactggattgttttgaaggaaacccagacatttaatttaatttcatccatacatattccagtatgtacctctaaaagttaagaaccatcagaagatctcaagcaggaaactgatgattaggtcatttatttttattttattttattttattttttgtatttttagtagagacggggtttcacagtgttagccaggatggtcttgatctcctgaccttgtgatccgcccgtctcggcctcccaaagtgctgggattacaggtgtgagccaccgcgcccggcgattaggtcatttaggaaggctactctgaaaatggtgtgaaggttgcattgctggggaaagtactcaagaataaaatatacgtgatatttgtggttatttattcaaaaaaatatggtaggtgtatagtggacaaattatcttgtctttaaggcctttacagcctagtgcaaagtttctcaatctcagtacaatcagtgtttgggctggaataccctttgtagttggggggctgcctgtgtgttacaggatgttaagcagtgtccctggtctctacccactacatgctagtagcaacaccctcccaccaccagcccagttgtaaccattcaaaatgtctctagacgtttccaaatgtcccctggaataaaaatcacccaccacgtgagacacactggtctagtggcaggatacagataagtgaacaagtaattgcaatgaatatcataaatattgaaagaatccagaaaaagggttcagttacagtgacgttaagttagtaaaaactctgtcttaaatggggcctgcacaaagacctcctgagtctccaggaggaatcttcctctccccattcttctctttgccaaatgccaatagatgtgggtaccagttggacgtcttgtttcactgtgggcccactccgtcctatggtgcctagtaccaaattgagcactaaaggccaaaagctgtggtcagttactcatgcataaccccagaaatatcccgtttatgaaaaccatgctgaacaatctgaagaggggaattttggttctagaggtagaccaaaatttgctcagcgtatatgaaaagatttaattcagaacattgattatagtttgtcctttctgtaaagaaatctttattgttacagttctctttacagcaatagctaagattcctttcttataatcttaatcttatccttaaaccaaaagtaaatattgttgagtccactcttttcctctcagcatgccaactcgatgatagggttccggtggagatcaagccattttagttatactcaggggttcttagggattcgggaagagaaaagttcgaggatagaattctttaacctcagttctgcagcttctgcttgttattgtttgtgctcagaaatcacgaagagacttcacccaggggaaatgaacaacaactgtttctgtttagctctgtgagaaggctcctatttggggtgggggtaaaggattagatcataacagaaatccattaagaattttaaaacaatgccatccatcacacaggccttactataaaacttaaactcttacatgggaggtctccttaggagagagtcataatttttcaaccgcttggggattctgagtgagaaagtttaaccatgggtggttgattggatggaattattcccagaagtgtgtatatttcttacatgatgcatcttgtagcaacctttaaatgcctttgaacttagttcagggaatcaaatactacgtcttgaaaggagaagtttgtgggtagatactcttccttcatagagttcttgggagtttaaaatgagacaatataagtgaaggccgaaggctttttgtctattgcaaaacaccatacaaatgtacaaatgtaaggcatcattgttgttattggtgccaatgaggctgatgggacccagctcccagggtagtgcattctgtagttagcgtaattagtgtgtgttctgcatactgaattagattttcttaaaaacatacaatcatttttattttcttagtaattgtatttaagtatacttttgcatatatcctcattccagggccactatgttgcacaactccagggggcaccattcaattgtggtggctctgattcatccagtagcattccttcccctagagccagacattgataactcatgtggccagaatgttgacccacccatcggagatggttaatcctgagaatttacaattctgttttcttttatcctgtctagcttctttatttttatagacatcaattcagatgctgcttgtttgggtcacattttcccaagttctttttgcttccctgtgaattcagacataaggtgtgtgttccttctgtggtgaatgaaaatggagatgaaaagagaggtgctaaacatgtatcacttttaaactccaaagagtagggtcaaggtctgtagcaggactcagcacactttttctgtaagggaccagatagtgattattttttatttgtggctcatacaatccctgtctcaacaactcaacgctgctgttacagcatgaaagcagccatagacagtatgtaaatgagcatagctgcatccatataaaacttcatttatggagtcaatttgaatttcatataattttcacgtcatgaaatatccttttttgatttttaaaaaatcatttcaaaatataaaattcattcttagctcatgggccatacaaaaataggtggtggaccataatatctcaaccgctggtctcagcctcactgctgaggataatgagtagctgtgcacaaatagttacttcatcagtgcttccccagctagggacagagctacgctcaccagtcatttagcctgctaggcagaactctggaattctgattcaacttctgccctgatgctttccagctgtgaccttgggctctagtcacacgatatcagagtctcaggctgctcatttccaaaacagtgatacaaaatttttttctgccttcttcatggcactggtgcaaactgcatatgaacgtcttcatagtctgattgctggtttcctctgtggcctccatttgcaaaaagtacattaacattttaatcatccttcaccaaacatttctggaagacctattctatgccagtctgagcccttggggatatacagatgactgagaactagaccttgccctcacagcaaaaaaaaaaaaaaaaaaaaaaagcaaaagaaagagaaaaagagagagagaactaggaggtattgtggcccaagtgtaacagaggagggatggaatgagcaagggtgggagagactagctctgctgggatggagatggaacagtgggagactcagcaaaggtcccccagagaaaatgccaacaaagcaggtctggggaggagggtgtcttgggatggcttgcaaagcatgatgacaaagagcagcatagagaatttgggaagcttaaattactaagtatggggagcccaccatgggtgaaggactccatcaggaaaggaggctggagagagaggatagagaagggagggagaactttgtgtgccatgttaaagagtgtggatttttttccctataaaggaaggagagtcatcaaggggtttagtcagggttataacatgatcagctctgggctctagaatattcactctgggggcaaatgtggaggaggaaataattggggggagggtagtggtggagataagggggcctctgtgataatcctgatgagcaatgaaggggagttaaactataggataatagcactaaggctaggagaacaaagatacttttagaaaatgtgtatattaaattaaaagaatattttgaaggctgggcgcagtggctcgcgcctatagtccctcggcctttgggaggtcgaggcagatggatggattgcttgagcccatgagttagagaccagccagggcaatgtggtgaaatcctgtctttacaagaaatataaaaattagctggtgtggtggcacatgcttgtagttccagctactcgggaggctaaaatggaaggattgcctgggaggcggaggctgcagtgagctgagggcgccactgccctccagcctgagcaacaaagtgagaccctcaaaaaaaaaaaaaaaaaaagaatattttgaaagcagaataatattagactacactggaaaagcatggtacttaaaggtattgaatttttttgtaagtaaataaaaagatatacacaaacacacacacaaattgtcggacccaaattccctaagtttaggtgtttgccttcaaattttcttcaaattggagagcctatgcaactgattgtcaacaaaatgcaatgcttaaaatttctgggtaactcattatagttttgatatctaaagaggatcattgacagagctttctcacagtatttattaccaaatggaaaagtgtcagtttctgctgagactttgatgaccctttgcttaaatcttggttctccatagaatacattgtgatttatgtttttgtttcagaaaaaggtccaagcatgaaggaaccaaatccaatttctccacgtaagtctttatgcaactatttcgaaataaaacctcctgggctttcctaagaatgagttggttagtgaacatttgccaaactttgagttttgataaggagacttctgctctcattcccccttcccccttcccctttcccctttttgctcatattttttcctttcctctgtcctttgtttatccctgctttctttttccctttcacctttaccactttaaaatattaatttgttgatccattggcatgtatggcttgaatgggaaggtagtaacttatttagagagacaagttaatgacttgcgtgcttatgtctgttctaacctgcaagaattcacatacagccatggaagtggtttgctttaagtcttatcaacaatatttatctgctcagaggcgtaatgctaagggaactcattgctatactttcaagacaatccgtagtgcaagggctgggggccccaggaagagcatgtaagaatgaaagagaaagcaacaccaattgctgcagaataaggacttggaaattgtctaggccaatttcattattttatgcagaagaaaatgctgacccagaaatattcctgcctcattggcattgaggcaggacttcaacctggacttcccagctgtccacccagagctcttctagataatgttgtcttgtgaggagaatttgtgaatctgtgctttttttcctttcctaagattcccaggattagtctccatggctgattcactacatttaacaatcagtctggaaagttcctttcacaaagcacttcataaaccattgtcttaagtggattattttttttaaattatggaacaatatgaactcaaacagaggcacatatggacacatatctatctttggagatttagaatagtttcattaaaaacttgtaatcatgttcaatttttgcatctgtgggtataaaaaggcaaatcatcttctaatatcagttttaaggactagattaaataggttgatggctcggttcaacttcacctccagggagctcttcccacctcttcctccacctgacttcagcaggtgactaaagctatccgcatttttcagaaggtaaatgaacacaccaaagagcacaggtctagaagagtggggaccagaacttgggagttcggatccttccagacttgttccaccacagcatactttccccgagcctttggagtgctgggctgcccaaaggtcacaggagtgtatggcagtcttcaatgtaaaaaaaaaatagctttctttacactgaagtgagttgaaaggcagggatttaatttatacagagatcactggagttgcttctgactggagcagaaagtagaaataatatgataatagtggggagatcctgtatttcccacttatattcaaaacccagagaccttagaaattgtattctacctaaaactcctcccccttggaaaccaattttaactttttataagtgactcaaagaaggtagttctcttaaatgaaaggaaatgttctatttctggggcctggaattaatttcaaatataaaaacctttgccaaatggagaaacaattggttctatttatatgttttgctgaccataaaactgacatcactccccactgggaagtatttccgttccccttatagaaagatcatggttggaaaagtgttaaaaagtaggttgttttaaatgatacaatatgaagctgttaagattaagagtttaatatgaggagatcggtgaaatgttataatccacaggaatagtttatttttattctatattctcctttctttctgttatctttcatacttgtaaatgttcacaaaaatatgtgtataaagtattctaaggtgtgtgttttctgtgcagtgtgtcatttttggagatgttcagtgaataagcagcagtaagccagattttgatcatggaagttcactttattttccaaagcatcttaacctgtgaattttcaagctaccctccattcaaatagtaggtccttagagtgagacaatgagatgacagacaagattttactgagtttgcaaatctgattttttagttagtttgttgatcaaaataaattgcaaactgagaatactttggaaacctgataatttcatttaacctttgaaaaaaatttgcaagttacaaaatacagtgtattttattggaatcttcattgcattctccgattttattagtgctcaacctttatgacagtgcttgtgaaacaaatataaaattgcaatgcatgatgcagactaaccaaaaagttgtgtgtatcggtttctctcctttatagcaattttccatggtctggacaccctaaccgtgatgggcattgcgtttgcagcctttgtgatcggagcactcctgacgggggccttgtggtacatctattctcacacaggttagtgtgactgttgagtaagagttggtgaacagcttgtgttcctgccacacaatagacactcagtgttttgttggatgaaataacgaatgaaagagaaagttcattcctactatttttacatttacatatttggtataaattgggtttcacaaaagtataatttgccataaacagtggaaagaaaaggaaggtttaaactgtgctaattgcgattgtgatgttggtgaaatttagccgctaataaagctactttgttgttagagtttaaggttaatgcagacaacgtacagaaatacaaaccattccgtcaaaaccaaagacttaaggataggcatatacatgagaggaagtgaaaaagaaagccaagattttattaccacacctgccaaggtattgagcactgtccatcagagtccttaatcaatgacttaaaccagattttctcaacctttttttaacccatgctatgtcttctttgataaaacataaaattttcatgtttttctataaagttaaattttctaaatagatttccatgaactgaaaaaaaaaaaaaaagtgatgaaacagagcacttcattttcaagctattatccctcaatcttcaaaattcagatgtgctcctccctaccaatcccaaggttgaaacatactagcctgatgagagaacctgttctgaccccaatacagaatgcaggccagcaaagggagtctttagtgcaatggagaaagaacaaatggattgtcctgctattgattctttcttagtttcctttcaactatgggcaggagtgacatgcattttgcggcattctggagaactagaatgtataaaatcggtcttgttcttgtttgttcttggatccttgtagttttatactgtgaacctagataaactgtgctagattgatccgtcagaggcaagtggcaggcccagcttctctgtttataatttcattaattgtccattaaaccaatgaatgccatgatctttggcttccccttgggccaagctgaaaggatggctgatttaaagaggaaggaagtactgaaggatattttggagagtcatatctttaccctcttgattgctagacaaaacgtcaagctgttgagaataaaagcatgacacagtgatcctctgatagttaaaagtgtcagattcaaatcagaattttcactttaaatactacatctcctgcctgaggtattttagattacgccagaaggagaggaatggactctttcatgcctagcatgggacattcacccaaaaggcaacctcttggcaaaaatgtagaagacttgaatagagagactttgagtcctcaaatgcttgttcctagtcaggatactttgagtaaagtatgtttacgtgaaagattaaaaaatgacttctcataatcctagcattttgggaggcaggggcgggaggatcacttgagcccaggagttcaagaccagcctgggcaacatagtgaaaccatgtctctacaaaaaaacacaaaaactagcatggcgtggtggtgtgcatctcttgtcccagctggctgaggtggggatcgcttgaacctgggaggttgaggctgaagtgagctgtgatggtgccactgcactccagcctgggcgacagagagagaagttgtctcaaaataaataagactccagtgtcatgattctggagtattatataaccatctgtgaatcagtttaggaggattctccctcatgaacagtttataaaaggaccagaaagacagaatttagcagagcagcattttaaagtaagtaattttgtcgcaggaataccgacatgttcagatctcaagctaacagttctttgcaacttttccaacctcctgcctggctgagaggttctagggctgttggcagcctgtgttggctgttgggagtgagtttgaaagtcctccaagaagactgggtcacccacagatgtttaccatgtgcctgctcagccactgactggccttggtcacacagctgcactctcatagctaatcttgggccaggaagccaggtccaggcagaatatagggcaaccagataatactcactactggaacatgccccactgaaatccccccaataatccagactgttacccacagccaagcacacaaacctgataaaaagcaaaacttggtggtatggcatgtattcatcctcattgaatttggaagtctgttgttactgatcctttttcccccaagccagagacttcaggagggcctttcaagtactgttaatgtagaaataggtttgtaagtaaatttaagaaaaatgaaaccaaagacctccctcctgtgatgctttccagcaaaatgaattacactgattcagaaggtaaaaggtttatagacactgtcatttgggcttaaaatccattggcatgacttatgagacagcttcaaaattactttttattaaaaactgtagcctctggttcattttatagattgctcttgaggaataccagcatcatacaagcatgaagaagactcacttcaggaccacatgatagttcttttccagaaccccttcagtttgttacctgggtcagctagcagcaatttagattaataaggaagattataatgcagtgggcaatggggagagccaggatacaaatactgactcagtccgttcaatttcaacagtgattgaagctgtggaactcacagatcgtatatgctgtatttgggggttcagatagcatctgcctctgtgtgaaaaacaatccttaatttgaataacttttcctttgtttacgctttccattccatgtgcagcacggagcacaaaaccaagtcacaaatttggattgtggatatctacttacatacctggaatgtgtgttactctacaaagactgggttcccactttatcatatgacaactctgggcacaataagagatattcccttaaggctggattaattctgtttggaaaactccattcctaaaacttacattctctcctaagatgctgtagagaggaggggtgcttgggggctgaaatggtgctggaaccatagaatgttcatgctcctaggaaccctacctagttcaggggtccctaacttctagtccatgaaggtccctaaagtcacatgcaaaatcttatctgtttttttcttgaagggaggaacaaatgcttttatttttattttctagtaaaactttttagcttcatcaaagtagtacatgcaaatagtttaaaggttgaaataatcctacaagactcattatgaaaaaaaaatcacacccctactgtccttaccttcttttctcactccccagagcattatttttggcgcttagctcatccttttggatgttaatccatacttctaaataacctgagtatattgctgctttttgactttgcaggtttacacctttgctctagacctcctgttatggaaaatgtccccttcccccaccatcctcttaatagaaatatactgacattttggttagagcagcatttactgtttacattattatgactacctaaatgctaatcacagttaactcatgtagtataatatcctgcatgacttttaattttccctagaattaattattatctttccccaccctaccccattagcttaattttcttttcttttttttcttttttttgttttgagacggagtctcgctctgtcacccgggctggagtgcaatggcgcaatcttggctcactgcaagctccgcctctcaggttcctgccattctccttcctcagtcatcagcttaattttctatgtatttatcattaattcttctgctgaccctgccagctgtctcaatctccttttaatacattgagacatatggaatgttctactgattccttttcttcagctctttcctggagcctctgacctgctcctgtctgaaccggttccctccatttctggacactgctgtcttcctatgatcttcttcgctaccattctgtgcattcccttcacttctcttttgagttgtggatgtcctgtgtcatgtatctcctgcctttcttcttcctggtttaaagcgtacagaggacgcaaatgtttttcacaccttgcatgtctgaaaatatcctcatttaacagaaacacctggtagacagtttggcaaggtacagaatgttagattatagacactttttccttcggacttttgaaagccctcctcattgtcttctagctctgaggattgctgttgagaagttcagagctgtgcagattcctgatcccttttgtatataacctgttttttctttctggaagaaattttacaatgatatctcttgagttaggtgtatgtttatacattatgctggtcactaattgggccctttcagtttagaaactcatatctttcagtactgagatttttaagaatgatttatttttttctcacccccttttttctgttttctctcattttagaaatcattttatttgaaagttgaacctcttgtcctttaattttcctttctttcctgttttccatgtgtctgctttctttattttctgggagattgtctcatctttatctttcagttttttactgagtttttaatactggcttcaaattttttaattccaataacttttttaattctaataacttttttcctgtgaatttcttttcttttaaaaaaagttctattcttgtttcatgggtgcagtatcatctgagaatattaatataggattatttaagaatgaggaaaaaaaaagaatgaggaaattctaagctgtgggtgggatgtattgattgtgaacttctttaagatgatctgactgggccattttattgatgaatccctgatacctcatcattggatctttcctctttagctcttcaggcttccataaaatatgtttttttgcctcctgcttgaaaggtataggactggctgttgaaagaccattataatgggcactgataaaaataaactgacatggcaacaaattatatttggcaaatagacaccggaaagcaaatatccagacttcccggccagggtataatcctggcgcttttcccgaatgcaaatagtgaagcgcatggcaaattctgcaggagacaaatttgttacaaagtaggactggaaccctactttcttgattcagagtttcactgttgctagatgaggcaaggccatctggctttatctccttttaggctgagcaaaagaagcccaggtgagccaaaatacgtattaatatatgtttgccgaatcccccccttttgaatgtggtactcttgccctcaaatgtgcctggtgttgatcatttctggaaccttcagtttcctcctcttaagagagtaaaattcccgtcttcttcctggattaggaagggcagatctcagcccagtggagcgagggaggaaatgtagagaactattctgcttctcatatagttcagccaacccctcttgcttatagccatatgttcaagggaggtttccagaggtgcctgatgccaccattccctgagttttttaagggttcggcgacataaattgcttgtttctcagtttttcccactgttggcttaggtttcggctctcttgagtctgccaagtcagttgctactcacccatttcctcaccagcttccaatatattttattgctgttatctttacttttgttatctttgttttcatgtgtttatgcctttaaaagtccatttactgtcattctggtaagatttgggaaaggaatgcaagtcaatgcctttaaatgcactatctctatgcaaagtcgtacccttgcttttttttttttttttttttttttaatcagtttcttaaagggagtccttggaaaattactagtctgcatcagcatttcctttttacgtagcgagaaaactgagcccagagaactgatgtgacaagctcaaagttacccaggcacagcggccaggactgaaggcttgctttcttgattcagagttcactcttttcttcctgttctgttattacaaattcaaaggtcacgtagccataatctttttatcctccttctgcttatcagataataaacattaattaacatgtgttttggtttttctttttgcctctgtttagtgtcagctaaatttttttggtttgttcactcatgtattcgttctttcactcaacttattcaatggattttttaagctattgttaaatgccaacgctattctaggcactggtaaaatagccatgagcaacagaaagtccttgctgtcgtggagttcccatatattcagaggaagagaataaccaaacagactgattataagcagattggctcaggcagaaacccagctacaggcacacatgccaacctttaggaaagcaatgacctgatgaactgtgtcagaaaaatggagaactgacaagggaagtctcactggagaaagaagaagtgtttctaatctgaagaattaagttttctattaaccttttatggaaactgaggggagggtgagaagaagggggaagggtatgaatggccagatgctccgggaggtgctttgttttttgagagaaaaagacacaccaatagacaccaggaaagccgaaggcattcatcttaacctctgtgtttaatggttttataaaataatgatatgggcatttgagtgaaaagagagtggagcctgccttctttacagtcacattggggtttccgtctgttccagctgcatctgtctgatccctgggacttggtctcttgcctcctaccttatcacaccttagtctgtctgcttgctgtttctcttttcatcgggctacacttgggaacctggagaaacctcaggcctctgaacacattggcacctcccgagctacttctaatgaaaacctcttacctgacttgggtggacttttgggtatgcgcttgacttttgctttaagaacacatggtgtgttccatggagggttgttgaaaactgcctgatgagttgggacgggcacacctaattcaaaacttcagcattttattatgctctgtgaaacagtgttccttacacgcttagattttttttctgcttacacatcagagcagccttaaagttgaaaaagcttttattacgcatttcttgttttaagtacgctcaccctaataaccctgtgaagtagtgattatctctgtgttgactaaagggaaacacaactaatacacctactaaggtagcaagtctagccattgaacaaaccagagcttcaagtccagtttctgactcagggttgtagcgatagctgtggaggacagccttcctcctccacctgatttctctttccctcttgcttttcttcttcttcttagttattatcagattttgcatcctattcaggggccacaaaggcagggaagataccacagaaaaccaaagtccatatacaaacaggttggccacactgcaggaatatagaaagaaagtagtaggcaggacattgtgaaaaactttaattcttgatatagtcttttccccgtgacttctaacaacatctaactcacccctcctggagaattttgctgcaaaagaagagtcttttgtgtggaggctggggaggaatgaaatttgaaaatgataaaaagtgattgaagacttctctaaattaaaggtagtatcgttcactctgcttaaagagtgagcttgtgaattaattacagttaggagatcaagaaactgagacattaattgatagaaaatcgcatccaacacgtagatctagaagaaaatatctttattttctttctagcatcaaggaatattaaatctaaagtgtccccaggtatatggttttcaatcctgtgcttaaatatctcctgagaaggagattccataaattccctctataactaaccaatcctcataatcagcaagttcttttctatctgatctaaatccctagtcctgccatttaaactcatttcctcatgttctgccctccagggagataaagaacagctgtctgctcctatttgtaataatcctcatggagagtatttgcaatagtctcctttggcctaaataccaagcttgccctcacctttctttttaactcttctcttgtttccccacagagtcctcccatgctattcacatctttcttgaatagtttcttccccaggacctgccatggtgaaagacttagaaataagaatacagttgtaatatagacgccaaagaggtagcaggaagtcagatctgggcaactccatgccatgctaaagaaataaaacattctccattaagaaatgttttttgtttgtttgtttttgcttctttttttcttcttccccctggtagagacagggtctctctctgttgcccaggttggagtgcagaggctcttcacaggtgagatcatagctcactgcagtctctaactcctggcctcaggagatcctcccccttcagcctcctaagctggcactgtaagtgactgcacctggctttgtttttctatttcttgaggcatctctggcagtatctaggcccagccataggctaactgtgagatgggtggaattaatccttagtgtccttatcctcagtgtactctcctcctccagagtatgtcaggcaccaaattcctctctcccctactcactctccctcctctcaaatctctgttccctcaatgtggtttgatattttaggaggaaagcaggaagactgagtacatttcctctgctggccaagtctgatatttatttacaagcaaggcgccctccttgaatttcttagatgtgttaattgggcctagtctgcttagccacgaggtcctccctgcccatctcctttaggagcagccttgttatacttgtcacccaagggatgttttagagaaagttggtgctccacgaaatcagagaccactgcagtggagagcagacagccaaagacccatctcagaaaacccaggggtctctgttggcccattaagtagaagcatctgtacattcaactttcttcctcatggtgaatttttctgtagcatcacttccatttgacagtgaaaaaacttaatctgtcaaaaggtaagagttatttttaaaacatggttatattgagaaaccttgcatcttacatgtgaaaatagccacagaactggaaaggatggtctgaagaggggactttcaatatttcccagcagattctcagacagagactcaccttggcccattattggatcaaagtcaatataatattaggttaacttgacttatccagctggtgagatgcatcctgcagtcttgagtgcggaggcttctttgttttgtttggggttttgttttgaagtgttttgcattaccagaacaagagttcccaaaactcgggaagttgaaaggtctctttaatgggcacggatgaaaataaactgacatggcaacaaattatatttggcaaatagacatcggaaagcagatattcaggcttcctgggcagggcatagtcctggcacttttcctgaatgtgaataatcaagcacagggcagatcctggaggagcacacttgctccctattgcttgatgaagcaaggccttctcttttacctgctgttgggctgagcaaacaaagcccaggtgagccaaaaaagaaaaagatggagttggcctcctgcttttcagatgtatccttattaaaataggaaaaaatatttttaaaatgtggttcatgcatagccacattagtccttctgattgattatgtgaggatccagctgggtatggaccaacatgtggtttgtaagggagtcaaattcttaaagtatatctagagttgtttgggtctctggaggttgtttttgttttgacctcagaatagttaagagatttgattcccttctagaaataaagctcctactctggggaaagtgaatttttggcagaaagttattgccatggaggctaatttccccagccttaattatacacacacatgaagagtagagggcagtgctggggagggtccaaaacataggtttccaaaaaagtcaaaagcagtgtttcagccgggcgtggtggctcacgcctgtaatcccagcactatggaaggccaaggtgggccgatcacgaggtcaggagatcgataccatcctggctaacacagtgaaatcgtgtctctactaaaaatacaaaaaattagccaggcatggtggcacatgcctgtagtcccaggtactcgggaggctgagacaggagaattgcttgaacccggggggtggaggttgcagtgagccaagatcatgccactgcagtccatcctaggggacagagcgagactccgtctcacaaaaaaaaaaaaaaaaaaaaaaaggcagtgcttctccgcttctcaggaatattgaccccagtcccctatccatcccgccaatcccagaagaaaagataattagaggaagtacaacaagggccaaacttacaacaagcacataaatactttgaggttgatgcaaaagtgtgtatagctgtgtggttcatgaaaggggtgacaggaaaagctgtaaccagacccagggacatgagccagttctacattttgcagaactgcttttttcacagaggcttttgaggggccccagaaagagaatggaagtaatggggccaagttcctgcactggagggcagggcctttcctcgagtgttttgttttaatgaagcagctggaagggttgcttatctccggctgatagatgtgtatttcagcatgacaggaaagaggaggctcattcataaacaggcctggccctctggggtttcccacattgaaggaggggatgctgcttacaagaagtttatgaagtttatgctctgacttttcaaagtaaatgcagtgttttttattggagagccctgatcgcttttccctacctagagccattttttgagggttgcactgaggccggttttgccgaagagaagactaactctagggccttttgcactgttaaatgcaaaccatgtgtgtgacttgaggtttccttcctctccaaagcactgcacatttggcacgatgaatggctttagctaaaatgcagtggggtgtgtaatgaaaagtgggatgcttaaagtgttaggagatactcacactgcaccccacagggaacctcagtggggaagagaggccattcgctggcaactgcagtccccatgtgcaaacagctaaaccccttccccaaaaggtttttccaatagcagctatcccccaccccggtttctcaggtaatttatctgtttggcacacaaggctctctctactgtagctaggacaaagtctatatttcactcctgtttttaacaagtgcattcagaacaaggctcccaaacttccagggttctcttaactacaattgaaaggtcacaccctccaaatcctacagtgtctttatgagagaagatggacagtgtttcctgaatacaggtgctggtcagttgccagctcacacagaccaagtggtggtgatttcatcaaaggttgtggaccctgaaatccagggactttgtcatcaactctcaggggtcttagccactagagctgcctgtcagtcagctgtcttctttttcccattcatgatgctttaaaaataaaacaacaaatagcaaaaccttattttagaaggtattccagccatctaggacctagtctagttgcttctgccctggttgagaaaaatatcagttaaaatggcaaatgcggaataaatgatcttttcaggaatgcacatacataatatgcgtctttctctgactctgccttttctttattaactgcaggggagacagcaggaaggcagcaagtccccacctccccgccagcctcggaaaacagcagtgctgcccacagcatcggcagcacgcagagcacgccttgctccagcagcagcacggcctagcccaacccagcccaacccggcccaacccagcccagcccagctcagctcagctactgccaagggcaggaccaatggctgagcctcgtgtccagactcagagggctggattttggttcccttgtaaagacagagtgaatttcagtataaagatcacccgttgtattcaccccacacccagggctagtataaacatgaccctgggcttctgtaccacactagaattcatgtgagaaagctaaaatggtggtcttctccaccagcccctcacaggcttgggggttttcaatgtgaaacacatgccagtttttaaaatgctgctttgtccaggtgagaacatccataatttggggccctgagttttacccagactcaaggagttggtaaagggttaatagccagatagtagaaccagtgaggagatgcggccaaagattctttatatctgaaccaagatgtaaaacaagaaatgctttgaggctttctaagcgatcctcctgtctaatttgcacctttgtctggatgcacacttctgaccttgctgccacaacctgtggggtctgatgtgtcccttgatgggtgctgccctcagggactgcaccctgacaagtgttaaggcaacattcctttcttgtgccctgggccaaaaccaatgctgatgaccttatcagcttcctgtttcttcccatacttgcatacaccactgcaaaatgtcttaatgcaaattttgtatttcttacaggcctacagaaattgaaaatgaccaaaatcaggaaccacagatttgtgcccattcctaatattttgttctgcaaattaatgtataatttgaggtgaaattcagttataaagtcaaggacgaatttgcacagtgatatatttctatgtgtatgcaagtacaagtatataatatgtcacctggcacattcattttctcagttgaagaagagaaaatttgaaaatgtccttatgcttttagagttgcaacttaagtatatttggtagggtgagtgtttccactcaaaatatgtcaacttaaaaaaaaataggccctttcataaaaaccaaactgtagcaagatgcaaatgcatggcaaatcctgtcggtctccagttggttatctgaatagtgtcaccaattccaccaagacagtgctgagattggaaaagggcactcatttggattgccttacttctcttgccttaaatatatcccatatatttaatatgtcaaaaagggcttgaggtgaatttcattaaatggaataatatgatgccactttgcagctaaaataagctcagtgatacctccttgttaaaaaaaaaaaaaaaaaaaaagaatgccaggggggaattatcatgctaaattattttactgctgaagatagcttcattgcaaattattctttttccagaatttcccccaaacaacttagaattccataagtagaacaagatagattctacccccaaaatattcataagcaaatcccactgcccttaaaataaggaagttatgcctggttgtctgtgaatggaacctcagtaggtaatcctgatgaagcttaaaaccttagggcagtgtctacatgggaaacaagtatgtggaaattgacaatcatttttaccaaatcgttgagtaataatatgacttacctgatagatatacacattcaataaggaacatttttttttttcaataaggaacattttaactaaaacattactttagggctgagatttccaggctatctacattgatctactgaaaaatttctagatttccatatacaaacgaagaagacatgagtttagagaatttttttcctttaatttttttttaacagaagggtatcagagtggaggacctagattacgctacctgtgtttgaaaatattgcgctttgcctaaccttcggtggaatgtattgtttcagcatattctatgtataaaaaagtttaaagatgtcttcaaagaagactagagtctttaagtcacttatagctatattttactacaaaatttgtgtataaagatatatttaagtgttttagataaatttaagttactccatatgaaatgtttaatttcagctactgtgaattctttcgatcagtcctttgcttttttaaaaaatcttttccatcgtgttaaaaagaaaattagctattaggagatattaaaagattgatgtcttagaaggacagggttaaaaccttctgtaatatatttaaatatatatttttaagagagatgctacattgccaatgattttataaataatttaaaattaatttacaaatttatagatgcaaaccaaaagatctttttaaaagagagagagaggaaaaaaatcaccttttatttgtttgggtctcattgtcagaattattattcagatcaagaaatctgtgtcgataaaacctaatctcatattggagagtgaatgtcgttaagtatttctgaaatgtttctaaaaaatgaacatgaaaaaaataaggtattttctccctagcttctcattacagtatttctaattgcttcacactttacagttttaatacaaagtacaagctctacttttataacgtgtactacaagtttctttaaaagtattgttgtatttcagctgaactcttgtatctgcagtcttttgttatttctgcaggctacacccttaatttgcagaggccattttgttgtttgtttgatgctgaagctgttgttaaaatgccccaaactccaaggcagattgtctgtataatacgctatagcttttcaccatgtggtgtttaccagctgttactctgtattttaaaaagccagagatttcttctgtctaaactgtttctatagcattttctaaacaaaaaaaatggtttttttctttgccttgtaataagattgtaaatccatttcctgcttgtgttcttagtgggcatgattgtgagtgtgtgtggggtgctcacacgcgtgccagtctttttgtactgtaactacctcatggtttgaatgatgattgtactgctggttgtgttaacagagcacattttgttgggtgagtcctatgtgatttttttcatgtttgttttatctgggggttgttcatgaaactgacagatgtttttctaaaaaggactattatcagtttccaaatacaatacttctctcttctggtttttcctgaatgagcctgattttgttgctggttttcatcatctatgagggtaaaacgagtacccttaaaatccctgtggccagtttgaacacccctgttgtattcttttctctgttcagtgtgtcagctattttgtgaagatgcttagatgtatagttttgataaccacagttttaaatcttttatctgtgcataataaaaagatatatatcagttattaatatgtgtcttgttatcattaaattctaccctaaggctcatgtaacttttttcactgtgactttctcctgaatggatcgtctgctccgtgttgatgaggaagtgggaggagaaaggctaagaggtccagagcagagggaagggcggatggactagaagaagagtgcagcaggagctgtcgctcttctcagaaaaacatggcaggagacttggaagtgggtgtctcaccctggaaaccattcctgggccttctgtcaatctcccagagtcaaagaaagaaacataatatacatttaaggtctactattttcagccccttcaaataccccattgctgcttccagcattccgtatctccatatggtaccaccgtcttccagttgtccaagccagaaacctgggaatctaactacagcctctttggctcccctcttcccaaatcaataagtccgagtgttattctacctctaaaatgtctctttcttcaaaccactgacttattcctactctgactgttgttacacactgctcaagagccattgtctcttgagtcactgcagcagcctcctaactggtatgccgactttccattttgctcccttcaattctttctccaccatgcagccaaagtaatcctaaaaagactccattttgaggcctttaggtaattgccccatttgccttcaggatacagttcagattcctaagcatggttccgaggaggctaatctgcctgctttcccagctacttctctcacctctccggagctcagttctatttggcatcctcacccccagacaaatttgtaatgaaaaaagttctcgttcagtatcaaatattacattacagcattgaatatgcatttacaggccacactccccttttgagatttttagtgactcagatgatttggcatcaaggccagcagcccatccctcacatgttacacaggtgggtacccacagagccggaacagtgttaagctccattttacagctacggtgccccctgcaaccagctcctcttaggatatgtgggagtaattggcaggtcaatgaattttttttgccattaaactctccttgtgtctactggagtcaaaacctgggtgattaataaatgggcttcagagagtctgtgaagtggctggaattgtatgtaggattttattgcagctatgtctcggctgttgtttttggtgagagtccataggctttttgtaagaaaaaattatctttcttgttcacacaatatatatatataaaatgaatgcaaagaatacagacatgtagcaatgaaaaggcctccataatcctccaacttgaatataagaataccgatttagtgtatgtgttcccagatgtttccttaattcatatcaacatgtccatgtcattaaataagattggattatggcccggtgcagtggctcatgcctgtaatcccagtactttgggaggccaaggtgggtggatcacttggggtaaggagttcgagaccagcctggccaacatagtgaaaccctgtctctactaaaaatacaaaaattagcggggcggggtggcatgcgtctgtatcccagctactcagaaggctgagacacgagaatctttgaacccaggaggtggagattccagtgagttgagatcatgtcaccgcactccagcctgggtgacagaggaaggccctgtctcaaaaaaaaaaaaaaaaaaaaattggattataacagttgtgacttgcttttttcttttttcttttttttttttttttttttgagacagggtctcattgtgtcacccaaagctaatttttatattttcagtagagatggggtttctactaaacccaaggcaaatttttatatttttagtagagaaaaggtttcaccatgttggccaggctggtctcgaactcctaacttcaagtgatccacccatctcggcctcccaaagtgctgggattacaggcgtgagccaccacgcccagcctgtgacttgcttttttcatatggcatatctttctcagggctcctaagatgactgctgatcatcatcattttcttattaggcttaacttaaattgcccaaataaaaatatggttctcataggaagtgaaatacaaagatatttgttaacgctacccttcctactccctccagtcacttacctagaggagctgatgttaacagccttttttcaaactcaaacatattgaaacgtgttcatgaatatagaagtttttgtttcgtttactaaaaatgggatcacaatatacatactctgcaacttgcctttttcacttaacatcgacctcctgtagattattagatacggaacaaatttcatgttttttggtggctgcataatattttttacaatgaattcagccaattcactagtaatgacattttagttttttgccaagatattctgctgcagttaatatccttatatattatgttctcacactccaatgctttaaagcaaaaaaaaaaaaaaaagtgacagaattataaaaattataaagaggaaaaagaggaactgacaaattcatcacagtaggatattttaacatatcactctcagaagttgacaagtcaaaaatatttggatatggaagatttgaacaatgtaattaagcttgattaagatccatacatagaatcctgtgtccccccaatttgacaattttgtatataccactcctggaactataatggcattctcagcaaatatcacaaaatttaatcatactgatcaggttacttaatcacaatgcaaatagtttaaaaatgaatacgaaaataatttttaaatactcaatacatttaggaatttaaaaacactttacagccgggcgcagtggctcacacctgtaatcccagcactttgggaggccaaggtgggcggagcacaaggtcaggagatcgagaccagcctggccaacatggtgaaaccctgtctctactaaaatacaaaaaaattagccgggcgtggtggcgggcgcctgtagtcgcagctactcgggaggctgaggcagacgaatcgcttgaacttgggaggcagaggttgcagtgagccaagattgcgccactgcactccagcctggtgacagagcacaactctgtctccaaaaaaaaaaaaaaaaaaaaaaaaaaaaacactttatatgttctgacaatcagttaaatggaaaaaaaaaaaccaaaaacacttctaaataattcatggctcaaagaagtcataatgaaaattggattgggaggctgaggcgggtggatcacctgaggccaggagttcaagaccagcctggccaacatagtgaaaccacatctctaccagaaatacaaaaattagctggggatggtggcatgggcctgtagtcccagctactcaggaggcttaggcaagggcatcacttcaacctgggaggcagaggttgcagtgagccgagattgcgccactgcactccagcctgggtgaaagagcaagactccatctcaagaaaaaaaaaagaaaaagaaaaaagaaaattagaagattagacttgaacagtgaaaatactacattcaaacatgcggctaaagcaggtaacttatgagaaacttaaattgctctaagttgtacattggaaaaaaaagattgaaaatgtaacagtatccaacatggcaagttaattattactttaaaagactattggagataggtaaaaattaagtaaaagtaaacacatgcattagaagataaaaaaagacacaacagatatagcagaaattttaatcaataagggatcatcataaactttattttaataaattagaaaacacaatgtgggtgatgtgtcagggacagtcagagttctgttgggtaaacaaaaaccactctgattatttcaacagaaagaaatgaacgtgaggacttggtgtagcagatgttgaagggctgaaaaggtgaacagagattgctgagggcccagggcagggattatcagagcgggaagttgagcgtggcttgcccagtcccactaccagcatcatcaagcagatagggagctaggagacaaaaacttagtggatggcactgatgacttcctagtaaaaatgcaatgttgcaaaactatttcaagaagcaataaaaattgaaaataaatctttaataaatctttacatttaagaaaagtaagatctaggaggcttatgggaaaaataaaataaaaaataaaaagtaaaaactaaattaaaatctactcacaacaaaatagaacacaaaatttaaaacaaacaaacaaaaaacaccaccaagcccagctggttttacaggtaaattctaccaagtagtcaaagaacagataatgccaagatcctggtgtttcttttattcctgggatggcaggtcaaagagaatgagttttttatattaatcttaatatttattgccacattactttctctaaaggtttttgaaaatcacgccatcactacaggcaatgtatgagtgcccattccctggcttcctcatcaacattgcctacgttgaaacagaagtttgggctctaggcatcagatttaaatcttggtgctaccatttgctaggtgaactgtttccgtgatattaaaaaaaatctacactttagcattgttgtcaatattaaatgagctagtccacataaagttcttagcctatactaatcacttaataaatattacccactattaaattttgccaatctgatggttgaaaattgtatctcatttggatttgtattatctgcaatgactaagttttaaattatcatatcagtctttcccaggttctcctataaatttctattttctttgcccatttttctaatgaattgtctttctcttaatgatcgtacattagtgaaattctgtgtcacatgtcatgtatgagaaatattttcccagtctattatggtcttttcattttgtttctaattgatattgccaagactaaatgtttaattcttatgtagttgaagatacatatcttttccttttggcctctgggttccctctcttgcttagggtttctctgactctagatatatactaatacttttaaaattttatttttaaaatgtaggtctttatccatacttttgtgtatgatatgaaggtaggggtctatttttgcttctttccaggtgattattcaattctactggaagcatttattaaaaaatgaatttattaaaaaaatgaatttattcaattcattcacttcccattgaattaatacttttaaaaagaattgtgaggtagtctggccttagcacatatagtataaaatcatgtaataaaaataatatgatattagcataggaatagttaaatggattactcaaacagacaagtaaaacaaccagaaattgatctaattcattaggcccttacatatggcaataagtcatagttttcattagattcttacaagagtctgtgatccaaaaatgttataatttcatgacctaaataagagttgtgagttgtctgatttttattgtaaaaaaaaaaacacagatgtaatttctttccctgttatttcaaaaaaagagagagagagagagagagaaaaaaaagttgtctagtaaataaaaagcaaatcaatgttaggtctatcccaaacttttcatggttccacacagtattcttgataatttgctgctcttcctcctcttcctccctccccatgtttatggaaaaattaatattccctaatcaaacattatttataaagtgttggtttcatctagccacttgtgaatgttataataattctgtaaagtgaagaaatgttaccaaatgccaaatataggcatcttttttgtttcaaagcaagccaaacctatagcattgttcttccctaatgcaacatgtttgaaaatgggcaaatggccggattaatttttatagatgtcattgataatcaaaagtttgagttttggcatatttgctgcccttgttcttagattgccacctcagctttttcagaggaactcaacactgtactttatgtagattcgatttcacacttaaaataaaggtcatcatatgacatcacctccccttactcagaaggtcacagcttgaattaatttttaaagattttctgcatttactgcctctgagaattcattaaaaagaaaaaaaaactttaaatgtagaaccacatgactgaagtgaactctatcttgacttaaaaagaaatgaggggtgggagtgtgagtgtgcacacacacacacacacacacaaccctcagccattttcctttctattttattaacatattatcaatattttctttctgctcagaagccccagaactgattatccttttatcaaccaaagcacaccacctgtgcaagaaaagagggaatggacaaggagaacaagaatttctcagctttgaaacccaacttggttctttccacttgaccaatcaaagactcaaagctgaaagtcttcataagtgatttgggtggagcagcttttgctggtctgttacttgtcccggttcataaactgcctatgacatagtttctgcaaagaacacagtgtacttgacaacagtgttgaaataatgctgaatttttaaaagggaaaatcacatggattctgtatggtgcaggggtggtgtaggaagggagaaaactaatttttttttttccatgagataggatctcgctctgtcgcccaggctggagtgcaatggcagaatttcggctcattgcagccttgactttctggtgattctccttcctcagcccctcaagtagctgggactacaggagcctgccaccatgcccgtctaatttttgtgtttttagtagagacggggtttcaccatgttggccaggctgttcttgaactcctggcctcaactgatccacctgcctcggcctcccaaaatgctgggattacaggcatgagccaccgtgcctggccaatttttgttatttaaacccaaaaccatacagcataccccaaaagtggaaactagagcttcaagaatcttcatctgaaacacaaacttcttctggagcaccactttttgataagtacagcaactgcagaagagactttccattgaggattccagttatcaaatctttttcttgagtggagaggagaggtgaaaataaaaagcttcttagcccgccagttagccttaaaagtggaagcacctggaggagcatccaacctgcactccagggaaatccaccacgctttacctttccaccccagtgagtgatccaagagaaggtaattacgttattgcgccagcaaaggaaaaagcgacaaatctttaacccagccagccagccagtcctcattttgactggttgatttttttcacttttagtgtatttctcagaatgccaatgcatgtgatagaaactctagttactgcaaggaaacagtcacaggaagtgtaggaagcagttaaaagaagcatatgatgggaaatagaggatttggtttcaagttgtttcatggccctggggctgagctgagttgcaatggagaaaaactgaaacaactgtgagcagagagacccaaccagttctcagagcagagccccccactgcctcctggcccctggccctgcctgctccattccttcctctccatctgcaaggccttctcatcacctcctcagatcctagagtccttcacagctctgctaacaggcagtcttttccataaaaccctatgaactgccccagctgttattttatcaatctctggggtctggtagcaccatgccacctcatgactcaagacacaaaactgttatttttctctaacctcccgcagccaatccatcagtgagtcctgatggcttccaaacatatctgctgctctccatctgcaccaccaccacccgagtctacgccatccttacctccaacataaaccagcacatccagcagactccctgcggcctcctcgtctgtctaagattattccccaggtggctgctagaacacactctttaaaagacgttagatcttgtcaatcccctgtttaatactccaaatggcttcccatcacacttagaataaattccaaaaaaacaaaacaaaagtatacttttaaaaatccggctcctattcctgtgtgtacccttctgttcccctgtaggtagccactttcactagcttgtgatgcttcttaaagcaaatgtgagcaaataagaatctcctctctttccccctttattacacagtggaaacatattaatacgatacatgttctgcattttgcttgtctcacctaacatattttgtatccatatcagaatataaatcagtatctcatttcttttctacagccatatagaattcta

SEQ ID NO: 967 - DNA, 3166 bp, Homo sapiens
tctttaagatttgtagctactaagaaagaaaggagctttttttccttgggccttcaaactgaaagaaccgcatgagcctgaagctgcgcatggtcttaacatcaggctgtgcaggaagaagctatctgcagatggatgccagcacacacaaggaagcagagctctggcaacattgagtcaaagcaaggacacaacatcagagggacggcagagaatccttgtgtgtagatctttggtggcagtttgaaaattgcaaggagggactttaagactacttctgatttgcaaagattgtctgtgctctgagcaggctgaagtgactggacgagacgcactgttggagaaataaaaatgacttcccattatgtgattgccatctttgccctgatgagctcctgtttagccactgcaggtccagagcctggtgcactgtgtgaactgtcacctgtcagtgcctcccatcctgtccaggccttgatggagagcttcactgttttgtcaggctgtgccagcagaggcacaactgggctgccacaggaggtgcatgtcctgaatctccgcactgcaggccaggggcctggccagctacagagagaggtcacacttcacctgaatcccatctcctcagtccacatccaccacaagtctgttgtgttcctgctcaactccccacaccccctggtgtggcatctgaagacagagagacttgccactggggtctccagactgtttttggtgtctgagggttctgtggtccagttttcatcagcaaacttctccttgacagcagaaacagaagaaaggaacttcccccatggaaatgaacatctgttaaattgggcccgaaaagagtatggagcagttacttcattcaccgaactcaagatagcaagaaacatttatattaaagtgggggaagatcaagtgttccctccaaagtgcaacatagggaagaattttctctcactcaattaccttgctgagtaccttcaacccaaagcagcagaagggtgtgtgatgtccagccagccccagaatgaggaagtacacatcatcgagctaatcacccccaactctaacccctacagtgctttccaggtggatataacaattgatataagaccttctcaagaggatcttgaagtggtcaaaaatctcatcctgatcttgaagtgcaaaaagtctgtcaactgggtgatcaaatcttttgatgttaagggaagcctgaaaattattgctcctaacagtattggctttggaaaagagagtgaaagatctatgacaatgaccaaatcaataagagatgacattccttcaacccaagggaatctggtgaagtgggctttggacaatggctatagtccaataacttcatacacaatggctcctgtggctaatagatttcatcttcggcttgaaaataatgcagaggagatgggagatgaggaagtccacactattcctcctgagctacggatcctgctggaccctggtgccctgcctgccctgcagaacccgcccatccggggaggggaaggccaaaatggaggccttccgtttcctttcccagatatttccaggagagtctggaatgaagagggagaagatgggctccctcggccaaaggaccctgtcattcccagcatacaactgtttcctggtctcagagagccagaagaggtgcaagggagcgtggatattgccctgtctgtcaaatgtgacaatgagaagatgatcgtggctgtagaaaaagattcttttcaggccagtggctactcggggatggacgtcaccctgttggatcctacctgcaaggccaagatgaatggcacacactttgttttggagtctcctctgaatggctgcggtactcggccccggtggtcagcccttgatggtgtggtctactataactccattgtgatacaggttccagcccttggggacagtagtggttggccagatggttatgaagatctggagtcaggtgataatggatttccgggagatatggatgaaggagatgcttccctgttcacccgacctgaaatcgtggtgtttaattgcagccttcagcaggtgaggaaccccagcagcttccaggaacagccccacggaaacatcaccttcaacatggagctatacaacactgacctctttttggtgccctcccagggcgtcttctctgtgccagagaatggacacgtttatgttgaggtatctgttactaaggctgaacaagaactgggatttgccatccaaacgtgctttatctctccatattcgaaccctgataggatgtctcattacaccattattgagaatatttgtcctaaagatgaatctgtgaaattctacagtcccaagagagtgcactttcctatcccgcaagctgacatggataagaagcgattcagctttgtcttcaagcctgtcttcaacacctcactgctctttctacagtgtgagctgacgctgtgtacgaagatggagaagcacccccagaagttgcctaagtgtgtgcctcctgacgaagcctgcacctcgctggacgcctcgataatctgggccatgatgcagaataagaagacgttcaccaagccccttgctgtgatccaccatgaagcagaatctaaagaaaaaggtccaagcatgaaggaaccaaatccaatttctccaccaattttccatggtctggacaccctaaccgtgatgggcattgcgtttgcagcctttgtgatcggagcactcctgacgggggccttgtggtacatctattctcacacaggggagacagcaggaaggcagcaagtccccacctccccgccagcctcggaaaacagcagtgctgcccacagcatcggcagcacgcagagcacgccttgctccagcagcagcacggcctagcccaacccagcccaacccggcccaacccagcccagcccagctcagctcagctactgccaagggcaggaccaatggctgagcctcgtgtccagactcagagggctggattttggttcccttgtaaagacagagtgaatttcagtataaagatcacccgttgtattcaccccacacccagggctagtataaacatgaccctgggcaatgtgaaacacatgccagtttttaaaatgctgctttgtccaggtgagaacatcca

SEQ ID NO: 968 - protein, 845 aa, Homo sapiens
MTSHYVIAIFALMSSCLATAGPEPGALCELSPVSASHPVQALMESFTVLSGCASRGTTGLPQEVHVLNLRTAGQGPGQLQREVTLHLNPISSVHIHHKSVVFLLNSPHPLVWHLKTERLATGVSRLFLVSEGSVVQFSSANFSLTAETEERNFPHGNEHLLNWARKEYGAVTSFTELKIARNIYIKVGEDQVFPPKCNIGKNFLSLNYLAEYLQPKAAEGCVMSSQPQNEEVHIIELITPNSNPYSAFQVDITIDIRPSQEDLEVVKNLILILKCKKSVNWVIKSFDVKGSLKIIAPNSIGFGKESSMTMTKSIRDDIPSTQGNLVKWALDNGYSPITSYTMAPVANRFHLRLENNAEEMGDEEVHTIPPELRILLDPGALPALQNPPIRGGEGQNGGLPFPFPDISRRVWNEEGEDGLPRPKDPVIPSIQLFPGLREPEEVQGSVDIALSVKCDNEKMIVAVEKDSFQASGYSGMDVTLLDPTCKAKMNGTHFVLESPLNGCGWRWSALDGVVYYNSIVIQVPALGDSSGWPDGYEDLESGDNGFPGDMDEGDASLFWEIVVFNCSLQQVRNPSSFQEQPHGNITFNMELYNTDLFLVPSQGVFSVPENGHVYVEVSVTKAEQELGFAIQTCFISPYSNPDRMSHYTIIENICPKDESVKFYSPKRVHFPIPQADMDKKRFSFVFKPVFNTSLLFLQCELTLCTKMEKHPQKLPKCVPPDEACTSLDASIIWAMMQNKKTFTKPLAVIHHEAESKEKGPSMKEPNPISPPIFHGLDTLTVMGIAFAAFVIGALLTGALWYIYSHTGETAGRQQVPTSPPASENSSAAHSIGSTQSTPCSSSSTA

SEQ ID NO: 969 - DNA, 4672 bp, Homo sapiens
tctttaagatttgtagctactaagaaagaaaggagctttttttccttgggccttcaaactgaaagaaccgcatgagcctgaagctgcgcatggtcttaacatcaggctgtgcaggaagaagctatctgcagatggatgccagcacacacaaggaagcagagctctggcaacattgagtcaaagcaaggacacaacatcagagggacggcagagaatccttgtgtgtagatctttggtggcagtttgaaaattgcaaggagggactttaagactacttctgatttgcaaagattgtctgtgctctgagcaggctgaagtgactggacgagacgcactgttggagaaataaaaatgacttcccattatgtgattgccatctttgccctgatgagctcctgtttagccactgcaggtccagagcctggtgcactgtgtgaactgtcacctgtcagtgcctcccatcctgtccaggccttgatggagagcttcactgttttgtcaggctgtgccagcagaggcacaactgggctgccacaggaggtgcatgtcctgaatctccgcactgcaggccaggggcctggccagctacagagagaggtcacacttcacctgaatcccatctcctcagtccacatccaccacaagtctgttgtgttcctgctcaactccccacaccccctggtgtggcatctgaagacagagagacttgccactggggtctccagactgtttttggtgtctgagggttctgtggtccagttttcatcagcaaacttctccttgacagcagaaacagaagaaaggaacttcccccatggaaatgaacatctgttaaattgggcccgaaaagagtatggagcagttacttcattcaccgaactcaagatagcaagaaacatttatattaaagtgggggaagatcaagtgttccctccaaagtgcaacatagggaagaattttctctcactcaattaccttgctgagtaccttcaacccaaagcagcagaagggtgtgtgatgtccagccagccccagaatgaggaagtacacatcatcgagctaatcacccccaactctaacccctacagtgctttccaggtggatataacaattgatataagaccttctcaagaggatcttgaagtggtcaaaaatctcatcctgatcttgaagtgcaaaaagtctgtcaactgggtgatcaaatcttttgatgttaagggaagcctgaaaattattgctcctaacagtattggctttggaaaagagagtgaaagatctatgacaatgaccaaatcaataagagatgacattccttcaacccaagggaatctggtgaagtgggctttggacaatggctatagtccaataacttcatacacaatggctcctgtggctaatagatttcatcttcggcttgaaaataatgaggagatgggagatgaggaagtccacactattcctcctgagctacggatcctgctggaccctggtgccctgcctgccctgcagaacccgcccatccggggaggggaaggccaaaatggaggccttccgtttcctttcccagatatttccaggagagtctggaatgaagagggagaagatgggctccctcggccaaaggaccctgtcattcccagcatacaactgtttcctggtctcagagagccagaagaggtgcaagggagcgtggatattgccctgtctgtcaaatgtgacaatgagaagatgatcgtggctgtagaaaaagattcttttcaggccagtggctactcggggatggacgtcaccctgttggatcctacctgcaaggccaagatgaatggcacacactttgttttggagtctcctctgaatggctgcggtactcggccccggtggtcagcccttgatggtgtggtctactataactccattgtgatacaggttccagcccttggggacagtagtggttggccagatggttatgaagatctggagtcaggtgataatggatttccgggagatatggatgaaggagatgcttccctgttcacccgacctgaaatcgtggtgtttaattgcagccttcagcaggtgaggaaccccagcagcttccaggaacagccccacggaaacatcaccttcaacatggagctatacaacactgacctctttttggtgccctcccagggcgtcttctctgtgccagagaatggacacgtttatgttgaggtatctgttactaaggctgaacaagaactgggatttgccatccaaacgtgctttatctctccatattcgaaccctgataggatgtctcattacaccattattgagaatatttgtcctaaagatgaatctgtgaaattctacagtcccaagagagtgcactttcctatcccgcaagctgacatggataagaagcgattcagctttgtcttcaagcctgtcttcaacacctcactgctctttctacagtgtgagctgacgctgtgtacgaagatggagaagcacccccagaagttgcctaagtgtgtgcctcctgacgaagcctgcacctcgctggacgcctcgataatctgggccatgatgcagaataagaagacgttcaccaagccccttgctgtgatccaccatgaagcagaatctaaagaaaaaggtccaagcatgaaggaaccaaatccaatttctccaccaattttccatggtctggacaccctaaccgtgatgggcattgcgtttgcagcctttgtgatcggagcactcctgacgggggccttgtggtacatctattctcacacaggggagacagcaggaaggcagcaagtccccacctccccgccagcctcggaaaacagcagtgctgcccacagcatcggcagcacgcagagcacgccttgctccagcagcagcacggcctagcccaacccagcccaacccggcccaacccagcccagcccagctcagctcagctactgccaagggcaggaccaatggctgagcctcgtgtccagactcagagggctggattttggttcccttgtaaagacagagtgaatttcagtataaagatcacccgttgtattcaccccacacccagggctagtataaacatgaccctgggcttctgtaccacactagaattcatgtgagaaagctaaaatggtggtcttctccaccagcccctcacaggcttgggggttttcaatgtgaaacacatgccagtttttaaaatgctgctttgtccaggtgagaacatccataatttggggccctgagttttacccagactcaaggagttggtaaagggttaatagccagatagtagaaccagtgaggagatgcggccaaagattctttatatctgaaccaagatgtaaaacaagaaatgctttgaggctttctaagcgatcctcctgtctaatttgcacctttgtctggatgcacacttctgaccttgctgccacaacctgtggggtctgatgtgtcccttgatgggtgctgccctcagggactgcaccctgacaagtgttaaggcaacattcctttcttgtgccctgggccaaaaccaatgctgatgaccttatcagcttcctgtttcttcccatacttgcatacaccactgcaaaatgtcttaatgcaaattttgtatttcttacaggcctacagaaattgaaaatgaccaaaatcaggaaccacagatttgtgcccattcctaatattttgttctgcaaattaatgtataatttgaggtgaaattcagttataaagtcaaggacgaatttgcacagtgatatatttctatgtgtatgcaagtacaagtatataatatgtcacctggcacattcattttctcagttgaagaagagaaaatttgaaaatgtccttatgcttttagagttgcaacttaagtatatttggtagggtgagtgtttccactcaaaatatgtcaacttaaaaaaaaataggccctttcataaaaaccaaactgtagcaagatgcaaatgcatggcaaatcctgtcggtctccagttggttatctgaatagtgtcaccaattccaccaagacagtgctgagattggaaaagggcactcatttggattgccttacttctcttgccttaaatatatcccatatatttaatatgtcaaaaagggcttgaggtgaatttcattaaatggaataatatgatgccactttgcagctaaaataagctcagtgatacctccttgttaaaaaaaaaaaaaaaaaaaaagaatgccaggggggaattatcatgctaaattattttactgctgaagatagcttcattgcaaattattctttttccagaatttcccccaaacaacttagaattccataagtagaacaagatagattctacccccaaaatattcataagcaaatcccactgcccttaaaataaggaagttatgcctggttgtctgtgaatggaacctcagtaggtaatcctgatgaagcttaaaaccttagggcagtgtctacatgggaaacaagtatgtggaaattgacaatcatttttaccaaatcgttgagtaataatatgacttacctgatagatatacacattcaataaggaacatttttttttttcaataaggaacattttaactaaaacattactttagggctgagatttccaggctatctacattgatctactgaaaa

SEQ ID NO: 970 - protein, 844 aa, Homo sapiens
MTSHYVIAIFALMSSCLATAGPEPGALCELSPVSASHPVQALMESFTVLSGCASRGTTGLPQEVHVLNLRTAGQGPGQLQREVTLHLNPISSVHIHHKSVVFLLNSPHPLVWHLKTERLATGVSRLFLVSEGSVVQFSSANFSLTAETEERNFPHGNEHLLNWARKEYGAVTSFTELKIARNIYIKVGEDQVFPPKCNIGKNFLSLNYLAEYLQPKAAEGCVMSSQPQNEEVHIIELITPNSNPYSAFQVDITIDIRPSQEDLEVVKNLILILKCKKSVNWVIKSFDVKGSLKIIAPNSIGFGKESSMTMTKSIRDDIPSTQGNLVKWALDNGYSPITSYTMAPVANRFHLRLENNEEMGDEEVHTIPPELRILLDPGALPALQNPPIRGGEGQNGGLPFPFPDISRRVWNEEGEDGLPRPKDPVIPSIQLFPGLREPEEVQGSVDIALSVKCDNEKMIVAVEKDSFQASGYSGMDVTLLDPTCKAKMNGTHFVLESPLNGCGWRWSALDGVVYYNSIVIQVPALGDSSGWPDGYEDLESGDNGFPGDMDEGDASLFWEIVVFNCSLQQVRNPSSFQEQPHGNITFNMELYNTDLFLVPSQGVFSVPENGHVYVEVSVTKAEQELGFAIQTCFISPYSNPDRMSHYTIIENICPKDESVKFYSPKRVHFPIPQADMDKKRFSFVFKPVFNTSLLFLQCELTLCTKMEKHPQKLPKCVPPDEACTSLDASIIWAMMQNKKTFTKPLAVIHHEAESKEKGPSMKEPNPISPPIFHGLDTLTVMGIAFAAFVIGALLTGALWYIYSHTGETAGRQQVPTSPPASENSSAAHSIGSTQSTPCSSSSTA

SEQ ID NO: 971 - DNA, 84269 bp, Mus musculus
  misc_feature (1)...(84269): n = A,T,C or G
cgtgccgctagttcttgttaccacactcgcgtaaaatcctgagacatatttgccctcccagtgatgtgcagtactgagccctccattgcggatcagcagtggctgtcccagggtccagtaatgctgtctcattgcagttttgctgtgtcagatgactgcaggagcctgtgatgtgccctcaggcatcctgggggaccccctcacccggcacctcctgcacagaaagcagccagggcagtgactgctgtcagtggaatgtgacacagggacacagggggtataagggctcagtgagtcatcacatctggatcctttgggacagggtctggcttgttaagtgtaaatgactgaagccttaatcccagcacgcaggggacagagaggtaggcagatctctctgagtctgagggctgtctggtgtacaaagtgagctccaagacaggccaaggctgtgtaaagagacactgtctcagaattcaaaacagcagcagcagcaacaacaacaataaaagtgattgtcttcatttcttggtcctgtgataaaaaaaagaccctgttaaaagcaccttaaggaaaaaaaaggggtcaggcatggtggcgcatgcctttaatcccagcactcgggaggcagaggcaggcagatttctgagttcgaggccagcctggtctacaaagtgagttccaggacagccagggctatacagagaaagcctgtctagaaaaaacaaacaaacaaacaaacaaaaaaaccaaccaaacaaaaaaaaagtaaaagggctggagagatggctcagcggttaagaacacctgactgctcctccagagatcctgagttcaattcccagcaaccgcatgatggctcacaaccttaagaaaaagaagatttgtgagtctgagggtgttagtccatcaggtggagaaagtcctgactctggaccaagagtcaagaagcagagaagcagagaccaatgacttctggcatacaactttttctctctgacagtccaccaccgaagcaatggcgtagcccacagttgggggaggacattctacctccattaacccaatcaagataatctcttatacacatggtcagaggctaacccattctagataacccttcccaggatatagctatgattcaatagcttagtccaggtggccaggacccagttaggtcccccaaatgaccaggtgtgttttggaccagggagttggcattccctcttatcccatagggccaaactacttccctgcccactcaccatagctttcagtgttggctataaaatagttcccaagttaaaaattggcttcatggaggcctccagatcctcactgggaggagcctgcctatatcccacccctttgcagcttcacacctgcacccccatgcctgcacccgcagctattccctccttgggctaagagtaagatgagaacacctcttctccctccgatcccttcaacccaaatgctgtattgacctgcctctgagaggggaagtagatagcgtccccacagctggtgactgtcatcccactcttagggtggcagtggggaggatctttagtggaggctagcctgggctacagagtgagattcttcctctctcaaaacaaaaacacccagaccaaaccaaaccaaccagccagctggtggcctgaggggccatggagggactcctggtagaggagggggacagtgggcatgtgtctccttctccacagttttggaacacccaggtcacaataacgattactcctgagtgagtgcatctcttgggacaatgtagtattcatttcttccacatccaattagttgaaacaatggtcacactgtctgtctgagaatgaagagcaacactggctgttgtctcatctagtgacccagaaaatgccacagagtgttgggaggcagagcccactgtccctctgtgtcccctccgctctcccaggctatgtccaccctgaagctggaaggcctggaggctgcagggtacgtgatggacaggcttggtggtccaacagtatcatctactcaacatgttctagaattctccccttgtctttagcggcctctgtgataaagtcaatagaccttccttcaagtgaaccagactacgggctagagaggtggtttagcagttgacagcactggttgctctcgcagaggacccaggttcaaagcccagcacccacatagtggctcatgactgtctataactccaaaggatcctagccctcttctgacctctgtgggcacttcacatatgtagcacacagatatacatggaaacacatacacacatgagtacaaattgtaaaatttttgagagaaagagactggggggcgcgtgcgagagagagagagagagagagagagagagaacaaggaactaagtcattgtccagtactatccttctggccaggtacagttgagattccctacctcttagtgtctttccaggtaaccaggcatggttttgtaatggcctacatgacctagggccacttgatcttacattccttctcaagcagaggaaggcttaactcagaacagacgtcagcaatgctcacactcatcctacagacagaaatgcagagccgctcttacagatagcacagggaccctgagataaccgcggctagaaagagggtttcaggctgcctcacatgacataatccatgggagagggttacataaactttttatttgtagctgtttgggtgtgcaccatgcaggtgcagttctggaagaggccagacgggggcgccaggtcccctgaactggatttacagatggttatgaactgcctggtgtagggtgtgggaatatgaacaaggcggccctctgcaagaacagtaagtgctttttaccactgggcagaattctattttgttttgccattccttcatctgttgatgaacaatgaggttgacgcaaatctttgctataatgaaggaagggcagctaagtagtgtcttcttgtctccatcttggtgggaagccaatctcatggtgactgtgtagctcagcatcccatggggactccctcgaacaggcaccttcgtccgagacaactcatctctgtactggcctcacccaggaggaaaaagatagcacaggtcctgaaaccagggcaaaggtgaagtctagctggcagtcccaggaagagggaagtccctgagagaggaacacaggggacatacggaggcagctctctgtgatttgcactgtaacagagtgctagaagtatttgtttggtattggttgttcgtgagattggggggggggggtctcacgatttagccttggctggaattcattaggtagaccaggatgcccttgaacttagtgctgggattaaaggtgtgtgttactacattctgcttaatactatgttttctttgttagtttttgttggggggggggttcgagacagggtttctctgtgtagccctgactgtcctggaactcactctgcagaccaggctggcctcgaactcagaaatctacctgcctctgcctcccaagtgctgggattaaaggtatgtgccaccactgcccggttatatgttgggcttttaatagtatgtttaaccctgtttttctaaatattgtaattcccatgtggaatcaatttaggatcttggaaacaattcacatctttctttctatcctttctttctttctttctttctttctttctttcttcttttttggtgggaattttggtttaattatagcttttgaagtaggaaaatctgtcttcttttttttttggnnnnnnnnnnnnnnnnnnnnnnnnnnnnnnnnnnnnnnnnnnnnnnnnnnnnnnnnnnnnnnnnnnnnnnnnnnnnnnnnnnnnnnnnnnnnnnnnnnnnnnnnnnnnnnnnnnnnnnnnnnnnnnnnnnnnnnnnnnnnnnnnnnnnnnnnnnnnnnnnnnnnnnnnnnnnnnnnnnnnnnnnnnnnnnnnnnnnnnnnnnnnnnnnnnnnnnnnnnnnnnnnnnnnnnnnnnnnngacagggcatccctggggctgaacagctgaatcagactgagtccttgccaggtatgtgtccaggagtcacccattgtgtgctcagggccccctccccacaggcacctccgtgtccctaactgtggatgaggaatcagagggtttaacagcttttcatggcacaggaagaaggaagccagggaagccagaaagcccattggcttcctgctgagtggagataaatccaagggaaaaggaatggagggaaggagatggccaggatgtggggtgcctgacatttgaaaggatagacaggaaacaagtggtcattgatatgatgtttgactctccaggctgctggggagagaagcatcccagtagatggagggagctgatgtgcaaaggccctgaggtaggaactggcagtttgagaggcaagagtgacagccttaccaattacagcaaggacttgggtctttattctgagggagaaggaagcaaaagaaaagatggatatatatgtatgtatatatgtatatatgtatgtgtgtgtataataattttattttatataacatatattctattttataattttatttgcacatagttaactcatgtaaagtgtaagactgaaggcatggtggcacacaccttgaatcccagcacttgggaagcaggagaagacagatctctgtgagttcgagaccagacagggctatacgatgagtttttttttttaagatttatttattattatacataagtacactgtagctgtcttcagacacaccagggtgtcagatctcattgcgggtggttgtgagccaccatgtggttgctgggatttgaactcaagaccttcagaagagcagtcagtgctcttacccattgagccatctcgtcagctccaagatttattttattttatttatttatttttatttattttggtttttcgagacagggtttctctgtgtagccctggctgtcctggaactcactctgtagaccaggctggcctcgaactcagaaatttgcctgcctctgcctcccgagtgctgggattaaaggcgtgcgccaccacggcccagctgagattttgctttttaaaggtaaaatataaattaactgtaagatgcagtggcttttggcccagcgacagagtaggaagaagagtaacagagctcagccctcagcagtttctgccccttcctcagccctggaaaccattcagtgtctttctgtttgggttcagcaacatgattgttttgtgcatgcttggatgctcttgtgtctggcttctctcccttacaggtatcttctggattcatccatgtgcatcagagacttggtatcccttcttcctcacagaccacgttcaacacacccatttggctgctagatgccttaactgctgtggaacacaagaaaggaatcctgtgcacaggagttgctgtggatgtgttttctctctctctctctctctctctctctctctctctctctgggtacagacctggaaacggagcagggggctcatagggcccataggtctagtgccagagggtgcccacgaatgtatacatcctgttttttggtgtcctctgcaggattccttggtctcttcctctcttcctctgcaccggagatggatccagggccatttacaggttactaggcaaatgcatttttgatgagccaccctgtcctcttattacccttagaaatgggctctcactgagttgctagccttgaactcattctggaccctaggctggctttaatcttaagctccttttgcctcaacctcccaaatagctggattggcatgcctggctcctagctgtgttttgattgtggaaagttctgtactgaaggcctcctctgacagggtcttctttttgtacatgactaacactctctctctctctctctctctctctctctctctctctctctctctctctctcaccttgcgctggttagttttgtcaatttgatacaaactagagtcacacaggaagagggatctgttccatcagattagcctgagggcaatagtgtactttttctggatttatgattgatggtggaagagtccagcttcctgtgggtgggaccactcctggtcacccggtcggtcctgagatgtataacaaagtaaactgagcaagccgtgaggagcaagccaggaagcagtatctatccatggcttctgctttagttcctgcctccaggttcctgctctgagttcctgcgttggcttcccctaatgacagactttcactcataagctgaaagaaaacgactcttccccaagttgcctttggtcagtgttttatcacagcaagagaaagcaaaccaggacagacttttcctggtggacttcccctacaggccttctctgccgcccgagcagaattgatcgaccttcctcccatctccgagaccatcctgtgttgtctccctagctccccccatcaaggccatggctctgtcatatgggctgtctgtgtgtcatccaatgacagtgtagcctgtccccaaagcctggccctggccttgggctctctgaggtaagcatcacgtaggtttggaccttgaagacttggcaacaatttggactgcgtgagttgatcaaggcaagtgggtatcaaggaaaggggggtggcagacttgagctttcagctgactggcaaactcccagggccactggcagcatcagcgggagaaaacaagccaggactgaaagatgttgaaggcctcaaggaaattttatttttaaaaagttgattttttgttttgttttgtttgttttgttttgtttttcaagagacagggtttctctgtgtagctctggctgtcctggaactcactctgtagaccaggctggcctcaaactcagaaatctgcctgcctctgcctcccaagtgctgggactaaaggcgtgtgccaccactgcccgacttgttttatttcttaaacaaggtttcactatgtagccctggctaagcagaccagaaatctacctcgtactcccagaaatccacctgcctctgcctccttagtggtagcattaagagtgtacattgccatgcctggctccattatttattttgtgtgtttgaaccttggaggtcagaggacaacttgagggagtgagttctaggggccagggatatattgatactcaaaaagaaccagcttctccgatggagaagtagctcacggattaagagccctggctgctctcccacagggtctgaatctgcttcctggcacccacacggtggctcacaactgcctgtaacttcggtttcaggagaactgccgctttctcctggctttgtgaaactgcacaaatacacaaaaatttttaaaagatcataaaaaaaacctctctctttagagagataaataaaaccatttcaactgaacagaccacttactttcttttcttttgatttgaattttattgactattattattgagtgtggggttaccatggcaaccggatctgttctcgccatccctcatgggttcttggattcccgattcaggtcttcaggcttgtgtgacaagtgtctttccttgctgagccacctcaccagcccttttctttggcttgagataggagttcatgtagccttgattggccttgaacttctgtttctttgacctcttccttccaagtgctgggatcacaggggtgctcgccatgcctgtaaagacccccatttccaacaaattggacacgaaggccttctttgatgagtaggcttcaggctgaaacttgagagaggaggagtcaggcactgaggatctagagaattccttcataataatcatggctgagaaaacccagtccctctggtctgagatgacatcagctccctttggataacctcctgcagaccagatctctaggatttcgctgcctcattcggcctcctcctaggtcacatagaatggcccagtagtgacatcagataccccggggttaacactcctaaagaatacgggccactcaggttcccgttcaaatctagaaggtctcctctttgggaccacctttagcaaacatgtccctgagcaccacgtagtttctggagagactttcagccccactccccccacctcccatctccatcatcaggggcacagagtgggagcaggttcagaggaacctgggctgtgaggactcccaccccgagtcctgaggaccctcttctgtaaggtggaggtgtgaactgctcttcttaaagccagttggtcgctcatgagcctctgaacttggaacatgcgcgggtgtaacacagccaatgttcccaggccccgcccacccctgctcctttgtctactgaacttctaggctcctttctgtctttctcctgtgtctacacgtgtgcatgtttgtgggtgcacctgaatgtgttgtgtgagacagaatatcttactaggaaccgggttagagaagtctggctggccatctggccccagggatctttcttcctgtccctgactcccctgcactggaactaccagcctagagtttgtttttgttttggacttacttattttatgtgtgcaattgtctttcctacatgtctgtctgggtaccatgggcatgcgtggtatactcagaggtcagaggaggggcatcagatcccttggaactgaagttaaggatggctgtgagctgtcatgtgggttctggggactgaacccaggtcctctgcaagagcagcaagtgctcttaaccactgagccatgtctacctctgagccatctcttcaggcctgggtatctcacctgaacacggatgctggcgaccaatatcaggtgtcaagcactctaccaatacggtcctttgcacagctaagtcttgattccatgtgatgggtggaatctgtcagggctggaaatatgacttggctgtctctggagaacctactctgactcaatatgagctaactctgggtcatattgctgaaggtggtcttcaagagcagtcctactgggttttaacaggagctgggactcggttttaacaggtgtggggctgggttttctcagctccgtatccactttttgtgtcctgagtggaatgcaggccttggcctcactgaggaaggaagtcaccccatgcctcagggttttttttttttttttttttttttttttttttttttttttggctgtaacacgaagcatttagaattaaaggcttaaaggctctggctgtggtctgagaacgagctaactgggcactgggcagagcagggaaagacagagtccctaccaccctgctggtatcctgagtggggttcatggccaaagaacgcataactgagctcaactgagctggtggtgtctctgggtgataaggaagagtcagcagagagcatagccgccaggcagtctgataagcccctcgaacacattcctggatggagtcaggggcccagcgcgtgtctggggcctggagttttgagtggagggtatgcttaaggcctcgagggacacagaattctgtacgaagggtgtgcaaaggtcccgggagacatggaattccgaggggacagtgtgcaaaggccacgagggacacagaatggagggtgtgcaaaagcccaaagggatatggaattccgagtgggggaagtgcaaagggccccgagggacacggaattttgagtggagggcgttcatggcccagaggctggcccgggctgactgcaactgattttaatgcaggggagcgggaggcattcgcaggagtccggaagaaagaagaggtcgcaggggcgggggtagtggatgcagacggtgccagggtcttctgccctctgtagagggcacatcggttcccacctagaccagcaaccaccaggaaagcccagcagctcggaggggcggcgcccaaaggaagccacgcccacgcctcaccatcagagcaccgcccactccccgcctcttcccacccctcgccggaatcccgcgccgaactcgggggcgggctgcccgggccatggcgcataaagcctctggccacctgcagggctactgctgctccggccaccgccaggcacacaccttgctgctgagggagtctcggcttctgtcatctctgtggcctccgtcacctctgtctccgtctccttcaggtcctgagccccgagagccccttccgcgcacgcggacatgggcggcagctccagggcgcgctgggtggccttggggttgggcgccctggggctgctgtttgctgcgctcggcgttgtcatgatcctcatggtgccctccctcatcaagcagcaggtgctcaaggtgagtgaagtgtcttggggagatgggggttggggatcgggacgcagggtgggacggtggagctacctcctcaccaccagggaggcccaggctcaccccagaggcttggtctgagtcaccagcgtcccaggagcctaaacctcactgaagcagaagtatggcctggttgtccctgagtttcgactgtagctgtcgcgacctccagcccttctgaacgcgccggccggtgactgtacctagtaacctcagagctgcgcgaaacccctgtacatctgtgaggctcccacgggctccagttctttgggtgctctgcctgtttcctcccgcccagatgccccagagatgccctggctcgcccccacactgcctgccagtctccgagagttaagctgctttctgccccccacgctctggcagaggtagacacgactcaggtctgccgaggataggcagcccagcctctcccttgatctcagccttaggccctgttttgccctttcaaccgggcaccgatattaggcgggtggtgccggtccagccacagactctgccctgggatccggtgtccttctatttgagccgggagctcattaagtcctggagattaccgagtaattgtgttttctgagacgcagggttactgcggaaggggaaacgggggctggctctcagggaacatccagttagaactggatctgggatccagaaggggctgttgtcacagggtttgactgacatctttcctcttagcgggtttgtttactgggagtttaagaatggcttcgtgtcccatgtcccatcgcccgctgaaaggagggaatgaatgagggatactccctcttgggctggccgctacctgccaggtcctggcgggtcttcaggatggagccacaggtggctttcctggagttgtggtgggtatttccgagttctcttggccacactgtcatttctcttgcttagaattttcaacccttgtacatgaaggtcccaggagttgccctgtcttgggtagagggaagatccttcttgttggagcatcagaattgctctgggcctttctgttaggtttggcaaagtagtggtgacagccttgtctcagtggcagcctgtggtttcagtaagaacccagccctgtgcactccgcacgtggactgggtttcctgctcagccagcctgtagtgggtagagtgagcagatatcccctgttcttcgatttgggggtgagggggaatctgagctggttccttctcaaactcctttcgggaatgttttcttttgggggttggcacagagactaaggatgggggggggttggtgtgtgtgggcgtgcacgttagcgttgggactgcgcaggcctgctccatcagtcagggtcccatctgcccgtgcttgagaaagaccacgactggcagaattgccccatagctggtagcttggggcttcacgtttgagcgagcggcttccacaatcttacttgtgaaaatcccaaaggcgattggttgggggctgagtggcgtgaaggaaggaagagcctaagacacgcctagcccaaaacagcctcttcttagaggccctggctggaagccgacctcttgagggaggaaaaaaaagttcacttcaggggatggtgggaggatggcagcgaggggagcagggagggaccctggagttgactttggattcttgcgttctgtgctacttgaatggaagccttgtctttgtgtgtgtgtgtgtgtgtgtgtgtgtgtttctttctttcctttttttttttttgtaagttaaagaagttgatttataaaagtcaggaatactaggttgtttaagaaaacaagttcaggacttggggtgtagctcagtggtagagaacttaccttgcattcaacaggccttgggttccaacacacacacacacacctgcattcaacggggttccaacacacacacacacacagagagagagagagagagagagagagatttcactcttattttcttctgatgatatcattttttgacataaattgtgtgtgtgtgtgtgtgtgtgtgtgtgtgtgtgtgtgtaggtcacctgatttcttcccttacagatagggtctcttgatgagctagacagccatccccctgtctctggggttacaggtgcaatcctatcgatgcacaatattgtatatgtcactgggagtttgaactcaggtcctcatgtttgcctagcgtggacatcttttacaaaacccgagttggatagtatgtggttttcttcttttcttcctcctttctttccttcctttcttcttcttttttctcctttctcttgattcgtggtctcactagatagcccaggaactcagtgcatagtccaggctggcctcaaactcagagatccacctacctttgcctcttgagtgttaggattaaaggtctgtctaccatgcctggcttaaatagtatggtttttctgttcagtgttagtattcaaaggggtgtgtgtatgcctgtgtgtgtatgtgtgtatacacgcacacgtgtacacacacatacatgcacgtatactcatgcacctgtatggacgtgcttgccacgcggtgagaccagaggttgaagtgcagtgtcttccacagtgtctctccaccttatttttttgagacaggctctctcattaaatatgaggtgtgccttctctgctagccactgaacaacaggtccctggaatctgcctgtctccgcctgtcctggtactggggttccagacatgtatcagacgtgctcagctatttttttttctgcgtgtccctggccatcctagaactccctctgtaggctctccctgcctcctgagtgctgagactaaaggtataggccaccacccctggctctgtgttgagcttttgtttgggttttgagaatcagaactcagatcctccagcgagcactttacccactgggcgatcttcccagcccctttcaaaggttttgacaggccgaacatgccaagtctgttactgccttttccccccttactgtgctgggattcctttgtttacagttcctctgttgactggccatgtctttgtctcagactccagagaacacatagcgtcctgtgtgagtccaggaacacttgcacggtctgagccttagctgtggacccacaggtgcgctctgtttggaatttggaattctctactattgctcccgctgtcaagctgtgggaccatccacttcgatggcaatgaagtgtcatttctaaaccccatcaccctctttggctacctgtggttttgatttcacatcttcagcgccacaaggttgggcaggaggaacgtgatccccgtgtaggtgacagttttcagagctcaggggctcaggcctactgtaccatgtgctagctggagccggttcatcactcaagagagccaagtttttcccccagcagtgagacaggggtcagatctggtttgctgtccctgagggattagcaagttgcaaaggagattacaagcggcctttggaaatgccctgtgagcttgcctgcttctggactcaatctaaccacggcagcgttgtgaaacaggcagaggctgcgaattcttcctctctacagataagggatctggcccatagcaaaggtcggcagctggttattaaacatggcctgtggtgggctgggagggacttcaagcggccatgctcggtttaccttccatagggaagtaggaagcaagcaagagccctctctttctgtacagtgagctgctgggcagtccaagaaaagaattaagaagggccaggtttcaggaagacatgcatgatagaaaaaaggctctgttactattaaagtccctcttccccagcctcttacccggcatcccagctacttggagtctgaggcaggaggaatgaatattcaaagccggaggaagttcagagcctgcctgggttgcacaggaagctcaggggagcttagtgagacccctgtctttatatcaaatgtaagcaaggtgcattagtgcatatttttaaatcccagcgctcagaaggcagaggcaggcagatctctgagtcaagtcaagtgcctggatagccagggctatagagagagatcctgtctcataaagaaacaaacacacaaataaataacacataaataagtaagtaaataaataaataggtaagtggaaaactgaagatagagctcactgattgatagactgcttcccagtatgtgcacatccctgggttcaatccccagcactgcaaaacataaagagaaacacacacacacacacacacacacacacacacacacacacaccaaaatccctcagccagtcggtggtcgcagcggcggctcatacctttaatcccagcactcgggaggcagagacagagtgatctctgtgtcagccagggttacacagagaaaccctgtctcaagacaaaacaagtcaaccaaccaaccaaacccaaaatgacaagaatgacatcaaaaccctaacagtattctatattttcaacagactcgtgttagtgccaaaatggtttagaaaaaggtgcggaagggtgcgtgccagacacacaaggtagataatgctggctgcacgactctctgtacatttttgttttattttatgtgtaggggtgtttttcctgcatgtacctctgtgcatgcagtgcccttgtagaccagacaggacatcagatcctctggaacttggacttacagatggttgtgagccaccatgagggtgctaggaatttcacgaacccaggtcctgtatcagagcggccagcctggctcttaaccaccgagcaatctccaaaccatcatgattctttttgtaaaatattatgtgtatgtatttgttggtgtgtgagtggaggggtggtgctgcaacatgcctgtgcaggtcatgggacaactttgaggagtgatttctctcctgctcctaagtggggtcctagggatcgaactcaggtcgtcaggctgccgagccgtctcactgagcccaatggttactatcttgtttgtagttctttagggcaaggtttcgttgtattactcaggctttatttgaaatcctcctgcctcagcttcttgttcatcactgttcatcatggaagggagtcagggcaggaactagaacaagggagggacctggaggcaggagctggtgcagagaccatggagggatgctgctacgaactttctctttatgacttgctcagcttgctttcttacagaaccgaggaccaccagctctggggagacccctcccacaataggccacgcccttccccatcaatcactaattaagaaaatgttctacaggcttgcccatcgcccagtctttttttttttaatatttacttatttatttaatgtatatgagtacaccgtagctgtcttcagacacaccagaagagggcgtcagatctcattacagatggttatgaaccaccatgtggttgctgggaattgaactcacgacctctggaagaacagtcagtgctcctaaccactgagccatctctccagcccccccccccccagtcttatggaggaatttgtcttaattgaggttacctcctctcaaatgacaatagactgtgtcaagttgacgcaaagctagccggcataggcagcgtagttgacacaggtccttgtcagttaaggaaacagctgaaaatggtaagaagtaccccgtgactttcttggagtgtgtgtaagtgtcacacggagggaaacccaccagccctggaaaccctgtgtgtctcacctagaacccagcctggcacgcggcttgcccgtccacagggccaccgccttcagcacagagcctcataatctttcccaagtctgggactgtatcagctccactgtcctgacttggcatttcctgttgcactgtgcgtgatctgttcatctgctgatgcctccctcctctgtcccatgtgtcccctaggtgcaaagtggaagcctcaggctgccctcacctgctccgttgttctttctgctacctcatacctgcttcaccattaccttttatgacccctctacccccatggccttactgcctgcttggacccgtgtggtagtctatcctgctcttctagtgagggatggtgcccaccctgctcagactctctaacattcccgtctttttctgagtgaaccccaaattcctctcagcagcttgaaggctcccaatttgtttctctttcccaccctcaattcagcaccccacccccacaccactatgctcctggtttgagcccattagacctagtccctcttcagaggccctggcgtgtccctttggtggcacatgcctttaattcccagcacttggaaggcagagaggtaggtggatctctgagttcaaggccagcctggtctatagagtgggttttatgacagccagggctacacagagaaaccctgtctcaaaacgccctatccccctaaaaaaatgatttatttattattttcagtgttttgtctgtattcacgtgtgtggtgcttgaggagggtcaaaagaggtgtcaggattccctggaactgtgacctgtcatgtgggtgctgggaaccgaactcagattctctatgggtgcagccagtgcttgtaaacctcggagccatccctccagcccaccatccttattctgtcacaggcttggatgtggctcgctctttttcctgattgagaagttggtcagccaggtgaagggctagggagctgactggatgctggccaatagctggctctctacccctccttgcctcaattctaatctgatcccttctcccacagctaggagttgggctagcctgggatatctactctgttcctgagttgttttgtgacctctggcagagcccattggcttgacacttggaaggtgtccctgatggcagatagctccttgtagatagatactgtgttacgatgctcctcagagccttttattaagtatctaaacgactacagttgctctctgcttcatctagggagagggacacaaagagagattaagtaaaacttgtcccctggtgtcccatgtctccccaccccaaccctctacctccgcattccagatttaggtgacagaaccaagatgtagcctctgctaaaagattgtaacccttgaacagctggccttgactggccgttccttctttttctcccttctcttccatcgatgtgcatggctagcgggtgtattccagggttttctcccacaagagaaggctgcagattcagcaccccttggtacctcctcaggaggactcttaagtgggaaggtctgccttttcccagtttgtaccaccctgtgaccttgggatcaaggtctgcctgggccatcgtgggctgctccccaagtggagactggggccccagatgtcaggatgggtgtccctgcaagttccctgttctctgggccctgggtaagaatgcttgggtgtgctgggatttcttctgttttcttcctctttcctgatgcctggtttccggttcccatggcttccggtccccctggcatgtgtggaactattttagttcccttcagggtgcagctgtggctatagactacctatttttagtcccaagcatttatttctgttcctttctggctcctcgtacatccacaagtcctcatagcttcagtgtgtgtgtctgttggtatacacaccttttggtgcgggtccacgtaatagtgtcccccaggtatagtagcacacagacagagcttggtgtatgtatggtccagtgctgacatccatggatgtgagtgtttctgtgtaccgcacgagctacaacctatccacatggagaaaagccaggaaggggatgcaggcacatgggtcattgtctgggcccatgtagacacatgcacatatgttgatgcctgttccatttgctgggggtgggcagtggacatggctgcatggcagaatgatggccttcgaggtgcaagccactgggctccgaccttagcactgcagcagacagaaggggtcacgggcactgcatggtcactgtgtgcagtagttaggtgctggtattttgaagccagactctcctgttgcattcctggaaggaagttaccctgggacccttcctggaaggatggattctttgctatcttcccacagtgactcatcccctcattcgctccaattcctggagttcggctacccggaatcctgttctctggccttggatcccagcagccgactctggggccagtcctggagagagccacttggttctctgcagagcttatcctaggtgcatcttggttcctaggaggcttggcccaggctgccagctgctgtggccttctgtggcttttagggtacagaggagtattcaaatgtccttccttggccagcaaaagagaggccccgggctaccgtgagnnnnnnnnnnnnnnnnnnnnnnnnnnnnnnnnnnnnnnnnnnnnnnnnnnnnnnnnnnnnnnnnnnnnnnnnnnnnnnnnnnnnnnnnnnnnnnnnnnnnnnnnnnnnnnnnnnnnnnnnnnnnnnnnnnnnnnnnnnnnnnnnnnnnnnnnnagaagaaaacatggatgctcttgggtatagtggaggagaaggtttattgtagataaaagggagaacgggagaacatagctagaggcagagaccgctggaagagtccagagtggacatgaccttgaaccctgagctagatgaggggagggggagggaaaaggagaggagagaggggagccaggtgcaactgccaagaaggagggagggcaatcaaaatggttggattatcctggggagagtagcccagccctctgggctatagagttcagggtagggggcagggtatgccagcctgaaggggttctgaaactggtagggactgagggatgctgggacgtggcagccaggtctgctttgatatgttaactagccacctaaaccatttgtgcaaggtttgaaactcaataccttcagtgccagatcctgtgccatcaatttagtttgaggaggatttagcctggcaggggtgggtgggggtgtaggtggggctctgcccaaaatagaaacaggttaggaggctaaagcagggggattgctagttctaggccagcctgggctaccctccccccaaaataaataaaaaaaattccataaaaatgaaaaaccagaaaacaaaaacacttgatccttttacctctctcctctctcctcactctctccctcactggtgaccttggcctccactggcctagggcagggtcaggccaggctgagctacaaagagaaacaacaacaacaaaaaaacccaggtctggctcagcctggctctgagtcccagtggctgaggaggttccatggctgccgagggaagatttccacccctctcctcagatcccggnnnnnnnnnnnnnnnnnnnnnnnnnnnnnnnnnnnnnnnnnnnnnnnnnnnnnnnnnnnnnnnnnnnnnnnnnnnnnnnnnnnnnnnnnnnnnnnnnnnnnnnnnnnnnnnnnnnnnnnnnnnnnnnnnnnnnnnnnnnnnnnnnnnnnnnnnnnnnnnnnnnnnnnnnnnnnnnnnnnnnnnnnnnnnnnnnnnnnnnnnnnnnnnnnnnnnnnnnnnnnnnnnnnnnnnccccaaactgtcccctcctgggccttgacctcaaaggagtctggtgtgccaggtggctcatctttttcctgaccttccccttcaactccaggcctgtcccccttcaccttcctggttagcttggcctgtggtcttctagcttgtggcggcagcaagccacgaccttggcagcggccttccctcgccctctctgcttcccacacgtgagccctggggaagtgagcgtctcccacctttttgtccgtttcccgaggctgacttctgtcattttcttatctggatccttaaattcctttcctctgtctcttgtgttcctcccagctcccagtacagcagccagaaacagaccctaggtccttcccatgtgtcaagaggccagtaccttgccctctgatacctttctggcttgcacaccccaccccttgattcctctcgtgcgtgggctaggtctatagtctaatgtctgacatttccaagtgggactccgctgaggtcaattcagacccaatatgccacactagttacatgtacattgggcttttttccttctgccacgttgtccccatggggagtccccaggctcaggagggcaaggacctctgtggtgtttgttctttgtccccagcgttggaactgatgccagacactgggccttgggttcccaaatgtttacccaaagtggacagggtcgaatcacagggtgttctggtaccctggcactaggaagtcctgtgccaggctagaccatgggtgccgtggtgctactgtcctgccatgggtgatccggctgatccggcacttccccctgtcacagacagagtgctctttcgaagacacagtgctttagtttaaagctgtttcaggatccagctaggtgagatgatgtggatttgatccccagagcccacgtcaaacaagctggtaattccatccctggggaggcagagacaggagactccatggggctcccgggattcattcctgcaacgcaactggggagctccaggctttagaaagaatcgatcttaaaaaaaaagatagatagtgctggagggagcacacctgaggttggattggcctctggcctctacatatatacatacacacacacacacacacacacacacacacagagagagagagggagagagagagacccacacccacagaggcagacagacagacaaacacacacacccagagagacagacagacacacacaaagagccaaacacatacacccacagagacacacacatagagacatacatgcacacagaggcatagagaaagatagacacacacacacacacacagagacggaggagagacatatagagacacacacacacacacacacacacagacacacatacaaagacagacagacagacagacagacacacgcacacactcactcactcttgccccgatccatcagtcctttcttcacaggctccaacctgtctggccagtcagcggttctgttctaagcccacaagtctctctcctcctccattctcacatgcgccggaagttccttctgcccagatacttttccccttggctctttcactcagttcctctcctgtgtttcaaaataaatgacacgtatttgtattttggggtgcttgggagggacacagagaggcactcatactagacaagtgttctcacaccagtacacccaaagcctgtgtggggatgtttttgaagacacttcctggtcccagcttccctgacctcccttgacctttggaagtttccttgcgcccatctctagtgaactcattcctttggttgatgtcctaccaggatggggatctggtgtgttttgtacatagctttactcctgcagtggtggcctggctggggtgggaccctagcagccatcgctgaggtcacaagccttgctgactgcctctgctccattggggggggggggggctgtgcctctgttttgcttttttgtttttgtttttttgtttttgtttttgtttttgtttttttttttttttggtttttcgagacagggtttctctgtgtagccctggctgtcctggaactcactttgtagaccaggttggccttgaactcagaaatctgcctgcctctgcctcccgagtgctgggattaaaggcgtgcgccaccactgcccagcaagggctgtgcctctgtctccagggggctgcctcctgatgccactacctaagcctcagaccatgagcctctgtcccctggatgccatttcttgaagccacctgggtgagttggtgttcatatgtcccagaccacacccactggcccgagtctctggcaggtgaccctagatccagggtctgagtctctgcatgttttctcttgactccagcaacttctcactggtgtctgtgccagggctgctggcttcccccagtaacctcttcctgtcccaccacaaaggcagtggaccagaaggaagagacccagttctcagccatgtcatcgggatggctgtgggcggtggataaataaatcacacctgtcttagccaagggcgggagagaccaggaggtggggtgcaggtttgcaatgcacggccttcgggagtgaacgggagtcttcagcagccttggtttgacgtggtccgtgtacagtcctccgcaggggacaagtttaggtttatgaataaagcgaagtcacttcctccccggagttccagataacctgccccagtgcgggatgcagtgcgggatgcagtgcggggtgcagtggacagctgctttctcctgccagtgatctatatagaaggacctgggaggtgtggctcacaggtgcgaagaacaaaaataaactgggtgccattacacacctgtaatcctggcattccagaggcgaaaacaagagaaccaggtgttaagtcatcctgactacagagggaattggaggccagccctggctaaagaggctgtctaaagggttcagtgagtaatgcttgccaccaagcctgttgattggcgttcgatcctgggacccacacagtggaagaaaagaacaggctctttcaagttgtcctctgaccgctgtgggtgtacctcaggcacattcacactcctcacacatacactcaaataacaaatgcaaaaaacaataacaaatgcaaagcaatgacgttaagggctgggagaagggggcggggcttggggctgtccattgcctctgattggcttaggtcacatgctcatgtttgagccaatcagtgtgtgtcaagaaagctttctttggaaagaggcgctctctctgaggactcaggaggggatggagcgatgttctatgggttggcaggaggcaagggagacaggtagccagagtaaggacagaacccttggcccctagttagcaccggatcaccccaggttccgctcgctgcctcttatgtacgtacatgggtgctttttttgacgctggctccaggcttttttgattggggaggcagcgcgccagggtaaattttataaatcttaggttgttgggtcttcaagtacttacttgggtttctctctttttattttatttcattcttatcctcattgttattttggttttttgaaacagggtttctctatgtagtcctggctggcctggaacttactttgtagaccaggctgtcctcgaactcatagagatccatctgcctctacctccctcctgagtgctaggattagagtatttcaccacgcccagattttgctacgggctacggctgcttctgcttctccttcctatttattattattattattattattattattattattattattatttgaggcaggggctcacactgtagcccaggctggcctcacacttttggcaatccttctgcctctgcttcccaaatcctgggagtaaagacatgtgccgtagtgcctggcccatctttttgtttgttaaaatcacatgtttgtttatttgtgtgtattgtggagggtaggggtgccatatgtgtactacacatgtgtagagggcagaggacaacttgcaagagtcagttttcttcttctaccattatgcatggggttgaactcaggcaggcttggctgctggggctttattggctaagtcatctctcctgccctcatgcttttgtttttgtttttattttgtttcttgagactgggtttctctgtgtagccctgactgtcttagaactcaatcagtagaccaggctggcctcgaactcacagagatctgtctgcctctgcctcccaagtgctggaattaaatgtgtgtgccatcaccgcccagcttagcgcctgtgttttatttttctctttaaggacccagatctcagagggagctgtgatctgttcaaggccatagttggtagccagtgttagctggtcgtgggccaggttaactgccaggctggccggggaagtggggtgctgggctagggaaagataagagatctcggtaagtgagggctagtcatgttgttttctggtgacttcgggcagtctcccagctccctcccacctacctcttctttgctctcatctgactgtaggagtgggaggaggtgttttgataaagtaggagagatgtcaggacccggtataccaaagttcaagctctatgcgccttctctgaggctctgagtgcgccgtaggatgcaaacagcgagaaccagcccaagcctccgcgcccttcactacactcggcatcaggctcagatgcagaggaggtaatctgctctggacgtgttctgcaatatagctcaggagtcggctcacgccccagacagagcagctgttggctcttacccaagactctgaggtacgccatgtccttctggagcagtatggggactgaagctgagcttctgctagtgtctctttgtaagccgagctgggctctctggctacccacatgtttgccgtctgcctggaggagaggtgggaggtgagtgtgttcctggagggtcactgccaaggttgtaaacccattggaaagtctctgggcttgagccttgcgggggatggctctgccaattccctgctgggtaacctcgggcaagtgccttaattcctctgtgccttttcaccgtgttcttaatagtgtcctgtgtctgaggagatcatacctgttaaacacctagaataacaagctgctgagtatcgctcagtatgctgatgcacacatcctcggggacctgtcatcaatgcttgcaactgacttctcttctacatcctgctctgagatgtcacagggcatgctcatggcacacccagctttcccaccagccttaagagtggctggggatgtctcaagactgattctgcagttgcccaagtaccttgctggctagccatgtcccagtaaactcagccaccggctgttctccctccccacgtctaggtttttcttttaaaaattattgttttggaaaaatcgctgacacaatgggacagtgggtcacattggcactcacccaaacctcttggccctgcagagaatgtgcgtagacctctgttagagtcaaggtcacttatcctcctgcccacagcctgcagctacaggctggcccctgtgtgtgaggcctctgcctccagctctgtcctttttccattcaaatctgtcttacttattttctgccagggtaggaactgaacctggggtctcctgcttgatgtgccatatccccagtcctttctccttaaaaacctttttacacttatttatttaaagatttttttttaaattatgtgtctttgtgtgggtatgtgcacatgagtgcaggtgcctgtggaggccacatgaaggcgccagatcccctggagcaagagttctagtgagccacctgactatagggtactggaaatggaacttagggtctctgcaatagcactccatgcttttaactgctaagcggtctctctggcccttatttttgtttgtttgtttgtttgtttgtatagcgattagaggacatccctagtttgtcagttcccttttctgtcatgttgacagcaagcacctttacttgctgagccattttgaaagcccaactctttcctaatattattattaaagttagtctcactaagtgtcccaggctagccttggatgttcagtcctcctgctttagcctggggtggcaggcttgcccacagagtccatatttggttgtagctgttaagtttagaggtttgtcctgtgtggatctccttcctcctatcagtggtacaaccaggcctctcttgccacctgttctgcaagccttgtttcccaggagctgatggccaccttctaggcagggcgccctggttgtggttgctatgtgctcttcccacagaccctgcacataaactgcctagggttatcctggctgagcaggcagtgcgagcagcggggcttagagtttcttgcaccagcttctgcttgagtttcctggctttcccagccccacctccatgttcggagaggtgttgatccctctgacgaccaggctgaggccagctcagggctcccacccacccttgcagctgtaggagtcctggcatgtcagagctggccttctggagttggaggcccaggaaggtgggacctgggggctcatcctgctctgctccctaccgccaccccaacccccatcctgacctctgagccctgcagaaattctaagccctggccctggtcccctcatctggcctcttagcccaggaggctcccctgggctgagagcccatcttagccagtgctccattgtagctggggtcctgaccggcgctggcctcgggatctccttctcctgtctgttcccagccctcactgtgcctcttgcgcttcctttcttattattgtgaaatagtacaaagttctaacaaaggtcataatacacatccgtcaggttaaatcagccccaggtgaaaagatggagcctcatggtcccgaggccctgctggagggagccaccacccttgggtgctccttgccttttgtagaaccatccctatatatccgacttggtctggttttgaacttcctttagtgtctacaaactctgactttattgctgtggcattttgctttcgttgctttgtttgtttgtttgtttggagaccaagcctgctctgtagctcagactaacctggtatcagtctttctgtctcagtctctggcatgcaaggcccacagatgcgcaccgccaagcctgaccacatttgcatcctggctgtggcccgtttttttcaagttcatctatgtaatagcgtatacctgtgcctcctaactctctgtgactggacaatgttttgtgtgtgtgtgcggtttttaatggtatagatgtcacattgtgtttatctgtctttagccggtggcagcaggtagctagtggctcttgtgggtgtggggagcgtggtgctgtggggtgtggacacatgctcacttgtcatgtcctctctctctccttccctgtctcctcctgtcagtgtctccctctgtggctcatcctctctctggcttcgatcttgagtacgttcttccatctgcttcagtcccatccatccacatcactgtgggtgagagcttacgttccgaggccttgggctggggtccaggtgttggctcagccttctcccagctatgtgacctagtgccgttggctcacctctctgccttaggtgacttgctttaccaggccatcatcgtgaaaggccatcagctgtgtgacttaagcaacatccgcttcctttctggctcttctggaggctgcatgcccttggctgccatggctgctcctgctgtctagcttgcagccactgcctgcctttccctgtctccctgctgctatcctcagtatctctctcctagctcttcttgctgtagactccggtcacaccgcatcagggaccatcctgactaatttattgcctcctttttttttttaacctactgtggccccatcatgggctctgaatccagtacattccaatacagtttgaggcatgggggtggggtagacaggtgggagtggttcggcacctggaacgcttcaggcaatgacgctatgtggacaccttgaaatcagagtctctgtgattagtggctgggacccttgaaagactgggtcttgtgggaatgaagaggtgccctggagtagccatgcagtaagcagttgctagggatggggtggggtcacacagctgcctttgagtcatccgtgcttctataagtgaccccagtatcattgctgcaccccatctgatgggccagaatctcctcttaggtcaggtgtcactttggggtgaatagaaagagtctcaaggaaaaatcacacaagaacagggggtttgctgggcagtggtggtggcgcacgcctttaatcccagcacttgggaggcagaggcaggtggatttcagagttcgaggccagcctggtctacagagtgagttccaggacaggcagggctatacagagaaaccctgtctcaaaaaaccaccccccccaaaaaaaaacccaaaaaaaaaccccagggggttttatgtttattttgtttatgtatttacttgtgtgtgtacgtgcacatgtatgtttgtgtgtgtgtgcatgagtttttgcgtatgcacgagtgtgtgtgtgtgtgtgtgtgtgtgcatacagacctacagacccaaagatgacatcaggtgtcttctttttctgtcattttctgtgggaataaaggtagattctagtattctggttacagtgtccagggaggtggtggcatatcccagcactggccaatcacttagccaggtgttaccatcttatctgggttgtccgtgtgcatatctggctcctggctccttgctgttgcctggtctccctgtttaatgtctgtgagagcttgtctgttaccatggtgacagatgccctggtttttccaactctatcaaccatatacagcatacgcaacacacttcctgggacctgccacattgggtggcttcagattggtccctgggatgtttgagtaggcagctggctgcctactgttagcaggctggttacacaagtgtccattcaccctctcagagttctgtgtgaccagccttcttgaagaagacgacctgtgggtgtttcagtttgcatttctgaggtgtgtgtgtgtgtgtgtgtgtgtgtgtgtgagcatacatctatgagtgtgtgtatatgtgtaggtgggtgcatttctgtgtacttgtggataccagagtctaggttgggtgttctcccccatgattctcaagtttgcatgtttgtttattctgaggcaagctcttattgtgtagtgtaggctgaccaggaactcactgtgtagatcaggctagcctcggaactcactatgtagatcaggctagcctcgaacttacagagatgcacctgccttttcctcctaagtgctgggattaatggcatgcaccaccacacttgatcgtaaattatgtgtgtgtatataaattatatatttatataaatctacaaaatgtatactatatttatgttatatatatttatatatataagtaaatgtatatttggtggtgccggagtttgagcccagagcttcgtaggtgctagttaagctctctgccactctcctacctcccatgccagtttatttatttatttatttatttatttattatttatagatttatctttagatttatttattttatgtaagtacactgtagctgtcttcagacactccagaagagggcgtcagatctcattacggatgggtgtgagccatgtggttgctgggatttgaactcaggaccttcagaagggcagtcagtgctcttacccgctgagccacctctccagccctgccagtttatttttgactcagggtctctcactgaatctggagcttgctgattgtctagactgtctgaccatcaagcttcaggaaccctcctttctccactgatcccaatgcccagagtgctgtagttatagacctgtatgtctgggtttgatgacccacttggctttttcatgggtgctggggcgagggtccgcactcgggtcctcagcttgaacggctggtacttgtgtctagagccgtctgtgcagcctgctgagcctcgctggcttgtgagtaaggctctgagaacttgaaggactttaacaggctaacctgaggtttgggcttcacttcttcagagcatttgtgttgcgctgagcatgtggctcactttgtagctgcttgcctggcacacacgaggccccgggggcagcccccaggaccccatgaactttatatgatggtccctatctgtcatctcagattctgcttggctactctagggagtaggaagccaatctgggctagagagacactggcccccaaaaaggaatctgtgatgaaggtcatggggctcaggagtgtctgcatcttgcctgggatgacagtttgatagaggccagcagaaacgtcccgccaagggctagaggccaaggacgagtctgtcccatcaccagagctgaaatcagggtgtgtttctttcagtggtggtgccccagcctcctagagaggcctgtgttagtcacctaggtctaaacttgtgtccttaagccgtgggaacttcatggctaggctgggcgcttctagtgtcttgagggctcttggctctctccattcctggaggtgttcaccgttcctcagttgacggcatcaatgctcctgtttctgtctctatctctgtctcaacgtggcctcctctgtattttccatttcctcttcaaaactgagttattagtattatttatgtgtatgtgcatatgcctgcatgagtttatgtgcatagcatgcgtgcttggtccccatgaaggccggaggacatcagagcccctggacctggagttacagatagtgtgagccaccacgtagctgctgggaaccgaacaccgatgcctgcatccatcgagccatctttccagctcccctgctcttctttgagacccaacctaagaccaaacactttgacattcattcctattttgagttaagagtctcaccgtgcagcccaggcaggctttaaattcacaatcctcctgcctcagcttcccaagtgctgaagtgacaggcctgtgccactgcgctgatctgatatttttaacttgacatctggccagaccctatttccgattaaggtcacacagggcacagtcaagtatcttaggatcaccacctacatagatgcatggcagagtaccttttgcccagacagcccctactgtgaaaataaactacaggacaaaaatcaccagtctgtcctgatagcgggctctcagcacttgaaggtaggaagcaagaggatcagaagttcaaggtcatctctgctaatagtgagtttgaagccagtccagaggggaatgaccctctgggaagacaaaggtgacatgacactcgcgtcccccagcgtcccaagcacagaggtaactttggttcatggctctttgttccttgctgcaaaaaacatgtttgtgtttagaagagcccctccctgccctccctgtcctccctctcctggcccccggtacccgtgcgcacttcctgcactttgcagtctcggattgggcactcagatggctctgggtctcccccttctttccagagcgctggagggatcagccgtgtttcccatcagccaaggccgcggggaatggctgtgcattcaatagcatgtctctgggaaattgggcctattccagcaccatcttcccgtgtcttccggagctttctcaggagatatatttgtttctacagacgccactaattactcctggctgggtgcctggaaatcacatctgtggattaaggtgccaccagatctgagcttcctctagggccccaggagtcctgacatatcccccattcagcatacttgctcgcttgcttgcttgagctcagtttgatttctccactcatacagcccaggaccccttgcctagggaatggggccgccaatggtggactaggtcttctcaggtcagataagctaatcatttagacaatccccacaggccaatccaaatgtaggcaggccgtccttcactgagaccctcttcccaggggaatctacgttgtgtcaggttgccagagctaaccgctgcaaggttataattttaaaggacaagacacatcattgggcgtgcttagctcaaagttgtggcttaagtacgtaaaagagtaaaggttaatcaacacagaatttggtccccgaagtcacttgccgtgtttagtcaccctcagagcttcacagtaagaacttttctcaaagaaaaaaaaaaaaaaaaacagccgggcagtggtgtcgcatgtctttaatcccagcacttgagaggctcatatttctgagttcaaggccagcctggtctaccctccaggtaccatgctgtgtgaggtccaggcaagctcaccagatccagatccgctcccatctactgaggtccactcaaggcattttctgcaagtggaggctcacaggcactgaggtagaggtacccgtgtgaggccagatgagtgaaccttgactcaaatccccatgtccaggaacttgctgtgcatcaagatggcaggatttatgtggcagcccctggcagagctgtccccttaaggatcttgatctttagaccatctcctctctggatggtcatctctggtgtgtggctgagggcaagaacttgattccttgcgcctttggtttcctgcttgtcagtggggctggggctgagagagataaatgggtatcattggggaatcagagaggtgttgccgggatcggatccagctgctggctggcatgggtagcaaggtggccaattcaaatcgacagtgaagagggccagagagacggctcatcacggggaagggttcttgctgctaagcctagtaaccggaattggatctctggaacccacatggtggaaggacagacagactcctataagttatctatcctctggcttccacacgtgtgctgtggtgcatctgtgcctgtgcacataataaataaatacacaaataagtaaatgtgatttaaaaaaataattgaaagggtctaagaagtgtcctgtgttttctgtaattctccactaagtttatggccgatggccgtatggagtagaatggaggaggcgggcccaggtctagcttccgactcagtcagggtctcatctcccaaggactcagtttcccggtctgcagagtggttggtgttaattcctgtatccagttgtcaggacttaggggtcagcccacctacctataaggctgttgtctggggtgggagtcattgatgatgatgaaggtgtccccggggacctctcacacaaggggacgagtcaaagaaaggtgaggagaagaggccagccagggaaatggccatggctgtgggcgggaggctgcagtggactgagcagcctggccttcgaggtctccccacagctgaccttcccagtctgggctttcatggtgtgtggtccaggagcagataagtggaccgagctatcagcagtcagggtcaccgagtcctcatgtggaagtggaggcgggggagaaggggaagggagatatagaatgggctttgtttcaaggtagaggccaatggagagccattgtggaagaaccctatatgtatagcctggcctcagagagtgccattgccccctacccagacccacagcggggtctagctgagctctggctgaaaaaaaaaaccaaaaccccccaaacaacaataacaacacaaaacctgtgggattggaaggtgcctgtctcctagcagctgggatacccacaaactccagctctaagtgtcgatttaagacacttggtgccttaagtcacctccaggtgtctttcagtcccaccaaaaccttggggattattgatctggcagatgggacagacacagaggagcagggtagagaggaggaggagtctgaggctcttctggggaagcaggtgttccctcttcctgttgagctgactgccccgttgcatgctgggcccctcccaggccctggagttgcatggtgggcagagaaacagggtcttgatggactgtctgcaggacttgacacctgcacaagaggggcagtgtgactggcctgtggtgagtgtggctaacaaggccactggtgagggaggggcctctggtgctgaggagaagcaggcccctctgagggccaggcaaggagcatttccacctgacagaaaacgaaatgagtatccgaagtagtttacaggtggtgagagccctggagcagatagatgctcaggacacctgtcactgggctgcaggttgctgaaggtcaaaggtcgtgcaaacccacaaggacagcctctgttgaacttagtaggtcgtaggtgatgttgctggtactgtaaaagggtgcagctgccatgagaagctggtgtcaggtcactgtcccgtgcagccgtcctcctggggagtctggacaccacacaacagctgaaggtagaagggtcccaatacttagtgatgctggatgggcagataggaaaagcagatgaaatacagagaggtgagctggagagggtttcagaggtcaggagctcacatggctcttccaaaggaccagagttcagttccctgcacccacatcaggcgagtcacagctacttgtaatatcagctccaggagatctgacacccttctgggagcctctttagggactgtgctcatgtgcacagagcaacacacacattaataaaattaagattaaatcttcagaaatgaaaagagggctctccaagagggaatagtatgcagccgtataaaggaagagagagattccatttatttatttatttatttatttatctatctatctatctggagacagggtttcattatatagtccccaggtaaatagttcaaactcgtggtcctcctgcctcagctttaaagtcctgcgatagctgctgcagaggagagaattctcccacacactggaacatggatgaatgctgaagttagattctgagagacggcaggatggttgcagcgtgatttcgtttactggggcccctagagtacctattgatgaggttggagaaatgggacactaaggaggtagtgggaggggaaaggggccagggagagtgttaagtggagacagggtctcagaaggacatggaagggcgtggccattggtggggacagttgcccaagccatgggtgtacttaacaccatcagaatggatgctataaaatggcactgcctttaatcctagcagtggaagcagaggcaggcagatctctgagttcaagaccagcttggtctacagatggcgttccaagacagctgaggctacagagaaaccatgtctggggttgggggcttggggggagagtgacaaaacaaaacccaagtctggagactttagcatgataaaaatgaataaatcattatggctgatgtcccctgaagggacatgggtcacagccctccttactctggtttgtaaaagggggacccagtggccatagtgactatgttccagcctgatgagtgtcttagaaaaaacccagttccctggaaatatggccctgagctgatagctgatgctggctgccactgcccttcctctgaggtttggcagggctctgggattgttcttgaaccccagccagtctacagctggaggctctgtgatatgtcttccttgaagtgtctgggagttggtatcttcctagggacagccttgtgccccaggctattgcatgcagtgccactggaaggagccctaaggggaccaggcaacagcctggggattaggctgtagagacctgaggatggggcccctggccaaccccaacggccttgtgtggcactggctcaatggagaactcacacgtttctaatgtctgtagctgctactgaaagcattctctagaagtctcccaaagacttctcactcagtctaaagtcagggctaccttccctgtatggttgggctctacccaacaggtgaaccacatgtgtttctagaggggtaggaggcagagaggccttgggtgggcaacaaggtaatctgcttctgtgtcaatttcttatctggcatgtggctgtcgagaagcagagatcggaggatcatgggcatgagctatacactgaggtccaggctagcctgggtgacataacctgtcagaaaaactacaagaaaagattcgcattcaccatctggcttggaccttggttaagtgataaccattgtcattagcctgacacttaggcgccaggatcaagaaacaagaactcccagaatcctttggggcaccagaaagcctttcattttgagacaggctctggctgtgtctctggctctcgtggaagtcacacagcaatccctttgccttagcctaagtgcagagattgtagacgtgagttatactagcctcctctgcatggattggcttgacctaaactgagctgggctctccatcgacttgcttctgcgatttcagagtggcagcctgacctagctctgcagtggcttggtgcagctcagcctgaggctggtgagatgcttacaagtcatagctggttgctgcttggtgctggtggtcatgttatgagcaaactggtccctggtcagtgggctccggattagggctgtgatggaggcctctaggaatctcgctaagtctctcactggttgttttcatctctctgagcgatgtgtaggattgagtgacagatggcagataattgggagtgggtgacaggcttcagtattctactttaatggctgttacccggtgatgccagcataggcgtctgatgctctgagtacttcctctcatgtccctgagtcatgcagacttaggaggcctcttctccactcacaaccgtttccctgagggcagaatccagttcggttaactttgcttcgtagtactaaataccagtttggggcctcgacagtgcgggggagtggggcaggttagaatgaaaaaaaaaggagcaaacaggttcattaacagctaaatgaatgaatgactgatgaaaggatgaatgaatgaagtgttctcagcctatgctgttctgggtcagggctgagtgggaatgtcaaagggtgtggccactatgtgagccatggagttggggttagagggaaggctgcctgtgggctgcaccagtgttgggatgcaacccttgttgggcagcacctagttttccaaagggagtcagaaacgaggcttttgagactaaccttggttatgtctgacagggtttgggggtggggtgggcacatagacactcttgctttttgtttgtttccttttcttttctggggagtgtgtggtgtcaacttgacagggtctagaatcaccttggagacaaatctctggatgtgtctgtgatggagccaccctaactgctggagcagagaaaaaggagaaagatcctagcagtcattctcccctccctgcttcctgactgtggacacagcctggcaagctgcccctggcttcttcctctattgcctttccaccaagatggactgcggctttgatcagtgagccagattagccttccttaagctgcttctgtcctacgtatgtatgtatgtatgtatgtatgcatgtatgtatgtatgtagcaagccaggggcctgtgcacataccacacaagtgctccaatgttagcatttggcccttgagacttgagcgttggagtttctatcgagtctgggaaaattactgcacaccagaagcctgttaaacagtaacaggccccagagcgagagccaacctcacacgcctcccgtaagcttctcccactgacagctgtctgtgggccagacacggttgatatgcgcacctgctccctggtcagcatggtaggggttctcctctgagggactttattggggtagcccttgggagcagaaggaatatggtccggggattgacatacacataggtgcccacgtgtttgcgtccagtccagtccaaccagggagcttcctaagaaccctggagtggctctcactccacttgtctccagggaaactcactaggtcctgatgttgccctagaggatgctgggaccttctgatggagccaccttagccctctttcctggggctctgacttttatagctgggcaggctctctgctttgtcaagctggggtcaaagtgaggtcacaaggcttataccttgaggacacctttctacttctgtccctaagatgtatctgcctgctctggtgtgtcaccggagcagaaaccagtttccccatagcccgagggactcaccggccacaccctttgatgtctaggggtcatttgaggatgagattatgcatctcccagccactcaatcggatgtcggcttcacccttgtgtattaagctactgtagcaaaacccttgaaaacatttatggataaccagcgggcaggtgctggcgtttccccaggatgtacagtgaacaggtacttagctctagcaggcaaaccatggcgccgatacagttccaccgacgtcgtgcatgcattctggttgccccagagccttgccaacacttgtgattatcaatccctctcgttttggctgtgttggtatacgtcatagagattcttgtgaatttgggggatatgtccagagttggggggggctttatgatgtcacaggccaccagtctttatgctctgtcatcctttgggtatggttttcagtctcaaagctttcccatgatccaaggtagctctgtagctctctccatcaggaccgaatttctgggtgggggtggcgggtgtttcactgaaaccaccagaacttttagtgtggtgggaggggctgctgttacaaagattggtcctgtccattttcttttttctttttttaagatttatttatttattacatgtaagtatactgtaggtgtcttcagacacctacagtatgcatagggcatcagatctcattacggatggttgtgagccaccttgtggttgctgggatttgaactcaggacctttggaagagcagtcagtgctcttaactgctgagccatctctccagcccttgtccattttcttccctgctgtggtttaggcctagcacacagcctcttgtgcactgggtgctcagcagaggcctcgtggatgccaggaactgaacccaggtcctttgtaagagcagccagtgctcctaaccactgagccatctctccagccattcctggtgtgttcctggtgtgtggtgtcttcatgccctaggctggattgtcctttggggcccatccttcctgtatacatagtaactctacagggctagtacattgggactggctggctggctcagagctgacaggatatgtgtctcaacccagatccagggctggtgaacccagtggcaatgaccagaactgtttcctctccctcctcctcctccctctcctcctcctccttttcttcttcttcctcttctctccttcctcttcctcctcctcttgtttggagatagggtttctttctgcatccctagctgccctggtagaccaccaggttagccttgaacacagagatccacctgcttctgcctcctaagagttggattaaaggtgtgagccgacctctgtcagcctggctcaaaaacctgcttttttttttgaacctgaaatgtgtttgctgtgattcttgggggaggagggactggattttgcaatttcccaggtcagattaatgattgctttgcgagggctgcagcacctgagctgagccacactgagcagggcctggagaggctaggtacagtgtcctggagatcctgtgcagtcctgtgtggggatagaggctgggggagcttccatctctgtgatcttcatgaaccagaggcctctgagcctgatgcctgtgggatatatggtcagagagttaaagaggtgtagtgaccagaagtgtcctgttacccacacagagggtctgttgggtccctagcacctcatgtggcggccttgatcagctccagctgcctttttgtttgtttttcttttgaatggagcctctgatgtccaagtgtgttcggttcctgcagactgacctatatcctggccatcagagaacccgctaacccccggattatggtgctcactcccagtttggcttgcccagaccccacctcagactcaaagcctttgtttctctgatgcccagccaccctacccaatccctctctggaaggcagatggcttattctgtgcttattctgtacccaggtcactgctgccaagcacatgcctagtatgtactggggtcgtgggggagcaggggtccaagcaaatgatcagaatgctcacagacctttgtggtgtggagcatggagattgctccagttttcctgtctctcgggcacttggtgtgcattttggacatccccaaggcttgcagaatggagtcgaggtagcgtatggctccccacggaaggaggaaacctcagtgcattagtctgtcggtattgctgtaatgaaagacacaggcttggtgttagcatcacatctgatggggccacttcatgttgttgcgaactgcttggagcagctatgagccgagagattacagtggggaagccagaaggcaaagaaagtctgcaccatccccaccaccaatccccagccctttcccagtggggctaagcctcctgagggtcccctcccaaggcttcatgtcagagaccaagtctccaactgccaccgaaagcacgagaataaagtgtttgcagagcagacatttttaaggtaatgatctggtgggccaatgagtgtcctttagagaagacagaaaagaatgtgcagcggagaggaggggacagagaagcaggggtgggagccaagaggctgtacgaggctgagaggctcaccgctggagctcagggatgctttggtgacagctggcccaggaagctggtgcttggtaaggctccccacgtgggagctgtggtcatttattttagaaatataaatgtgtgtgtgtatgtgtgtgtgtgtgtatatctgtgcacatgtgcatactcggtgacttaggaggccagaggatgatgtcatatcccatggaactagagttacagatggttgtgagccaccaagtgggtcctgggatttgaacctgggtcctctggaagaacccagccaatgctctaaccaatgaaccacctcactttgttgttcaaaggcagggtctctcactaggatgtgagtctcgccatttttaggctagcctggctggccagcaagccctgggcattatcccgctgtctccacctctccagagctgggatcacaagcatacaccaccatgcctggctttgtatgggggccaaactcggctccttccacttatgaagcaagcactttatggctgagccatctccctagaattccaaactctgttctcaagaacacactatgtcaaaggtgcccacaggatgctgggggtttgtttcctacaatgatggattatggcgctccagaattggcttgggctccttcctccaagtcctctgaggtccttccaggtgcctggcactgctcagagttcacggatccagcatgagcatcattggtggggtttatggcctggcagagagacgtgagcacaatacacaggatgagtcattaacgtaatcgggaagaaggcagggagagcctcggaataaacaagagtttaagagggagcccagggctcggggtgggctctgtgggggttcctgagcacagacacaggatcccaggaggcttcctctgcaaacatggaaggcagaagaagcgacgaccagtgcaagggcctggtgggtgagagtgtgtgaacaggcaaggcagagtaagcatgccaggctggtctaaaggactaatgggggtatcagtaagacacagccctagagatgccactgagccagatgggcaaaggcttataggtcagtgttagcatggtaaaatttacaataaataaataaacaaacaatccatttggtttggggatggccatacatatgccagggtgcatgtagaagacacagaacaatgtcttggagtcttctgttctgttgtgtgggtcctggggatccagctctggtccttaggcttggtgattaagctcctttattttgcaggccacaatctgaaagatgctgggccctgggcttcagataggggaaggccactccccacaggcattccattccccactctggtggctgtacatgaggtacctcgtggttcagcctcccgcaacaccccaaccacctgcttgcagagggaaccgcccatcaccccatggttttcagtgagattctgcctagtcctctgtgccaaaaaagccaagcagaatctttggggaggctgcctttcctgctctcctgagagttctctgggtggcgaagggagacaatctgtctgagatgaggaccttcgggcgctctccaccgctctgttggcctctcaaaccttgagaatccctccggggcagagttttcaaactgggatgttatctttctgatatcggttgtgacatccctggggtgtgtgggcaactgatgtttaaaacatggcgggagtgtgctggtgatgatggggtgataaagaaatggctcagaggttatgaggagtatgtctcatctcacacacacacacacacacacacacacacacacacacaatacacacacacacacacgcgcacgcacatttgagtgtggggtgctaggaactgaattcagtctcctggaacagcctcaagtgcttttaaccactaagccagctccccacccccaccccacccccgcaaattaaaaacaagcaaatatataaaagtctaaaacacagtgtgagccaggtgtaatgataccccaggctccctataatctggacattgaagaggcggaggcagaaagatcaggagtttcagagtcatcctcagctacatatcaaatcagaaatcctggagttggggtggaaatcattttgtactggagaggttgccctgggtggcaggcagcatttgggagctggtattcggggtgttgtcccaggtagaggctccgcagagccatagggcactgcacagatatgatctatgttagaagtgcacacaagtacccgctggctgcccgggctgtgtacctcacccatgccctcacttatttagcttcagcttcctattgcagtgttctggggaagtatagtctacttgactttacagctgaccttttaaaaatgatgggtgcatttcagtttcggtattcaatggagggcgcagcaagatggctcagtgggtgaaggcacttgctgccaagcctaatggcctgagttcgatccctggggcccatatggtggaaggagggagaactgtcctctgacctccacacatgcaccctggcgtaagcaaacccacacacatacccatatacacaaataagtaactgcagagattaaaagaatataaaaacctttattgagacacgccagccttgtttattctggaatttctcacagtaggactcacaacgccctgtgcatatttccttctgtattctctcccccagtagtatactgagtccttccccttcccctccctttttctttttgagatggtcttacgtagcccaggctagccctgaattcactatgtagctgaggatggcctgggactcctgctcctcctgcctgtgcttctggagggctggggtggcagaggtgggcactgtgcccactttgttcagggctggggatggatctaatttaatccaccaggtcacacacacacgagtggagccatgagcacccgtgggacttgtctcgtgttggcagaggcaggttggtaatctcccagcagctccacagatgtttcctagagtctcggtttataaacactcctgtcatgggtggacacggagccccgcacgcttgctcggcaggccagcctttgctggaacaccctcctgggaccttttcctggcaaagcctgttttgtctttgttttgtcctcttgctgttgtgaagcgggtgattgccatgcagcaaggctggcctcagaaagccagtcaaccctctgccttagctgcctgagcgctaaagtgactggcgtgtgctccaacagcgtgcaccccgagagccagctcttaatttttttttttttttagttttccaccatgtgttgatttggttgtggtggtagggattgaacccagggccttgcacgggctgggtaagctcttttccactgagctgcatctatgtcttctcttcttttaaatgtaaaatcgtttattcagtctttgagaaccacaacattcatacaacgtatttcaatgatacacgcttgctactcctcccagatccccctacaggccactcctgattttatatccattttggttttggttttggttttgttcaccccttcgagacaggatctcactagatagtgctggctggtcttaaactcacatagatccttgtgcctctgcctcccaagcgttggaagtaaagtcacgtgccaccacagccagtactttcttcttgtcttttctttttcccccttatttacccactcaatccaattgctgtggcccatatacatattgtaggggcagttttacactgtgtggcagtaagcaaaatagtagttctggggtcatgggggaacagcacccccagagcctgtctcagccatttgattctcagccagatttatagtatcgggcatgtttttcgtcctatggagaaggccttaaatccagtcagagagtattggctaaacccataatatccgtgccactaatgcgtccgtgggcagatcttaccaggctgataagctgcagggtagtttgcaggagtcacagctgcctaagggtgccagggtcttgaaatgcctctctgtttttgccagatgttcaggctgtgggtgaccaacggaaggtgcggcaggacatctcttaggtggactcagcaggggatttttctttcagtgggtcccgaggaggacaggccagacccagccatggctttcatgactccggccttgcagtactcaaggacaaaccccaggcccagagagccaagctaggcctgagagagtgtggcccagtgtccgcctgcctcggagtctactctgacgtggggctgggcttgacctgccagttctggcttgccacctcccctggagcctctgcctgttgtttctggctgtttggggacagtggggtggttgtctttgtcctggcaggtcgagttcaaagtcaaagctgtttggcttttggacactgctatctctgatgagctgggggtggtgactcttagctctgtggcattagcagaggtcccaggtcagggaatggtccacctcttcctcctagccttggagaaaatcagtagttctgttttgagacagagtgtctcattcactgtgtatcccaggctgacctcaaagttaccatctaactccttcagtgtcccaagtgctaggatgacagccctgcatgactggacccagggctgcctgcacactaggcaatcactaagccccgcccccggtcctgcttactgtcttctgtccctcactgctggtgactcaagaatcatcctcttccctctccctgctcctcagtacatcacacagcactggctctgcccccgctccacccccccccacccccacccccccacccggtgcataaagcccttgtcttcccgatttggtaaaagcttcacgggactggagacagccagcctgtctacttcccactcctgtctgctactgcgggaacctcatctgtcaaaaatgaatgaatgagtgaccaaatgaatgaatgaagaaaagaacaaaagaatgcgggagtaaatgtgaaatgatcagtgaataatgaatgaatgaacgaacgaacggctttctggatgagttattgactgaaagaatggagagacagccacctgtgcagagctccagccctaggagcacctccctcgatgagcactacctagccagtgttctgttttgctgtgaagagagaccacaacgaagacaactctgtattataaagcatttaactgggggcttgtttacagtttcagaggcttagtccgttatcctcatggcagggagcatggtgcaagttaggtggagttagtgttggagcaagttagtgttggagcagtagctgagatcacaggcagagagggagagagagagacagggagggagggagaccaatggaccctgtgcttggagtgagcttttgtaacctcaaaccctgcccctagcgacacacctccttcaacaaggccacacctcctccgacaaagacacgcctcttcctccgacaaggccacacctcctccaacgacacaccccctaatccctgcccatagcgacacgcctcctccgacaacgacacacctcctaatccttccaagccgttctccaactaaaggctaagctgcaaatatctgagcctgtggggcctttctcattcagaccaccccagacacccttccagatgagccttggagggtccatggcgcaggccaagtctcaggcagctgttgcagagccgtaaagtggggaagcccctcctcacactcctccctgtgtctccccacagaatgtccgcatagacccgagcagcctgtccttcgggatgtggaaggagatccccgtccctttctacttgtctgtctacttcttcgaagtggtcaacccaaacgaggtcctcaacggccagaagccagtagtccgggagcgtggaccctatgtctacaggtgaggccaggcagggtggggtgggactgtgtgtggnnnnnnnnnnnnnnnnnnnnnnnnnnnnnnnnnnnnnnnnnnnnnnnnnnnnnnnnnnnnnnnnnnnnnnnnnnnnnnnnnnnnnnnnnnnnnnnnnnnnnnnnnnnnnnnnnnnnnnnnnnnnnnnnnnnnnnnnnnnnnnnnnnnnnnnnnnnnnnnnnnnnnnnnnnnnnnnnnnnnnnnnnnnnnnnnnnnnnnnnnnnnnnnnnnnnnnnnnnnnnnnnnnnnnnnnnnnnnnnnnnnnnnnnnnnnnnnnnnnnnnnnnnnnnnnnnnnnnnnnnnnnnnnnnnnnnnnnnnnnnnnnnnnnnnnnnnnnnnnnnnnnnnnnnnnnnnnnnnnnnnnnnnnnnnnnnnnnnnnnnnnnnnnnnnnnnnnnnnnnnnnnnnnnnnnnnnnnnnnnnnnnnnnnnnnnnnnnnnnnnnnnnnnnnnnnnnnnnnnnnnnagaggcggtgtctgtccgaggcgagtgcatactcgcatgcgtgtcctggggtgagggctaatgtgagtgtaaatgtgttgtcatgggggcggggcacagaggacccaacagcgcacaaaatgggcaaaatggctgctgttgagtcagaaaagtcaaacaaacatgcagaagtgaagccagttacgcagcatctaagaagtgagcggtgctgggtagtggtggcacacaccttgaatcccagcacttgggaggcagaggcaggtggaattctgagttgaaaactggatccaggagcggctgcctggtcctccaccttggacagagagttttaacttccataatgcctattttagccccatctgtgagacagaggtaatggtacccactgtgggtaggttcaaggataagatgagatagttagttggagccacttaagctctgtctgccatgccataaactctcagtaaacgctgcctgtgtggatatctgctccatgctggttgtcaagtgaaagggagacgtggggggtgggggcagcagttggagttgttttccagagaggctcaaagagccttatggctcaccagggaaagcagagaagagctgattggtggtggcagtgtcttgccctggacagacagcgaggatataaacaagaggtggcaagcttgatttggtggccttggtgctgttgggtatcagtgtaccatcaccccagggcatgctgggagatgatgggtgctttcatgtgacctcacagagccacagctgactcaatgcctttttacagggagttcagacaaaaggtcaacatcaccttcaatgacaacgacaccgtgtccttcgtggagaaccgcagcctccatttccagcctgacaagtcgcatggctcagagagtgactacattgtactgcctaacatcttggtcctggtgagactgtggccctgtgtcaaccccatgccaaccctgcttcctcccagcttagccttcaggagtcagagagcaagggccacctcagccccactgtctccatggtgaccatcccctccttctcattgccttacctcccatctgagactccgggacctccactgtggtccctggggaagcatgaaggtcagagccactgggggccagagggcaggtgggagtccggaagagcaggcatttattgagcacactgtgtggggtcgctgagtctgtcctttggtgtatgcggggatctactcaaccctgctgttcaggggaggaagcaaaagccaggcagaggcagggaatttacacaggggccagaaggaccctccccaaggacaaaatcccagataccaattgggccagtgttaccaaggcaggatcggatcctgtggtcagacatcacggccctcgctggaagtttgaggacagggtacacggtggttggtagtggggggacagtcaaggcatgatgtcacgaggtaagcattaccattcccagtgacactaacttgagagattggaactgtgagctttgtgtgattttcatgctttttagaagattcttctgatctccccccacccccaccctcaaccataggaaactgttgaaaacaccagctttcctgcagttgatgcgggccgatgctgactggattggtcctttagccaccttgcctcgagtccattttcagaggtgtcccccgggtccgatggggctggagggacactttttgtttttattaatttattatattactactatcattatcattattttgagatagggtgttactgggcagccatagctgccctgtatctcattatgtagaccaggccagccttgaactcacagagatctgccagcctctgcctcaagtgctgggtgtgagccaccacatttgtcatattaattccagtttttaaaaattatttattttatgtatatgagtacactgtagctggcttcagacacaccagaagaggtcatcggatcccattacagatgtttgtgaaccactgtgtggttgctgggaattgaactgaggactctggaagagcagtcagtagtactttaaccactgagccatctctccagcccttaattccatttttgatattgaaaaagcaacagcattctgtgctgggccagcaggatggctcagtaggtaaaaggtgcctgtcactaagtcggatgacctgactttaatctccaggacccacatgactgcctcacattgtcctttgacctctatacgtgcactatagcacccctcaataaatataataaaagccctgtgttgaaggagacctgtaagtgttggtgggtaggcatcatgcgctcgcttgatggaaagaacctggagacaccagccatgcgttgcccaggaggtggaaggtggcttttggttgaatggcctttgggaaaaaacaagagcccagatgctccatacggaggaagaacaaacaagaaaactataaactcaactgaacttggggcagttagaccctggggggggcttcgggggagtagatattctgggctcccagtgttgaggtggggcagggacatgagaagtgaggtggaatccctgtgaggagactgcggcaggagaatgctgatttccaagccagcccagattaatcattgagaccttgctgtaaacatgttcaaaaggaggccacggggagtcggggaggctttctccatatgctgtgtttctaggctcatgttactgatagaatagggttcacgtcctagctataaaccgggtatccaaggggctggcgagatggctcagcgggtaagagcactactgactgctcttccagagatcctgagttcaaatcccagcaaccacatggtgactcacaaccacctgtaatgagatctgacaccctcttctggtgtgtctgaagacagccacagtgtacttatttataataataaatgaatttgggaacaagaagaggccctaaaaattcaattcccaacaacatgaaggctcacaaccatctgtacaactacagtgtagtcatatacattaaaataaataaataaatctttaaaaatcaaaaacaaaacaaaacaaggtattcatatctttgctggcccccttctgtgttaggttttctcttaaccttggctccagcctcatccgttcgcttggtgagggatggcatgggagcctccttctctgtgccccggctctgcggagtgtctctggtggttcactggttccatttaggcctcaggtgtggctctacagacacagtggctcaggaaggcttccggaggtcaggcctgagcttcgtgtatgcctctgagtccttgtagagttcactcaatctgaacccatcatcgggtgttctcgagagtacaggttaccctggcaacaaggaccagagaaaggtccatcctgagggcctgagctctttgcctgaagcctggttgaaagtgggggatggtgtcctaccatgtcctttaccctaatcccatgtccttggctttccaggggggctcgatattgatggagagcaagcctgtgagcctgaagctgatgatgaccttggcgctggtcaccatgggccagcgtgcttttatgaaccgcacagttggtgagatcctgtggggctatgacgatcccttcgtgcattttctcaacacgtacctcccagacatgcttcccataaagggcaaatttggcctgtttgttggggtaagtgtcttctgtcccttcagagagtcaggttatctctcaaggaccctaactcaaaccagcttaaacaaaaattgggaaattatcagctcatataacaggagatgccaggattacattcaggtgcggcttgatccagttcgagtggggggatatggctggggtttaacttagaagatttgaggcacagcttgcggggaggaggaggaggactggatcttcgaagcacacctctcaaatgtccccatcagtgcgacttagaggcacccactatttctcacagttgacctttggtaacctgagctaaggtttggtctctgacccctgaccccaactctctggttcagctcagctttctctgtggggatctactgacggggtgtgcttgcagtaacgttacccacaccctccaggacctgttattactgagttcacgtgagatttactacccagtggttagagcactggctgttcttcaagaggacccaggttcgattcccagcacccacatgacggctcacaccccatctgtagctccagttccaggggatctgacaccctcttctggctcactcaggcactgcagtgcaggcaatgcacagacctacatgcaggcaaaaagactcagacacataaaataaaaatatgtccaatcttgtggagaggagacggggtaaggcactgtgtctcccagtgaccagatggggaccccatggggtgaacacataacgagggcggcaggctgaatacccagtcttaaagcttttacagagttagaggccctgggtaaagccctgtacctgtctgtacctgcccttcccagtaccccatagagactgccatccctctcttcctgacaattgaggtggggcccttctactgagcttctagatcgttcctgtcagaaatttgtattaaattctttctttctttttatctttgttttattatttttattgagtcagggtctctctatgcagtcctggctgtcctggaattcactttgtagaccaggctggcctcaaacagatgtctgcctacctctctctcctgagtgttgggagtaagggtgtgtgccactaaacccccgctaaaatgcctttttactttattagctgttggccctgattgagtagacttgtcatctgtgtacatgggagtatgaggcaggagtatggcaaattcaaaaccagcctggacaaccctgtctgaaaatgtgcaataaaaaagaatgctggatggagggtggagctggagagatggctcagcagttaagagcactgactgctctaccagaggtcctgagttcaattcccagcaaccacatggtagctcacaaccatctgtaatgagatctgatgccctcttctgatgtgtctgaagagagctacagtgtactcacataaaattttttaaagggtggggggaagctgggggtgtgactcagtggatgagtacttgcccacatgtgtaaggcactgggttctgtccccatcatttatgcagcaacagtgaggggacatacctatagctgaagaataggtgggcttgtgcctatgttgtgatctatgcccagggctaaaggtgctgttccctgcctgtctgtagatgaacaactcgaattctggggtcttcactgtcttcacgggcgtccagaatttcagcaggatccatctggtggacaaatggaacggactcagcaaggtgagcaggagggcagacagtccccatcgattggtgtggggactacaccagaacaagccttggcggagggtgtccggggcacccgaggacttcacggatcccacaactgtccctgcggtatttctgtcgggaactcttttctgttcctgagttgtcatttctaaggctgacaggaagacattcccataaagataagacaatgaggtccagcaccttgcctaggcccacccggaaatcccccaacactgcttatagaacccagcttcctggccatttacccaccaccacgcctctgtgtacccagagaaatgtgttttccttccttcttcgaatacacagaaatcctgtcatgtgctattttgctgctggcttttctccttaggggcatctttatggataatgtgtttttgttctgttgtgttgtccagaggcccaggtactaaagatggaacgcaggccatgtgaatctttgacaaggacaccactgctgagctagacttctgcccttcactgggggaattctaggcaggggctctaccactgagccacgcccccagcccctcactgggggattctaggcaggtgctctaccactgagccacacccttaaatttttttattctgaaataaggtctctgtgtatcccaggctagcttcaaaaattcaatcctcctgtctctgttgccttgtaaatgtttaattcatagatgtgtgttaccacacccagccaacagctattcttagtgggtgctgttcacattaaccagctgctgttttatatgcattggcattttgtctgcatgtatgtctgtgtgagggccttggatcccctggaactggaattatagacagttgtgagctgccatctgggtgctaggcattgaacctgggtcctctggaaaaacagccagtgctcttaaccactgagccatctctccagcccctaatcgtctcctttctactatgagaagggctgattgaaagctcttacggcagagtgggaagtgcgtttagttttgctgttgctgttgctgttttgttttgttttgttttggaagcagggtctcagtgtagtcctggctagcctggaactcgatattgtacaggtgacttaactgagtccccacaatactgtatgttctgtccccactgtggggaacaggaagctgggctagaacctctgtgcacacagcctgctcacgggcttggatatgatgatgtctgtactagggcacacattgggtgtagatcttggctgtccctcaaggctatatctcatcctgtcctgcagatcgattattggcattcagagcagtgtaacatgatcaatgggacttccgggcagatgtgggcacccttcatgacacccgaatcctcgctggaattcttcagcccggaggcatgcaggtaagccctgtgtagggactccctgcctcctaccaggaaactctgcttctgagatggttcagggtccactcaggtagctccctggaagtgtgctcaaagtgtctggccttctgtgtactatgcctcaatggtttttcttgtcactgtgacaagatacctgacagaggtgacttgcgaggtgtctggggactcagtcatggtggcagtggtgaagggtactggtaggaaagtgttaaagtcttgtagcttgggctccaccatccccagggtcctaactgtggcctaggaagacatggtgggtcttcagagacccatttccaggtggtgccctagcctgtgcatccattctggccacaccagagatgactctggcctggggactcactgggctgatctttgagccctcttcctctctagctcacacaggcagccatgcttcatgccaggtgtgaacacagccacgacggggtgagcaaagtctgtgtgctctggtggactttcaaaagcagaacttcgggtttggttttgttttgtttttacattttatttattactggttttttaattttgtgtatctgtgtgtgtgcacatgagtgcaggtgcctgaggaggccagcagagggcgtcagatcacctggagctcctgtaagaggtggctgtgagctgccctacgaggatgctgggactcaaacgttttgttttgttttgttttgttttttgagacagggtttctctgtatagtcctggctgtcctggaactcactttgtagaccaggccggcctcgaactcagaaatccgcctgcctcagcctcccaagtgctgggattaaaggtgtgctgcgccaccacgcccggctgctgggactcgaacttaagtgttgctctaaactactgagccacctctccagcccatttatttgtgtgtgtgtgtgtgtgtgtgtgtgtgtgctgataatggaacccagggcctcacacactctaagtaagtggcctgatactgagtcatgccgcagacactaaataggatttcagcctggcagaattatatgagagcagggtgcaggccaggtgtctctttccttcagtccttcatggggttatctccagaaacaaaggcctcttcttacacaatcacaaggatcgaaatcagagaatttaacatcgccctaataagagcctctaagctggtgctgctgcataaaataacaaaacaaactgtgcttataatttcagattaggggccatctttgtggctggtggtggggggagatcaaagcaggaactccaggcagctaatcaatccacttacaggaacagagtcacactgaatgcactcatgcctatagctcagatggctgtctccattcttatacagtccatgagccaaacctagggaatagtgccgcccacagtgggctggctcttcccacatcaattaggggaatccagacaatttcacacagtgagagtctcttcacaggagattctaactatgtcaaattgacatttaaaaacttaccaccagactgtgtgaaaagattttctgagaagagcttttgcttagtgttgggtcttagaaatctgggtgtcggtcaggtgtggcagtgcttgcatttaatcctagcactcaaggcagaggcaagggaatccttgggagtctaaggccagcctggtctacatagctatttccagttctttacatagagagactatagaactacataaggaaggggcagagggagggagggagggggagagagagagagagagagagagagagagagagagagagagagagagagagagagagagagagcgccaatgtcttatcctcttttttttggttcatcccaattggtttcctcttgttttgctttgttgttttgagttgggggggggggtctcactgtgtagcctggcaaaaaagtatcctcctgcctcagcctgcacagtcctaggattgaagccatgagccacagaccgagttctgccctggactctctttgttttgaggattgagcagacatgtgtgtgtgttatggtgttgaccatggacagtgtgggtcacccgggccttgtttcccatcagaagagtgtttgaggccagacagtgggagtgaatggatgaagaggagtcagggtggacaagggagactgggaaagccgaagtctgggctgagggagaggtgggatccggaggttcaggggcaggaagggacatgactaaggccctggcaggtacagtgagacaggaagtggagagggaagctgtggatggcatctgtggatggcatcgcactgcagggtgactgcagggccatggtggttgctcatccctccgcatgcacagaaaaccattgcccaaagccttggtttccacagtcctcatcagctctcaagcccctatcaagagaacatggcacatcgttgtaagtgtaagggaactctgtaaacttcagattatctcaagtgactgacacagctactgcagacatgtgctgtgcatgttttagcttgcttgctttctttctttctttctttctttttttttgtgtggtttttcgagacagggtttctctgtgtagcccttgctgtcctggaactcactctgtagacccaggctagcctggaactcagaaatccgcctgcctctgcctcccaagtgctgggattaaaggcgtgtgccaccactgcccggctgctaccgtactgttatgaatcataatggaaatgtctgcgttttccagtgggcttttgtgggcggttacgacccacaggttgagaacctccggcctagggcatgctggccaaactgtgctaaactgtgctgagttctggtttttaatttgcctcattggaaggatggattagtgagtggggagccaagggagcaggcagaacattgagggaccgctgaagtttcctcagcaacaggtgactagtgtcattgctggtccctgtggtttcttctgcaggggtgccccagcctctgtgctcaaggcacagttctcaccctgcctcccctctgcaggtccatgaagctgacctacaacgaatcaagggtgtttgaaggcattcccacgtatcgcttcacggcccccgatactctgtttgccaacgggtccgtctacccacccaacgaaggcttctgcccatgccgagagtctggcattcagaatgtcagcacctgcaggtttggtgagtgtcctctaagtgttctccacctctaggctgaggtgagagggtggtaccgggattttatctgctgccagcttgctgtcccattaatctctggtctctgcacccatgatgatctcagtgctacagatagggagctaaaggtaactggaaaaaagataacagccaccctgataaatgtcccaccggcacgcgttatccacaagccgtgtcgctccgaagtccgaagggtcctgccccgaggttaagattccatcagtgggcactgcttcttggccaaggagaggagcctgccctcatcctttcctgcttccggaggcaccacattccttggcttgtggtcccttcctttctcaacctagcatccagcttgagactgggtagcgcgttgtggcccaagttagcttcaaacttgcgcatccttcctgcctctgccttcagaggtatcgggatagaaggcatgtacccagacaccagatccccccaaaacactccgttctatgaccacctcctcctcctctatccagcccatagctttcaggaccccagagactgactgggtagaggccactgggataacctggtctgttatcctggtggctctaacttctttgcccactaggacgaggctggaaacattccctgtggccattcacctgctgggagcaaaagctagagtcctgcccttcactcaaactggccacgctcctattgtgtcaaactctcctctttagccaagttgggtgtgaatcttggtactggctgtggccccctggcacatctgctctgtgttctaatcctgggccctaccctgctgctattgctcaagtctgctccgtgcctcacccctcacctggcagtcaggcccaggctgctctaagcacctcccacacagtctttctccttcccacccaccttcttcccgtgtcactcgggtgcccttgctctctcgccagctcgtattgcaccagatgtcaatcaaactcaaatgaaatgcttcctctgatcctgatcagatcctcccagacactctccctgatcttccgtcccctctggctctccagccgctctctggtacactctctcttatgccttcctgttgcctgctcatggctgtcgatgttatttactgaaccctcccctgcttgtctcctccttggactgcaaaccctgtggccatgtcccaataggatactgggagtcaaacttctaaggcccctacacagacgtgggatccagggcttgcctgcggacaggaagtttcactcacaactgcacctccgccttcccctccttgtaccagcaaaaatcccagggcttggttgaactggtccagttctgacctagtcattaggctgtgttaattggccaggctgggtcccacacaccgcaggggcagcaacaggcccacatcacacagaactctgctgtcaggaacagaatttcagctgtgaaagagaatctaagtgtagttgtgtctgtagcttgttcttttgttttgttttgttttgttttccggagacagtgggtttaagtatgcgtgtgcgtgtcgcacacgcgtggagggaggtataaacaggtgcatcgatggatggagaccggaagtgagtgtcttccttcatcactctttgtttgtttgtttgtttgtttattgatgcagatttttcaatcactaatcctggatcttgggaggtccagggatccacctgtctctgcctcccagttacagatgtggcgctgctgggaacccgaattcgggtcctcacacttgcacaggaggctcttaactgactaaactgttttcccagcccctaaagcttgccccttgtaaatcgggtgagaacaagaaaggggaagaggaacagggattcgagtgatagggaacacggccatgtgaccaacaaccccacaaagaggcaactcttaccacacccaacatctccccttcctgctcctcctgcccactggcctgacttttggtctctcggctctctgcctggcattactgtttacatagatggagtcacaactgttctttctccctcgatccctgatgactcccatgatggctctcatgattatatggtaaatctgcaagatagcgggtgatagcctagattgttgggtggtgttccatggtggggctaactctgcttgccttactccttcctggctcacggagctttcttttggcatttcaccactacaaggatgcttctagaacattctcgcacctgctgtaggaggagtgcacctgagttcgaatttctgtggcattttatcttaagataaagaatacacataggtttccctttctgggtcacgagactttcttggactcaggactccccatgtctcctgtccttgtcttgggagcaccttggatcttccctgaagtggtccttaatcaccacgcgggtaatcctgagcagttaagtctggatacacgggccataaagctataaattaattatacttattgcccgggtgcgtctctctgagggtgtttggaaatcaaaagaaaagatgagccacacctattgttagaaagccacgggcatgccacctgcagcaggtctgtgctggcagccttgacatcctgttggaatctgtgcttccaggtctggttaggtgggggcttcatctcccggggatccatggcatccctctgaaagaaatggggttctctctgatctttgctggtgtctcctttcacagtatggttggaaggatgggtagggttttccaagtagaaggcagcatatctcagcgtgattttagaagggtccacagaggtgacattaggcctcagggattgatcaggtctcttttctgttctgttgtatccttggtgttgtgtttccatgagggcttgaaggccaccctgaggatccttcgcctgtctttctgacaggaccaggtgtgtctctggagcctcgaaggtgctagggttcacctggattctcagtgatccgggttctctgctgcatccctgcccacgtgcacctcctggctaggccatttctctgccaaggctgtcacaggtgcagcactcttgtgtctgacacctgcacttgaagatgcccatagcagccggttcaggggttgggagcaagaggtaggggttgggggcttcaagcagtggatgtcctggagaccagactcggatggaactcagagatccacctgcctctggctcccaattaaagaggtatgctagcctgtctggctttggattttaaagaaatgttttcttttttttaaaaggtttattatttattttatttatgagtacaccatagctgtcttcagacatgccagaagaaggcatcggatccccattacagatggttgtgagccaccatgtgattgctgggaattgaactcaggacctatggaagagcagtcagtgctcttaaccactgagccatctctccagccctgtttgttgtgtttttgagacagagtttctttttgtagtcttagctgtcctggaactcactatgtaggccaggctggcctcaaactcagagatctccttgcctcttcctcctaggtgctgggattcaaggtgtgcaccaccagacccagctaaaacacaatgccccccctgtggatctgttgccctgggagcctcttgtggcctccccagggagactcagaactcggaactccccaggcccttgtcctgagatctctgggttgagccactttggctggttggtggtaaagtcccacctcagggccctgggtgggaatatctcattggtgctgtcccttccattcctgtgatgtcagagacccactcacgtgtacccctgagctacaatgtctccaaaagcagtctgtgtgcctggcttgacattcagactccgcttccactcctaaattcatatggtgttaattttcctttccactttcatctcccatgattccctgctgcacctccagacctggaggggtgggggtggggggttgaaaatcacgtccaagctctcacctcttgctacactcccacccggaatgcctttcccttgccgggtagcagctgctctnnnnnnnnnnnnnnnnnnnnnnnnnnnnnnnnnnnnnnnnnnnnnnnnnnnnnnnnnnnnnnnnnnnnnnnnnnnnnnnnnnnnnnnnnnnnnnnnnnnccacccaacaccccacccacccccaacactgtaatcggccactctggctccatccacccttcccaggtcctgtgtgtgctcagcttggtccccagtgttagcatccctgcatccctggcaccgaggcaggccaacgtgacgctcccgtcttctaacgcctctcttcccctcctccaggtgcgcctctgtttctctcccacccccacttttacaacgccgaccctgtgttgtcagaagctgttcttggtctgaaccctaacccaaaggagcattccttgttcctagacatccatccggtaagctccgtgtcctgctagtggctggggcccattcccagagattgccactggccgctgggcacccgccccgctccccccaattccccaggacagaacgggttccaactgaggcaggggagttcagttccttccacagcggctgctcctagaacttcaagtcatcaaagtcttactttaccccaattccagagttcagtgatatcattaccttttttattggggcctataaaaagatataagatagtaaattaattaagacctatcagccgggacgtctccttcaccagagacagatacccttgacagtgtcaagacactaaagacatcatcgtgggccagtgtctcacagagaaatcagggggaggaatttgtcctctgttaacttctctctgcctctggtcactgtaatatgtgtccagtccagggttcctgccctacgtgacgccctgaaggcattccgtgaagaactcttttttgttttactgggtggggatggaagcctgggttttgaacacacaaggccccaggctctgatgccgagctgtgcctgcagctggccttgaacttgcaaatcctcctgcctcggcttccagtgtttcttcacacctggctcacagctgagggttatcgcagaggaagggtgggcacatggggcacagtcgtctgaagtctttcccaggttgtgcctagctccccagcaaggaacttgacatagaggtgttttatatcaggaaagcccctcagaataggggggcctagttgtcgactggggacctgtcctgtgagcctctctccctggggcagatccatgcttcatcccagaggacgaaggtgtttggtattattaactgtctatgcaaatggcacagtgaggccaacacactagcttagagaatggggcaccctcacctcaccccccagaacttaggttccaagaccaacactgggcacctaccctggacgacttctagggagggttgccgggcccacccatggtatgcgtggttatcacatccatgcctctgtccaaaagtcataccaggtttctggaggcctttgccctgggggcaggagggatctgggcgtcctgggcaaaacgtgtcctggccttctactgtgggtgattacaatctgagaggtggcctccggcctcccatcaatctttcaagagtctcatgatctgggcagggctaaaggcatcaaacggtggtctcttttcaccaaccttttccattctagaactttcttcctgatttaaataatacctgtgaattctcctagtgattttttggttgttgttgtttttaattttatgtatgtgagtacactgtcactctcttcagacacaccagaagaggacattggatccaattccagatggttgtaagccaccatgtggtggctgggaattgaactcagcacctctggaagagccgtcagtgctcttaaccgctgagccatctctccagcgagattgttttttttaaagcatcacattttaaaaagagagctgcaagcaggcagctctctgtggctacctctgttagggagcgccaggatgctacatagtgggaaactggctcgattaaacctactcaccctggaccaggcccttcctttggttccctgggctattaggaaatgtaaacaggagaaaaaagacatccttactgcgcatgccccacacttgggaggcactgtcttaggcagcttcgtgagggctgggaggatagcttagtaggtagggtgctcccctgccctgcacagagccctggcttccatcccagcaccatgtaaagttaggcataagccagtcctcagaaggtagagacaggaagatttggagttcaaggtcatccttggctacatagcaaattggagtccaacctggaccacatgaaatctgtccccaaacgaacatgcagatgtggggggcggggggtgtcatccctctggcaacaagtgtctagagaggggatcttgcgatagctgatccctttgggagcaggtatttcctgagggagagcccaatgggtgtgtgggaaatttctagaagggtggatgccccagcaggtattatctggtttaagttggataagaaaccccagggctggagcaggctggagcaggctggagcaggctggagcaggctgggaggctccccacaggatcttacatctcctcactgtatttatgctctaggtcactgggatccccatgaactgttctgtgaagatgcagctgagcctctacatcaaatctgtcaagggcatcgggtgagtggagttgggacgggagcttctgaaagcttcaggggccaggaggtttcatgcattggtgatgcaaggcacaggacagggcgaggcccaagcgttgggatccaaccacctcttttcctgggattgcatcattgctctggatggagactcagacccaggctgcatcctgacactacctccatcctccacgcccaagggctcttctgccattagtcgcattggtaatcttgtctcccccacagtaggatggatttgcctgcttgtatgtctgtgcaccatgtaagtgcaagagccgccgaggccggaagagggcatagggacctggagttagacggagttgtgagccactgaatggatgctgagacttgaacctgggtcctgccagtgttctcaaccacaattccctgggtttactttatgtttagctttgtgtaacgtacagagtgagactgagagtcctcctgcccccattccctgcttgcccggcagaaacatggtggtaggagtccagccttggggctggagagatgtcttagcagttaagagcactgacggctcttccagaggtcctgagttcaattcccagcaaccacatggtggctcacaaccatctctaatgggatctgatgccctcttctggagtgtctgaaaacactaaagtgtacttatgcaaataaaataaataattctttgaacgaaaggacccacatgctggtcactcctcagcatcgcagatcacatgcctgggaaccactgaggaagaggtggactctgggcttcatggtgaaaactaagtccgggaattgctggactcagctaggcttctgtacacacacacaccctgggactcctgcatgccagaaaacactctttcactgaattacatcccagccctcttcactttttaggtctcactagattacccaggctgcccttaatctctctgtagcccatcatggccttgaacatgcgccacttgatctgactcatctgggctcttgaaaccggaggccaaagtgggctggccacgggcttgagttcctgaggtcagcagccaaacattgatttgctccactgcctcaaatactctttagaaatctttatagatttatggagaggtgtcagagacgcaagcaaatctttgttctctgtccccggtgcattcagtactgtccgctcctggcagtatctgtcacggtaaggaaccaaagtctagtgcagcgttattgccacaactgcagcttctcagcacgagatgccgcccgctcacgcctcccgcccggctcccgtggctgtgatgggttgttttgttttgtttttttcttttaatctttgtttcttgttggtgttgtgagttttgggattttgttttggtttttggaggggaaggtggttcatacagaggccaaaagaggatgccatgtgtcctcttttatccctcttccctttcttccctcgcggcaggaattctcaccgaagccccagctagcttctacctgtctcagccctggggtcacaggttcaaagccacacacagcttttagcctgggttcaggggtctcacctcgggttcatttgcttgagcagcaaatgctttccccactgaaccatccccagcacagtgatagtttctcctctagcttttggggtgttaaagtacttgctggacctgggtgtgtgtggtgcgatcaggttcccctgtagatagtaacaggggcagccacccaggctttggtgggaggagactcattattattttattattattggtattattattattattattattattactactactactactactactactactactatttggctttttgagacagggtttctctgtgttaataaccttggctgtcctggaactcactttgtagaccaggttgacctcaaactcacagagatccacctatctctgccttcccaagagctgggattaaaggcattgtgccaccacatacacagatattattatttatttttaaagttgtatttatgtattttatgaatgagtggtctgtctgaatgtacacctgtgagccagaggagggcatcagatgccatgatagatggttgtgagccaccatgtggtggctaggaattgaactcaggaccttttaaccgttgagttatctctctagccccatttttagttgtgtttagtgtgtgtgtgtgtgtgtgtgtgtgtgtgtgtgtgtgtgtgtgtataggtgcatgccacaatgaacatgtgaaggttgggacaactttagggagcctgttccaccttctgggtcccggggatggaactcaggtcttcaggcttagcagcaagcactgtcacccactcagctgagccttgccacgccccttaattaattttttgcatcagggtttcctgtagcccaggctagcctcaaacttggctaaggatagtcaactgtacgtagcgttacaggctcccctttatctttctgtctcattttcttgtgaagtggtttcgactgagcgaaggcctttcacatggtaaccagtagctctcccactgacaccccaagccccaaacatagctccattgcgagggtcacatcacccctggtcactcactttgtgtcccatgtttccaggcaaacagggaagatcgagccagtagttctgccgttgctgtggttcgaacaggtgagtctatgaaggtagaagggagtctggggtctctgtatgttagctgaggcttttagttcgctttgatgctaatgttatgttaacttccggtacctaaatttagctatttgtatgtttagcctgcccatatgtatgtatgtatggttatcatgtgagtgcccggtacccgcagaagcccagagagcatcaggtctcctagaactggaattacagatggttgtgagccgtcaagtctgaaacgtgggctctcttgaagagcagccagcgctcttaaccacagagccatttccaggttttgttaatggcccctgagaggggggagtggagatggaattccgcaccaggccaccctgcaggcatcctgatctcgtcgcccttcaggtcctaagactagattctaaccagcgaaagagatgactgttaggcgaggaggcttggggccagatccacctcccattagccagtgcctcatttcatgggcgtgccaacagcaagggcgtctgggaaatgtagttctctttggacttctagccaaagcgcccgaggctctctgttctgatttggggcggggcacggcacagtgggatgggtgccttggagacgcagcgtgcagcccgacctttcttctgcagagcggagcaatgggtggcaagcccctgagcacgttctacacgcagctggtgctgatgccccaggttcttcactacgcgcagtatgtgctgctggggcttggaggcctcctgttgctggtgcccatcatctgccaactgcgcagccaggtaagtaggaggggcggccacgcctcggactcggctcgggtttcagccgacctctgtttcctgcagctagctcttgttctacctcctctctcgcaccctgcagtaacttttctctacaagtcctggaaggcccaggaccctcccaggtcggggctaggctgaggctaggtacccagtcatttggccaacaagtgggtgccacttggtgcccgctctggaaagtgcctgccgaaggtagaggtggggggtcagggctgggctggttagagaagcaaaggaaagccaggttaaaccaaacagagaagatagtttttcccaaggaaaatgctctgggctggagttgggtgtgagatggaagtgggaggagccacgtgtggaaccatgaacttagattttctaagtccagagaaaaaagtgaaagaaattagttataaattttgcttgacccaaatatatcagcatatgaggctgaagttttacatcagccatagagcacttgtttagccagtgtgaggccttgtattcaggcctcagcgctgacaggaaaaaaaaataatcaaaaataatgaaaatatttaaaaaagaagaagaaaagaaaagaaggtctggagagatagctcagtgattatgagcacttactgcttgcagggacccaggttcgattcccagcacctacctggtgttctgcaaccaactgtaacccttgttctgtaaccctagttctgtaaccctagttccaggtgatctcaaggcacacacacagtgcatatacttgcatggagaacactcatacacataaactaatacaggtgcctataatcccagcactcaggaaggaaggaggccaggggagaaggatccggttcaaaatcatccctggttacatgtagggtttgatcaaggccagcctaggatacgtgacatcttgtctccgaaaatcaattaaacttcaaaaaaagaatagtgtgggcgactggagagatggctcagcagttaagagcactggctgctcttccagaggtcctgagttcaagtctcagcaaccacatggtggctcacaaccatctgtaatgggatccgatgcctgcagagcaacagtgtacttgtatacataacataaataaataaatcttaaaagacaagaatagggctggtgagatggctcagtgggtaagagcacccgactgctcttccaaaggtcaggagttcaaatcccagcaaccacatggtggctcacaactatccgtaacgagatctgactccctcttctggagtgtctgaggacagttacagtgtacttactaaataaataaataaataaataaataaataaataaatctttaaaaaaaaactttaaaaagaaaaagacaagaatagtgtggttcagacaggggtaggggtcacttccataaagaaaggatgactgaggaatgtaacatcagggcatgcagcccctgaaagcaggaagcaaaggggtcatgactagaaccttcgttcccttctggcctcaggagtaccggctcgtgcatgagatcttggggttacgacattggtcaagtcccctggggtgcttgctgatagctgtagttgtgaagcagggaatttgaggacaggactgtgatcagctgtgattcaagagggctgctgtctgcaaacaggggagccactggccacctttgaacactcgtacaagagccactcacagggtcccacctgagatgtcctggggccacaggctgggctttctgtgcgtgcttggtgtgtgtgttgggggggtcttcccacctgctctcctgcagtcagccagctggctgcctttcttctttaaggcttgcttgcttgcttgcttgcttgcttgcttgcttgcttgcttgctttgggaagaacggatccctgtggagtccccagcacccggcttccctttccaaacacaggccccaagtctcttgtcatcaccaaggggtgtctggttgcctctggctctccatgttgactgtagctatgaggatctggaggacatcacggtctgggcttccgggctggtgttcctccctgctgctgcccagtgagaactgagccaggctttttcagtcaaccattggaggagagaccccaaaatagaaggcaggcgtctcgctggggtctgggggcaaggttgtttgtcctgcgggtttcatcagagagaggccaaagaagccttgtcctgacaaagctaggcctcacctgtgtgttcctgtccttgagcatctgggggcgggggggttaactgcttgctggtaaagaacatactcagtcatacgccattcataaatcaagagtatgttaatgtttccctcagattgacaaataccatggacttggagaagaggttaagagagagattgtacccagtaggctccaggccctaggttcaaatccagccccaccagaccagaccagagaaattcaaacactcagcaggccagtcccgctgtggccacctccgccactctcttcctgtcggtgactttctgcttgccggacttccggggcgcttcgcccacagtgcagggtggaacaagactctgcaatcttgttctcttctgtccctttgcttctggggggacccagcgtcaccccagtgacacggcatgccatataaactagcttggttgtcttccaggagaaatgctttttgttttggagtggtagtaaaaagggctcccaggataaggaggccattcaggcctactctgagtccctgatgtcaccagctgccaagggcacggtgctgcaagaagccaagctataggtgcgtaccaggtaaccccccctcttcaccccacctactcatagccagtagacctaccgtctctacctatagcatcttcctggatgttattcacatggagagcagttaccctcctgcctctcaccctcctgcgagatgggaatcttgcctcggtttcttggaccctttcagtcattgactctcatttacaaagtcctgttagaagatgacagttagggctggtgagatggctcagtgggtaagagcacccgactgctcttccaaaggtccggagttcaaatcccagcaaccacatggtggctcacaaccatccgtaacgagatctgacgctctcttctggagtgtctgaagacagctacagagtacttacatataataaataaataaataaatctttaaaaaaaaaaaaagaagatgacagttaggccagttgcttctcagtgtcctatcccctgcaggttgctaaatacaggtccctgggcatcccggaaagccaagagactctcctagcccaaaaggtttgaaaactttttttttttttggacttcaagggcatgtaaaaggacacactgactccagttcagaatagagagactgaaaatgaagacgtttaaacatcagttaagcaccagctacatactcagtcagggcctgaggatagaatttcatggtcaagtacacagggtgtgcgacagactgctcaatacagtctgaatttagatggagtcgtgtgtccgccctgtgctttgctgcgatgggtggtccaggtggtgagccaccgagtcaggtatagctggcgtcctggtttacttagtagccatctcgcaaggatccaggaccgtacttctccaagatctccaggtcctgtagggatcaaggctcaggagagaggctgagccctacagggtgtgtccctgcctgggaagggactggaagagctgtggtccctgcaatttggggttagcagaggtgagtgagtgtctcaatagaagctgctattttagcttgtgagccaacttgggtgtgagcactttcttggagggagctgggggtggggggtggaggcggggcttgggggggcggggaggggaggccacagctcagctcctggaggccagctgactatttgctgcaatgtcatttgcttgagaagcaaataaggcagaactctggtgactgtgtgattgtcctggtgagtgccacctccctggaggaggaagaagctctgcagctcagtgggtccccatatgtccctggagctgagaaagggtcctgccaggaagaggtggggagatggttagtgtctgccagtcatggtgatgtttgggtattgccagagtgcgaggggacaaatgtaggctccgagcagaggctccgcagtccctttagcccagatggagcccataggtacacagccatagccctgtccagaccctaatagaatgaacaagattgggcttacctctttactttcccagcttggtctaatcctcgtttggcttcaagattcccctgggtgccccctagtcctggccatgtgctagggagggcagtgtcctctgaggatcagctacagcacatgggtccttgcatagggacctcaccctcccccccccgaccccccagtgcctggctaagtgaaattcggtggggccccacactctgccatgcacctgggtgtgggggtggtccctagaggctgctgctgattgctatagaatggaaacagacgtgccgctagaccaaagggtattattatatgaataacgtccctctgggtggatgggcatttctgtaaggcaagggggttgggggttggcaggcagggttggctgtccggccagctgctgtgaacacagtagcctttaagaaaatgacctgatcctctgcttctttttggtctgtctctcattctgaattctcctctgtcagacacagtacagggaggagccaggacagaggaggggaaatctgcccacccgccctggctgcccagagccttgtggctttgtgtgtgttttcatgggagagaccaagctacagagttaactcttgctttattctctggcaacaagggcgttctgggccactcacgctggcttcgaacttgtggacatcctcctgcctctgtctcccgagtgcggagattccaagcatgcaccactactgtgccttgtgtccccttccccattttacttctgttttggttttggttttgtgttttgttgttttcgttttttgggttttggttttgggtttttgagacagggtttctctgtgtagccctggctgtcctggaactcactctatagaccaggctggcctcgaactcagaaatctgcctgcctctgcctcccaagtgctgggattaaaggcgtgcgccaccactgtccggccttttacttctgtttttttgtctgtccatttgtctgtctgtctgtgtgtggtgaagccagggccttttgcttagtgtagtccacctctgagcttcaccccagcacttcctgttttacttctgagtgagactatctggaatgctggggtgctgtgtcgggggtggaggagtgggatggggggtgctcgttggctttgatccaaagagaagacgcctccctgcagtttccttccctgccactagggggatcggtatgggggttgcagggcaggggtgcccagtgttcttaaacccggccttccattcattttcctaagttgggaagtcttttcaagtcagagtctcccaacttaccaagccatcctttcctgttctgcaccctttgcccaacatcctactgtccctaaggcccgaggccaccattacagcagtctggtgagagtgtgtctctcttacctctatgaacaagagccagttttaatagctgttcctggcccgtcaggtgacagcattttaaacatgtgggcagacatttaagccattcctagtttctttgtgcggcggtgttatctacccactccggactctgcccccttcactgtaacaggccagtctccctggcctcagttttcccatctctaaagggagaggttggaaccaagagacctacatgactgaggagtccccgtgtctatagagtggcatctctgggttcatggcagacagggctggatgtgtcaggaagtggtttctgtgctggtgggatgtgcggtgggactaggggaggtaggcagggcagggctaggtgacaggcttgtgactcagcttccttttttctccacagggtcctgaagacactataagccccccaaacctgatagcttggtcagaccagccacccagtccctacaccccgcttcttgaggactctctcagcggacagcccaccagtgccatggcctgagcccccagatgtcacacctgtccgcacgcacggcacatggatgcccacgcatgtgcaaaaacaactcagggaccagggacagacctgctgccaagtgagcctgatgggccacaggtgtgctcttctaaatggcctgtgagccaggctgtgggaactctagctgctgtcagcccctcctgtaggagctggccctgcccaggctcctgacttccctcaggaagtctttctgtctttctccatcagtctgaaagccttagttcccacagaggacggatctgtcactcctaggggctgggcatatgtcggcctcttgtgccaaggccaggcaagcagctccaggtcctgaccagtttgcacacacactctggagctgtatctggcgctttttctatcgtctctgctatgtcactgaattaaccactgtacgtggcagaggtggcaggcccctcagggtccttatttttcaggcatggggtcaaagctagaggtatgggccgtctacacccccccgccccccggcatctagtgtacctcaccagagggtattcggaggcccagcatcctgcaaccgaccccttttttctactggaagagaaattttatcatcttttgaaaggaagtcatgactgaagcaataaaccttttcactgattcaacaacactggcttctgtgactgttttctgggcagggctgggtctccagaatccaggccacatcagtaggtgttcccatgactgccagcgagtctcctggtgtgaggccagcaccggccactagccatgtttccacctcaaggctaatgtggtatgtggcttggatgcaccaggacaggctagctctgtcctttctctgtcccgtggaaccttctgggccttccagcagtctgtgtccaagatcagaacatccttgtgaccccaagtgacaagcctgcagcgtctgggggagggctggaagggagggtctaacttttgtcccaagttcaagcaggggttctacctggcatctctgagagtaaaaccatgttttgcccttaagggacccactaggaactgggcaatagattttcactgtgaacattaaaaactacatagccgggctggagaggtggctcagtggttaagagcaccgactgctcttccaaaggtcctgagttcaattcccagcaaccacgcgatgactaacaaccatctaatgggatctgatgccctcttctggtgtgtttctgaagacagctacagtgtactcatataaaatgaataaataattaaaaaaaaaactacatagacactcactcggtggttgtaatggtcttcacccttccctttcttagaaaagaatttgaattattgtgtgtgggtccatgccatggcataagtcagagggtgagctctaagagttggttcttttctcaccatgtgggtcccgggcatcgaactcaggtccccaagtttggcagcaagctcctctagctgcggagccatctcgctggccttgcacttccttaatgagcactgttctctacctgccctggaagcattgaaagtttcctacctcatactataaactgcattataatcgtgagacataaacttctatataaggcaaacatttttagtcttgtaagacggggtctagctttgtaggccaagctgggctggacctcatcatccgcttgccttctgctcctaatgctggggtgacaggcacaccctcaccatagccagatttctttttttccaagacaggatttctctgtgtatccttagctgtcttggaactcactctgtaggccaggctggccttgaactcacaaacccacctgcctctgcctccgcctccgcctccgcctccaagtgctgggattaaaggtgtgcaccactaggctcagattgtattatttctaggactgagaataaccagcctttctgggctacccaggttggttgtaaacttctgggctcaaggaatcctctggtcttagccttctgcgtggctgggaccagagacctctgtacctgggttcctgtgactttcctgagctagtgtctgcgcctgcttctactgcacacagacagaggacagggcgactcagaggcagacattcctgctccagagtctggaggcccaagagggttggggcaggctggctggggctctggggacgatcctcccctgccctgcaggtgcctgtgccctacttggcttttatgggtgtgtggaaactcaaccctggcccggggcctccccccaccttaatcatttcttagtgtttccccgcaaacagagccccatgggatcagatcaggtcttctttcactgggtctgagactaaacacactcagccagtaacagtgacgtcccattccactctcgtcactaagtcctgtgcaacttcatcagcccgtcatgttttgctgacagcagacactgtctcagctgaccttttctaccacacgtatttttttaaaagataaatatttatttattattatatgtaagtacactgttgctgtcttcagacacaccagaagagggcgtcagatctcattacagatggttgtgagccaccatgaggttgctgggatttgaactcaggaccttcagaagagcagtcagtgctcttacccactgagccatctctccagtccctgccacacatagtttacgtagtttccttgcactcagagttggcaaatgcatgcgcttctgtgagtttgaatgcatggtcctatctgagcacccgctgctccaagtgtgtacacagaacagggactggagctggggtcaatggcaggctagtcacctaatgtgcaaggagctttgggttggagccccagcatcaaatgaactgggggcaaaagtgtgagggagaggcaggaagatcagaagttcaaggtcatcttgctctacacagtgagttcaaaaccagcctggggctacataagacctggatgaagaaggagaaggaggaggaggaggagggggaggaggaggctgatttggtagcaaaaacctttaatcccaccactcagaaggcagaggatctatgagtttgaagctaacctggtttatacagtaaggtacagccagctaggactatgtagtgggattctgtggaaggaagagggagagggggagggggagnnnnnnnnnnnnnnnnnnnnnnnnnnnnnnnnnnnnnnnnnnnnnnnnnnnnnnnnnnnnnnnnnnnnnnnnnnnnnnnnnnnnnnnnnnnnnnaggtggaggaggaggaggaggaggaggaggaggaggaggcagaggcagcagcccggtggtggtcatactcttttaatcccagtcttgggaggcagaggcaggtggatctcttgagttcaaggccagcctgacctacagagttccaggatggcccaggttacacagagaagccctgtctcagaaacaaaacaacaggggctggcaagatggctcagcggttaagagctgaggtcctgagttcaaagcaagcagaggtcctaaattgaattcccagcaaccacatgatggctcacctgaacagctacagtgtactcatatacattaaataaattaatttaatcaaataaacaaaacaacaagaagaagctaaacttggggttcagattccacttccccagcgctacctcccccctttatctacacactgaccttcctctcagtgtgtaacatttggcagccggcaagctttgtctgttccagatattctcagaaagaaccaggcagtggggagcctgtccagttggctgcaggggctcctccctgctgagtagcgtgcagggatcggatggctgccactggttgtcagtcatctgggatatttttaccctgtgggctgacacgcccactgatctctctccacatttatagtaacccgcttgcaaaagctggttgctcaatctgcagccttctgggaaccaatgtggaaaggttccccgaccggtgtgtgtatgtttgtgtgtgtgtgtgtgtgtgtaagagaggtctgtgctgtgcggaggccccaaagccccaaaagtctagacctaggaaacagctgcttacagcaccccctgctggatcttggggaaggatcctttttggtttggtttggcctgcctcagtgtgtgtgtgtgtgtgtgtgtgtgtgtgtgtgtgtccagagatcctcttcttcaccctccctctcctctccaggctgggattacaaacacaaatgatcatgatgcctggctttcttatgatattaggacttgaactcaggtctttctgcccattttcccgttatttactgagctatctcttcagcccctcctttttgtttttgttgttgttgtttgttttgttttgttttttgaggcaggattcctctgtgtaacctggccgtcttggaactcatactgtagaccaggctggccttgaagtcagagatctgcctcctgaggaattaaaggcattgcccacatctgacttcaagaattaaattatcaaagaggaagccatgtgtctgtgagattctggacttgtctggccagtgatattctatgaaacccatgtgacacatggcccttagtcctgcaggcccttcagtgtcccatcactcctagttcttggaggatgctctctgtaccctgtcaccacctcctatgctgccagtggagggtgtgtcacctctgatcatctccagcctcaactaggcctcactttcatcagcccctctaccatagctctatcctagcctcctctgggaagcccccctatgatggtaaattataactgtcaacttgacacagcatggaatcactcaagaagaaaggctgagggagagaatccctcagagagagattgtgcatgggggcccatgtgtgggtatttgccttgatcattaattgaagtgggaagactcactctcagtgtggggcagcaccattccctaggccccgtcctgacctgtgtaagagtgaagaaagctagttaagcatgagccagcaggcagcatgagtgtgtccatttcctctctgctcctgactgtggatgcgatgtgactcactaccggagttcctgtcaggaatggtgacctcaaactgtaagtgaaatgtcccttgtttctctgtggtgctgtcaccaccgcaatagaaatgacactaggacacccccccccataactgctccctcaagcttccctcctcaacacccctggagtgcttttgtaccccagtcaatgccaggtcgctttggaatagttgagatcctaactctggttgttggagcatgtacacacacacacacacacacacacacacacacacacacacacacacaccaggcctggcattgtgatggacactctggtctgtgacccagaagcatgtccaacttcacaggaaatatctgcccaacgcctgctgcatgcttggcaccagggtcctggggtggggtgcaggtggaggcgcccaaccgacgcccttcctcccagatggctttgctatcctgctgcttcttgcaaggggcatggccgaatcacagaccttagcaacccccacccatttaagacaatacacctgagagaggcagagacaggggcttcaggaattcaaggaataaatgagctagatagcaaggtagaggccagcctgggctacatgagactcttgtcagacaaaccaaaatgaagccggaggattataagttttggaacagcctgggctgaaggtgaagccctaactcaggaaaaaaaaaaaaaaaaaaaaaaaaaaaagcaatgagcaaaagccagagtctctgcagggggcggagcagccaaggaggtggggggaacctctgtattcatgttcactccactgtcctgctttgatctgtccctgggacatttggactgtctgacaggccgttcctggctctcacatgcagcctgggccttctgttcttcccgtaactacccaggagtctttctgagatatcatcgaccacagcttgtcctttaagcacgccctttaagcttttcccaactctgaagacaacgccctcaatcctcatcctgtgcctagaggaccgacttctgggtaattccagtattgaccactagagggcggtttgcacacgtcggatgcccagtggcgcctttaagggctggccagtgtcccgttattcttgggatgtgtcaaatccgactttaactgttcacgggctggtttgggaatggctaaccttgagcaattttattttgtgagtgttccagagagcctctcccacaccagaaaaatgtctttcttaatctttagcatttgaaaaggtcttaacactaagtggcttgctaaggagccctaagctaaaacccaggtctcatgattaagattctgaaccatgaacaacagccatctgtgctgctaacctctgtcccacttgctgggctgccttggagcaattccctacatctctgagcttgccttgccattggcagctcatggaagggagcgaatattagattactgccatgcaaaacctctggcagcctctatgacgctagaacaggagatgcatggcggtgcagaactcaacagggtgaggcaggacaaccatgacattgaggccaacctgtattacatagcaattacttatttacaaaataaataagaaataaaagtgggtgtgtgcgcaatctctccggagatgggactacaataaaaacgcttggatgcccagctcccagaaagcaactattaggcacctgctatatgcggagcactttccaccctgagaaggtgcttaggttctctcattcagcaagtgtccgggtggccaccatgtgcctaatgcccttctgtgtgttgggatcgtgttgggctgggttccctagaaggagaatgggaggcagaggctggtggctaagggatgtccccgggtagagagaataagcctagtagtcaagggcagctgtgcagtaaaggctgtctatgggacagaagtataacaaccaggagcggggagcagcttgaagcagctgcaggtacagagaacggccaccaggggtcgctgtggttccagtcactagagcagagcgcctggccacagacaaaacccgcagctactccaggcttctgtggcagttttaaaaccaaggaacatctactttttgaggctctagacacgttaagcgtgaaaagcaaacaaacaaacaaatgtaacaaacccaggctgcttaagatacactgttgaatatgtttgtatttaaaaggctatccccactttttctctctctgactcttttctctcccctccccaccccactctctccacatgttcctgccggcctcttcccttccccatcctcccttctcaatcccccttcacatgcccctcttcccatgcccccaaataaactctatattatatatatatttttaaaggctatcttcagttcccatattcagatgccttgtcgtgttgccaagccatggagcttgcagacaatgtctatggaaatagcaacagttctttagcccaggaagccaggcacagggttggggcgttcatatgcatctccaaagtaggtccggggttcagtttgcacagctgtctttgggataattatgaaacggttattgggatctatgtccttgggaactatgaaatggcagatcctgggggctggagaaacagctcagacgtgaagaccactttggtgttcttgcagaagactgcagttcagttcccagtacacatatcggctcacagacacctgtaactgcagaaccagggtggtctggcgctctcttctggcctttatgggtattgcacacatgtgtgcacacattcacagataggcagacacatacgcatacacataatttttaaaataaaatcaaaatggcaggttccggccactacctacccagcgaagaccaaagctgggctctggcttctacatccctaagatgttgtcattacttgaatatttgctgtgtactagacagatggtaccacgttgaccatttgtgttcagtatttgtgacctgagagagtgctgatgtcatcattccctcgtttttacaatgaggaggctgaggcacagagagatgacggttgatagggaaacaggtttgcaccgcagcggctaggccagctcatgagtgctgcccactgttcctctctgtgcagcacccaaggactgcccgctgtgctggtgaccccagaaagagcatctcaacccaggtcaggaagtgtgaccagtgccaagggaccccgggaggcctagggaggaagggaggtcacgggctcaggccccaaactgcatctgtctagaacagagattctgaaccttcctaatgctatggccctttaatacagtcccttaagttatagcgacccccagccacaaagttatctttgatggcacttcagaactgtaattttgctgctgttatgaatcacaatggaaatactttcggagatagagctttgccaaaggggtctcaacccacaggttgagaaccgctggtctagaaggagccccatttatctggccaggctgctttggtgagggtctcagttcaggattgtccccagacaggtggcacacactgggtgaaacgaggaagagtcacatgtctaaaaatagtgcctgtctcccagagcctgtctgtcacaggacagagtggagcagctaggaggtgggaaggattctctggaatttgggggttaggtatacaggttcaggggagctgccccactctgaggtttggcagtgagctgggctggagagctgaggtactggggctacacgtggcaccattctggagtcaggtttacgccatccagtgctgtgcttttgcaggaagcatcttctatgtaggaagtggaaggagctttgtgatgtgatacccatttctctcatctactcccttaggacatgggtctccacccccaatctgcccctcttccaccaccctgcttttaccctgccctgagaccacatcgcccgccacagacagataggaaaggctttatgtggagaaggacttgtaagctgatacacacagcacacacagtgctccctctggtctccctctgtggctatggctaccatctgccctctgctgggccacaggaatgtcttctgttggaggggcagggactccgtcacgggcctctctgacccagctttgtatggctcttggccctgtggtctcagactgtgggcagcagctgtttgggggcaggacatggtttcctcctgacatcagctttggcaagggagcaggcaggggtgggaggccagccctgtggcagcaggctggatgcattgtagctccctgggcaaggctctatgaccataccgtgcccacgtataattcacaggaaagccacttcctgccccacccactccaaggtccagatgagggtgggcgagagggattttggatggacatttcgctcatggcaattggaaatggttttcagatgtatcacggaatgtggaacaaacccaggcaaacttccctgcaatcctataaatcaccagcagatggcgctattggccacacgacaggattctggcatcctggattgctcagtggtagaacttgaacctgggactgaagtagaaactctcaggccataggcttacacactgcaggtggtttacagcaggcagatgggaaaggcatgcctggcccagacgctggccagaaagggtagctgcaagaagcaaatgaggtacctccttcctaccagtacctactattcagagaggcatgttggtctctgagttcaagcctggactacgatccctcacagaattaatttcctggaagaaaaaaaaaaatcaatgcttgtccctcggtgccagacattaaagtcctcaggattggcggtggcgggctgttttgacagggatgagaatggagacacccaagagactgctggaagctcagtcaaaatgcctcatttcctgacacccgcgtcgctgagcacactgtcattgagtcaggacacgcagccacccgcccctgcagccattcatccctccccacccccaccctcccacatttcatttgcgagcccctcggtgtgcagctcggctcgtggcggctgcggcggcagagcagaaaccccaaatgatctatttatggggccgtccttccgtgttgcttgcatattgtaattaagagataatgtcagtggaatagaacgttgtcacccagtaacggcctcccgccgcctcggaaatgtcacggcaaagtcacagatatatcaagcgtaaaactgacgtttgttttcagagcagggaacgcggatcctgggacagcgatacagctgcggcttcatttctgtcttgggggtgatgaatgccagtggatggtcgggcccacaggaggaggggttcttgtctgttgcggagaccaactgggcctgtgctttgcttgacagatggaggataaggctgccctctgggtcccataatctgctgtagccaccaaggtggcccgggtgccctggctcccggctgggcagtgtgttttctgcagcccaagctggctgccagctggccgggttccccttcctgtcaccatgttgtctctggagagctaagctgctgctggggtggcatgtccttggacaacctcagtttccgagtcactcccccagagccacaaggg

SEQ ID NO: 972 - DNA, 2382 bp, Mus musculus
atcccgcgccgaactcgggggcgggctgcccgggccatggcgcataaagcctctggccacctgcagggctactgctgctccggccaccgccaggcacacaccttgctgctgagggagtctcggcttctgtcatctctgtggcctccgtcacctctgtctccgtctccttcaggtcctgagccccgagagccccttccgcgcacgcggacatgggcggcagctccagggcgcgctgggtggccttggggttgggcgccctggggctgctgtttgctgcgctcggcgttgtcatgatcctcatggtgccctccctcatcaagcagcaggtgctcaagaatgtccgcatagacccgagcagcctgtccttcgggatgtggaaggagatccccgtccctttctacttgtctgtctacttcttcgaagtggtcaacccaaacgaggtcctcaacggccagaagccagtagtccgggagcgtggaccctatgtctacagggagttcagacaaaaggtcaacatcaccttcaatgacaacgacaccgtgtccttcgtggagaaccgcagcctccatttccagcctgacaagtcgcatggctcagagagtgactacattgtactgcctaacatcttggtcctggggggctcgatattgatggagagcaagcctgtgagcctgaagctgatgatgaccttggcgctggtcaccatgggccagcgtgcttttatgaaccgcacagttggtgagatcctgtggggctatgacgatcccttcgtgcattttctcaacacgtacctcccagacatgcttcccataaagggcaaatttggcctgtttgttgggatgaacaactcgaattctggggtcttcactgtcttcacgggcgtccagaatttcagcaggatccatctggtggacaaatggaacggactcagcaagatcgattattggcattcagagcagtgtaacatgatcaatgggacttccgggcagatgtgggcacccttcatgacacccgaatcctcgctggaattcttcagcccggaggcatgcaggtccatgaagctgacctacaacgaatcaagggtgtttgaaggcattcccacgtatcgcttcacggcccccgatactctgtttgccaacgggtccgtctacccacccaacgaaggcttctgcccatgccgagagtctggcattcagaatgtcagcacctgcaggtttggtgcgcctctgtttctctcccacccccacttttacaacgccgaccctgtgttgtcagaagctgttcttggtctgaaccctaacccaaaggagcattccttgttcctagacatccatccggtcactgggatccccatgaactgttctgtgaagatgcagctgagcctctacatcaaatctgtcaagggcatcgggcaaacagggaagatcgagccagtagttctgccgttgctgtggttcgaacagagcggagcaatgggtggcaagcccctgagcacgttctacacgcagctggtgctgatgccccaggttcttcactacgcgcagtatgtgctgctggggcttggaggcctcctgttgctggtgcccatcatctgccaactgcgcagccagggtcctgaagacactataagccccccaaacctgatagcttggtcagaccagccacccagtccctacaccccgcttcttgaggactctctcagcggacagcccaccagtgccatggcctgagcccccagatgtcacacctgtccgcacgcacggcacatggatgcccacgcatgtgcaaaaacaactcagggaccagggacagacctgctgccaagtgagcctgatgggccacaggtgtgctcttctaaatggcctgtgagccaggctgtgggaactctagctgctgtcagcccctcctgtaggagctggccctgcccaggctcctgacttccctcaggaagtctttctgtctttctccatcagtctgaaagccttagttcccacagaggacggatctgtcactcctaggggctgggcatatgtcggcctcttgtgccaaggccaggcaagcagctccaggtcctgaccagtttgcacacacactctggagctgtatctggcgctttttctatcgtctctgctatgtcactgaattaaccactgtacgtggcagaggtggcaggcccctcagggtccttatttttcaggcatggggtcaaagctagaggtatgggccgtctacacccccccgccccccggcatctagtgtacctcaccagagggtattcggaggcccagcatcctgcaaccgaccccttttttctactggaagagaaattttatcatcttttgaaaggaagtcatgactgaagcaataaaccttttcactgat

SEQ ID NO: 973 - protein, 500 aa, Mus musculus
MGGSSRARWVGLGALGLLFAALGVVMILMVPSLIKQQVLKNVRIDPSSLSFGMWKEIPVPFYLSVYFFEVVNPNEVLNGQKPVVRERGPYVYREFRQKVNITFNDNDTVSFVENRSLHFQPDKSHGSESDYIVLPNILVLGGSILMESKPVSLKLMMTLALVTMGQRAFMNRTVGEILWGYDDPFVHFLNTYLPDMLPIKGKFGLFVGMNNSNSGVFTVFTGVQNFSRIHLVDKWNGLSKIDYWHSEQCNMINGTSGQMWAPFMTPESSLEFFSPEACRSMKLTYNESRVFEGIPYFTAPDTLFANGSVYPPNEGFCPCRESGIQNVSTCRFGAPLFLSHPHFYNADPVLSEAVLQPNPKEHSLFLDIHPVTGIPMNCSVKMQLSLYIKSVKGIGQTGKIEPVVLPLLWFEQSGAMGGKPLSTFYTQLVLMPQVLHYAQYVLLGLGGLLLLVPIICQLRSQGPEDTISPPNLIAWSDQPPSPYTPLLEDSLSGQPTSAMA

SEQ ID NO: 974 - DNA, 2513 bp, Mus musculus
atcccgcgccgaactcgggggcgggctgcccgggccatggcgcataaagcctctggccacctgcagggctactgctgctccggccaccgccaggcacacaccttgctgctgagggagtctcggcttctgtcatctctgtggcctccgtcacctctgtctccgtctccttcaggtcctgagccccgagagccccttccgcgcacgcggacatgggcggcagctccagggcgcgctgggtggccttggggttgggcgccctggggctgctgtttgctgcgctcggcgttgtcatgatcctcatggtgccctccctcatcaagcagcaggtgctcaagaatgtccgcatagacccgagcagcctgtccttcgggatgtggaaggagatccccgtccctttctacttgtctgtctacttcttcgaagtggtcaacccaaacgaggtcctcaacggccagaagccagtagtccgggagcgtggaccctatgtctacagggagttcagacaaaaggtcaacatcaccttcaatgacaacgacaccgtgtccttcgtggagaaccgcagcctccatttccagcctgacaagtcgcatggctcagagagtgactacattgtactgcctaacatcttggtcctggggggctcgatattgatggagagcaagcctgtgagcctgaagctgatgatgaccttggcgctggtcaccatgggccagcgtgcttttatgaaccgcacagttggtgagatcctgtggggctatgacgatcccttcgtgcattttctcaacacgtacctcccagacatgcttcccataaagggcaaatttggcctgtttgttgggatgaacaactcgaattctggggtcttcactgtcttcacgggcgtccagaatttcagcaggatccatctggtggacaaatggaacggactcagcaagatcgattattggcattcagagcagtgtaacatgatcaatgggacttccgggcagatgtgggcacccttcatgacacccgaatcctcgctggaattcttcagcccggaggcatgcaggtccatgaagctgacctacaacgaatcaagggtgtttgaaggcattcccacgtatcgcttcacggcccccgatactctgtttgccaacgggtccgtctacccacccaacgaaggcttctgcccatgccgagagtctggcattcagaatgtcagcacctgcaggtttggtgcgcctctgtttctctcccacccccacttttacaacgccgaccctgtgttgtcagaagctgttcttggtctgaaccctaacccaaaggagcattccttgttcctagacatccatccggtcactgggatccccatgaactgttctgtgaagatgcagctgagcctctacatcaaatctgtcaagggcatcgggcaaacagggaagatcgagccagtagttctgccgttgctgtggttcgaacagagcggagcaatgggtggcaagcccctgagcacgttctacacgcagctggtgctgatgccccaggttcttcactacgcgcagtatgtgctgctggggcttggaggcctcctgttgctggtgcccatcatctgccaactgcgcagccaggagaaatgctttttgttttggagtggtagtaaaaagggctcccaggataaggaggccattcaggcctactctgagtccctgatgtcaccagctgccaagggcacggtgctgcaagaagccaagctatagggtcctgaagacactataagccccccaaacctgatagcttggtcagaccagccacccagtccctacaccccgcttcttgaggactctctcagcggacagcccaccagtgccatggcctgagcccccagatgtcacacctgtccgcacgcacggcacatggatgcccacgcatgtgcaaaaacaactcagggaccagggacagacctgctgccaagtgagcctgatgggccacaggtgtgctcttctaaatggcctgtgagccaggctgtgggaactctagctgctgtcagcccctcctgtaggagctggccctgcccaggctcctgacttccctcaggaagtctttctgtctttctccatcagtctgaaagccttagttcccacagaggacggatctgtcactcctaggggctgggcatatgtcggcctcttgtgccaaggccaggcaagcagctccaggtcctgaccagtttgcacacacactctggagctgtatctggcgctttttctatcgtctctgctatgtcactgaattaaccactgtacgtggcagaggtggcaggcccctcagggtccttatttttcaggcatggggtcaaagctagaggtatgggccgtctacacccccccgccccccggcatctagtgtacctcaccagagggtattcggaggcccagcatcctgcaaccgaccccttttttctactggaagagaaattttatcatcttttgaaaggaagtcatgactgaagcaataaaccttttcactgattc

SEQ ID NO: 975 - protein, 503 aa, Mus musculus
MGGSSRARWVGLGALGLLFAALGVVMILMVPSLIKQQVLKNVRIDPSSLSFGMWKEIPVPFYLSVYFFEVVNPNEVLNGQKPVVRERGPYVYREFRQKVNITFNDNDTVSFVENRSLHFQPDKSHGSESDYIVLPNILVLGGSILMESKPVSLKLMMTLALVTMGQRAFMNRTVGEILWGYDDPFVHFLNTYLPDMLPIKGKFGLFVGMNNSNSGVFTVFTGVQNFSRIHLVDKWNGLSKIDYWHSEQCNMINGTSGQMWAPFMTPESSLEFFSPEACRSMKLTYNESRVFEGIPYFTAPDTLFANGSVYPPNEGFCPCRESGIQNVSTCRFGAPLFLSHPHFYNADPVLSEAVLQPNPKEHSLFLDIHPVTGIPMNCSVKMQLSLYIKSVKGIGQTGKIEPVVLPLLWFEQSGAMGGKPLSTFYTQLVLMPQVLHYAQYVLLGLGGLLLLVPIICQLRSQEKCFLFWSGSKKGSQDKEAIQAYSESLMSPAAKGTVLQEAKL

SEQ ID NO: 976 - DNA, 107310 bp, Homo sapiens
  misc_feature (1)...(107310): n = A,T,C or G
ccatcctcccgcctcagcctcccaaagtgctgggattacaggcgtgagccactgcgctggccgttacctccaggcttctaccgcagctgttggacactgcctctgagcctctctttctctcctctaattcctttcccaccacagaatcagttcctgtagtagtctgagcaggaagtggagagaacactcaaaattggggactttgaagatatatacaaaggcgcagggaaaacgaaagggagagtgaagctgctccccaccctggggctgaggggaggagggcagggagtgtcacctggaacccgggaggagagaggagtcgagagaggtctgccttccagggaccgtgacctctgctcaagagctgcagccagcctgtgtgtttcagtgcagtgcagttggggtatcacagaccaccccacatgcagtgacttggaggtgctattaatgatactattggggcaagaggtataaaccggggtgactgcaccgtctaaggtgcaggggtccctgattgtctgttccttgggcacactgagcacctccctgacacagggcctttgcacttgctggtttgtttgccagaaaggtcctccccaggttccggtctcccccggccagcccccatctccctgtggcattacctttttatttctctcattagcacgtagcaccatctataatccttatctatttatttgcttatacatatatttatagataaataaaaaaacatatatatattttaatatctctctctctttcccttactaaaaaggccagggcagaccagacgtggtggttcacacctataatcccagcactttgggaggtcgaggtgggaggatcgcctgactccaggagttcgagactagcctgggcaacatagtgcgacacccatctctattaaaaaaaataaaaattaaaaaaaattagcttggctgggtgcaggggctcacacctgtaatcctagcactttgggaggccaaggtgggtggatcatttgaggtaagagttcaagatcagcctggccaacatggtgaaaccccatttctactaaaaaatacaaaaattagctgggagtggtggcaggcgcctgtagtcccagctactcgggagggaggctgaggcaggagaatcgcttgaacccgggaggcagaggctgcagtgagctgacatcacaccactgcactccagcctgggcgacagagcaagactcttgtctcaaaacaaaacaaaacaaaaaattagctggtgtggtggcacatgtctgtaggaggctgaggcggggggatcgcttgagcccagggggtggaggctgcagtgagctttgaactccagcttgggtgacagaaccataccctgtctcaaaaaaaagtaaggccagggcacagaggacctgcctgctttcttccccatctacccccaggccctagcacacagtaggcctgatacatagcgagtgctcagcaagtatttgccacataaatgaatgaatgagcatgtccatcccttctctggtaggtaggacaggaccaggtggtctcagaggaatcttctggttcctgggataggaatcatcctcctttctccagctgctgttgagagtggcagctgatagaaacttctgtcctccagtgacctggcccacggagcaacgtattagctcgcggctgccagctgggtcctccccacacacttgcacctttgtcctggaaagcacgtctgtgttggagggttagcccttgccagagaggacatatcagagtccccaaaggccagggacaaaggcaaggattgatcgccagccctgagtcagagaggaaagactcctggagggaagtcagtgatcggggactcagaaaggcgtgattctgaaggaagacaggatttacagggcatctcagtctgctcaggcttctaaaacagagtaccatagacggggagagcttacagacggcggacatctatttctcacatttctggagggtgggaagtccaagatcaaggcgccagcagatttgatggtggtgaggccctgcgtcctggttcacagatggcagcttctctctgtgtccttgcctggtggaaggggagatgcagctctctagagcctcgtgtgtcagggccctaatcccatcgatgaggcctctgcccccatgacctcgtcacttcccaaaagccctacctcctaataccatcacatagtaattaggtttcaacgtacaaatttcaggggacacattcagactctagcaccggggctaaagtccaggggcagaggctaagtttctggaggggctgtttaggggctctggagaccttctctgatattcacaatattgcagggggcattttgacctactgaagagaaacagctcctaaaaagtcacttgtagcaacatgagagattcgcattctgattaaaatctatgcaggcacctcctgcctcagagtcgttgccctggctattccctctgcctggaatgttcttccctggatctcaacacattcctgcacttcctgcaggtctttgcccaaatgtcaccttctcactgaggctgtcttcaaacaccccatttaaatggcaacccctctcccccagtagcatttacactgttctgtttttcccctaaagcacgcatcgtcctctaactgcctgtcccatggaaatgcagcatgcacaaaccacacacacaattttaaaaattttatgacagaggaacctgttctgaaaaaagaaaaaaaggtaaaagaattttaggggtcatattttaaaaagtaaaaagaaacaggtgaaattaatttaacttgtaatattattcaacccttggtcagtgtgtgtggatgaaccacgtctaccagagtccaaggtaaaagcctgcctctgccgccgggccacgcagctgcctggcatggtggcctggggcaagttgctcagcctctctgtgccccggctcccttatcggtgatattcaaatagtgtcatttcaatgtgtaatcaatataagaatattgagatgttttacgctcttttcatatgaagcctttgaagtctgggatgtatatgacatggcatatctcattcagactagccccgggtcaagtgtcccatagccacatagggccagtggctactgtattggatagcacagctctaatatctttttgttttgttttttgagatggggtcttgctctgtcgtccaggctggagtgcagtgatgccatcttggatcactgcaacctctgcctcctgagcttaagtgatcctcccacctcagcctcctgagtgtctgggaccacaggtgcgtgccaccatgcccagctaatttttttttttttaatttattgtagcaacagggttttgctatgttggccaggctggtctcaaactcctgagctcaaacaaagtgcctgcctcggccaaagtgctgggattacaggtatgagccaccgtgcccatagctctaacattttataaaatccaccaatgatgatgtttatcactaattgttattgcttgtctattaacataccggacccgcaaggctaggggcttgcttatggtccctgctgggtccccaaacgcccaacatagtgcccagcacagagtaggagctcaatgtgaactgaatgagtccagcaggcacacgtgagctctctttcctccctcaccagcagcaatccaggtggcagatgtggctacaatgctttcctggctgggcgcggtggctcacgcctgtaatcccagcactttggaaggccgcggcgagtggatcacttgagcccaggagttcgagaccagcctggccaacatagtaaaactgcatctccattaaaaatacaaaaattggccgggtgcagtggctcacacctgtaatcccagaactttgggaggccaaggtgggcggaccacctgaggtcaggagttcaggacaagcctggccaacacggtgaaatcccgtctctacaaaaatacaaaaattagccaggcatgatggcaggtgcctgtaatcccagctactcaggaggctgaggcgggagaatcgcttgaacccaggagaaggttgcagtgagctgagatcacaccattgcactctagcctgggcgacagagtaagacttcttcttaaaaaaaaaaaaaaaaattagccagtcgtgtggcatgcacctgtaatcccagctgctcaggaggctgagacagggagaactgcttaaatccgggaggcggaggttgcagtgagctgagatcacaccactgtattccagcctgggccacagagcgagtctccacctcaaaagaaaaaaaaataaggtttcctcttcctttgctttttattttgtcctttctcgcacccgtctctttgctttccttcactttcttcctctttttcctttccctcagcaaacagcgtagtggtcatgtgtgtggcaagtcactggttcacatctctgctctctgctcgccaggagccagctgtgcctcctttaaggaagcccttcagcttccattcactgtgttctattgccgctggggatgagcgtgattcttcccaggctggggtgggaatgcggctgcctgcaggaggtgttggctccgcctcacacaggcaccttgctaagcatatgaccaagatgagcccatgtaatcctcatgaccaccccagggtgcaggcatgactcagaccaatcccaaggcaccgataagggagccgaggcacagagaggctgagcaacttgccccaggccgccatgccaggcagctgcgtgttccggcggcagaggcaagcttttaccttggactctggtagatgtggttcatccacacacaccgaccaagggcctactgtgggccacgtgctgttggggagccgggggcactgcaatggacgaaacaggcagattcctgccccgtggagctttttttatcctagaagaggaaggaagccaatcaaacaagcaaacacccgccctggagggcggtcggtgcacagagagaaatgaagcagccaagggggatagggagggtcctatgggtggtttgtaactttcaaagggtgggcaggaaggaagtcattgctgagaagatggcattggagcaaggacctgaaggaagggagggtgagtctcctgggtgttagggagaggagcattccaggaggggaccagggagtgcaaaggttctggggcacgagccgggcaacaggtggaggagctccaggaaggaggatgtggctggagcagagtgggcaaggagagggagggggatgaggtcagggagatgtgcccatctgggtgcgttttgactttgtctctctagtatgagatgtggtgatcttgtgggccatggtgagggctttggcttttatgctgaatgaggtgggagccacggaaaggtttctttctttttgttttcttgagagacagggtctcactgtgttgcccaggctggagtgcagtgacacaatcatagctcactcactgcagcctcgacttcctgggctcacgtgattctcccacctcagcctcctcagtagctgaaactagaggtgtgtgccactttacctggctaactttttattttttgtagagatggtgtctggctgtgttgcccaggctgatctcgaactcctggcctcaagggatcctcctgcctcagcctccaaaagcactgggattataggcatgggccaccatgcctggccatttctttaaaataacagttttcattgagatataatttgcatatcatacattcacccatttaaagtatataatttggccaggcatgatggctcacacttgtaatcccagcgctttgggaggccagggtgggaggatgaccagaattttgagagcagcctgggcaacaaagtgagaccctgtctcaacaaaaatgaaaacatcaggtgtgcatagtggcatatacttgttgtccaagctagtcaggaggccgaggcgggaggatggtttgaacccaagacttcaagactgcactccagcctgggtgacagagtgagacctttttttctcttgaaaaaaagaaaaagtaaataaagtgtgtaatttgatggttttttgtatattcacggagttgtgcaaccatcattaccatcacttttaccgtcacttttagaacattttcaccactccaagatgaaaccccaaacctgtagcagtcactcctcattctccccagcccctggcaaccactggtctactttttgtccccatagatgtgcctactatggacattttatataagcagaatcatacatgtggcctttgtgtctggcttctttcacttatcaatgttttcaaggttcatccatggtgtagcatgcgtcagcccttcattcctttttatgctgagtcatattccagtgcgtggttatgccacattttatttacctattcaccagctgatgggggtgtgggttattttcactgcttggctgctgtgaacatttgtgtccaggcttccgtgtggacatgctctttcctttctcctgggcatatacccaggagtggaactgctgggtcttaggggacccctatgtttaccttttgaggctgcaccattttacaatcccacaagcacctcaagaggcttccaactcctccaggtctttgcctgcagtcattctccgtctttgatcacgaaaggactctgagcagaggaggaaaagcatctgacttgattttccaggagccctgtgacaccatgttgatcatattttgttatcaacactctttcttttcttctgtatcttcgactttccccagggcaagacctctctctcaaacatgacgaagtctttttttcccttcttaagctgcctccctgccaccggaagtgactcccctcagcaaggccaaggtggctcacgtgtcccatcaccctttcatctctgcccttctctctcgagtgacagcatggcgtgacatgagggctctccagccatggccttgcagccctcttgggtaagcatcacgtacatttggaccttgaagacttggtcatgaatcagagttagattgggtgagatggtcaaggcaggtcagtatcaaggaagtggaggagggtgtcagggccaggcagaccgcagattttagttaactggctaatttccgagaactacaaaagtcattaaaaaaaaaggcaactgcatagctgaaggctgttgaaggccttaaggaattcaatgaagtgatattaattaattaatcaatcgatcagttacttgattaattaatgagttaattagctgattgagtaaagtatttattgagtacctgctatgtgccaggcatttttccaggtgctggagatacatcgataagcaaaacagggtcagcttctgtctctcgggagctggaggagatgaacaaggaaacagatgagaccatttcacacaaagcaaggtggcctgacagagtgggctgggactcctgttttcgacagatgcaacagcaaaggcttctctgaggagtgggtttcagctgagcccagaagaggagagtggggagccatggaaggatccaggggaagcgtatcctagacagaggaacaggaagtgcaaagttcctgacacaagaaaaagctggggatgctcaatgaactgaaacaatgggggagagggcaggagatggaggcagagagatgggcgggcgccagttcatgtgggtccggaaaataacgacgacactccccagctcagttgcactgacacattccagggactgttctaagcactggcacattttttgacttgtttaatcctcatggtagcccttggaaaggggctcttctaatccccgtttcgtagatgaggagactgaggcacagaaaggcccaaaccacttgccccaggactccaatgtgggaaaccccagagcctggatttctctgaacctgtcccccggggctaccacagtctcacctcagccactctgacctccctcaggagttgggccctgccccttggggcactggaccatattcggcctccttagaggaaggcagtgccaggcaaagctgtctaacgagaacatagcaggtgctctgtaaatattggttcaggcgaagacatgttgcttaaggatggccctgcgagaaggctgctttcttctggagttaaataagaggtttagaaagcctccctcggagcactcaaggactgagcctgccttacccatgtgctggggacaccaccctcctgtccctgtgtaacccaggagtctcttctcagtaacttcattcagaaaatgaggggactggccagcacttcagggaccagaaggcaggccaggtggggtgtggtggaggacttcaggggggcgtggagggcttcagggatacactcacccatctaagggcaactgccacttagtgccagcccacttctctcccttttttcttttttctttttcccccagggtcttgctgtcacccaggctggagtgcggtggtaagatcagggctcactgcagccttgaactctgggactcaagggatccttctgcctcagcctcctgagtagctggggcgacaagcgcatgccactgtggctggttaatcttttcattttctgtagagactggtctcactatgttgcccaggctggtctccaactagtggcctcaagtgatccctcacctggaccttccaaagtgctgggattacagttgtgggccaccatgcaccgggcctgttctgttttcttggagcacttgcctgcaattatccttcattcatttgctcacgtgctcatcattggtttccctcttcattagaaagtggggacttggtttgggttaactaagcttccctgtgcatcagttttcatttctttctttctttttctttttcttttctttttttttttttttgagatggagtttcgctcttgttgcccaggctggagtgcaatggcgctatctcggctcgccacaacctccgcctcccgggttcaagcgattctcctgcctcagcctcccgagtagctgagattacaggcatgcgccactacgcctggctaattttgtattgttagtagagacggggtttcgccatgttggtcaggctggtctccaactcccgacctcaggtgatccatgaagtccacccgcctcggcctcccaaagtgctgggattacaggcgtgagccacctcccagttttcttattgtaaaatggagccattgtgtgcaaagcactcaggacaggggccagcacctagaaggctcctcagtcattcattctagaatatttactgtgagcaggcattccctgccaggccacgttctagagctcaggacgcgtgggggggggggcccgcctcacgggttggcatcccagttggagcacatggtcagaatgcaaggacgcaaatgaacgtgaacctgccagggggtgctcagtcatagggtgatggtggcaccagcgttacgaaggatagggccaggcggatacctgggagaacagaattgcctgtgcagggtgtatggaggccctggggctggagcctgcggggcttcttccagggacagtgaggctggagatggactgcggagatgagggtctagaaggtggtggcggggcatgtggaccgttgtaagggctctggggttcctgggtgggctggcgaagtcctactcacagtgaccaaccatgatgatggtcccgatagaggaggagagggaggaggagggaaaaggaagggtgaggggctcacaggggagagctgggaggaggggagacataggtgggggaaggggtaggagaaaggggaagggagcaagagggtgaggggcaccaggccccatagacgttttggctcagcggccacgaggcctcctcagctcccgccccaaaacggaagcgaggccgtgggggcagcggcagcatggcggggcttgtcttggcggccatggccccgccccctgcccgtccgatcagcgccccgccccgtccccgccccgaccccgccccgggcccgctcaggccccgcccctgccgccggaatcctgaagcccaaggctgcccgggggcggtccggcggcgccggcgatggggcataaaaccactggccacctgccgggctgctcctgcgtgcgctgccgtcccggatccaccgtgcctctgcggcctgcgtgcccggagtccccgcctgtgtcgtctctgtcgccgtccccgtctcctgccaggcgcggagccctgcgagccgcgggtgggccccaggcgcgcagacatgggctgctccgccaaagcgcgctgggctgccggggcgctgggcgtcgcggggctactgtgcgctgtgctgggcgctgtcatgatcgtgatggtgccgtcgctcatcaagcagcaggtccttaaggtgggtgagggagaccccagggggtccgcgcacggacccgggctgttgggcgctgggcgccgggaggacccgcgcgttgcggtgggtgggcgaccgcagcggaatcggcgcccgggcctggcgccgcagagcacgagggaggccaggcgcttcgggaggggctgctgcccgcctccccaccaccctcaccgccccagactgaggctaggggggaacccaggggctttgctggaggcgcaggccagggttggggaggcctggacgggagaccacccgggcgcctgacccgccctaaagggtctgggcgcccacgacggatcaggagtgtggacaggttgcttccgtggtgccgcccgaaggagcccaagagtgtgtgtgaacgtctgctttcacagcagccggtagcagggtccggtaaaattagagctgcactttgcttgtatcctgtgagcccaggaggacaggaaccttctgtgagacccacgtgggtgcccagctcacatggtaggtgctcagctgagcatcctccactgcccagaatctccccataggaaccctctcccagaggcagaatgcgcgactctgttctccctgctcactgcctccatgattcagtctggaaactataagccgcttttctccccagattcatgcagaggcaggcagcagcccaaggtcctctgagtgcacgcagccttaggtctttcctctgatcctaactttgcataccattgccctttcaaccagggagacagattaggcggtcagctggtctgcagacggacagactctgccctgggtgcctgggtggcctgtttgaatgagcctggagttaggggaagggctgggagattgcagagtatcacatttgaactaaaagccatttagagttttgaagccctggaacccacacatgcagtggcggggaggggaaactggggctcactcttatcaaagttctagccagatgcagagctggggtgaagatgtggacattgtcactctaatggacgtcttttccccttggcctgcctctttggactgggtttcttaagaatggttccttgtccacatttcatgtctgttccctcattcacagagcgaatgaatgagtgaatgaatgaaggatctgcttagatctggctgccacacttcttgggacccagctagctggccttaaagatggagcaacatatggtctctctcaaggtctctgggtgagcagttgtctagggcatcttagccacgttgtgtctatttttgatttttcaaatcttgtcccgccaaagcctgtaatctgactgcaaagaggtcccggtggatggtgacactgtctctggggatggcaggaaaatcagcagaatggcctcttctcccccatgacagctcagaggctttctctgttacactgagggagctttatttttctgtggcctactcatactgaaacgtgtgtgtcagtgacagccttgtggctgctgcagtgccaggaccccactgtgtgtatgcagggtccctagaggggctatcactcaggcagttcaagcatgtgaccctgtgctgttgagtgagcacctggtctcttgctatgggagtgtggggacttatgccaggtaaagagtcttgccaactcagttattcgggggcttatttcaaggtgttttctttctcaggatgtcatcaggttaagtatgtcagtagggtgtgtgtgtgtgtgtgtgtgtgcaccacacatgcatgcaccaccaaatttccccactcctctcctgggcttctaaagaggaaaaccacattgtcctcaattgtcctggagctaggagcatctggcttaaagttgaacaggagcctcccagcatccttctgtggatatcccaaaggcgattggtttggggccgagtggtgtgaaggcaggaagacacgcccagcccaagacggccacttctggaaccgcccaggctggagcagcggccaagtgccttagcatggaagaagagagcctgtgttcaggggaccaggcgggtgagacacacgcataagcagggactgcccgctggtgttttctttggctacatgagtctgtgtgcaacttgaatgggaggccttgtgcttttatttttttttttaatatgctttttggttaacaacagaagtccctacagttggccctctgtgtctgcaggttctgcatccgtggattcaatcaactgcagatgaaaagttttcagaaaaaatccccccaaaataacaatacaactaaaaaaagacataaaaacaatactgtataacaactattgacatagcatttacatcgtattaggtattataagtaacctagagatgatttaaagaatacgggaggatgtgcataggtgatatgcaaataccacagcattttatgtcggggacttgagcatctgcagatcttggtatctatgggggtcctgaaaccaattcccctctgacattgagggacgactttatataaaatatatgaatacttgctcgtaaaaaaaagttcaaatggaggaaaagagagaaagtttcccccattttattcccctcctgagctattatcaccatcattgatgtggatctttctagacccttttctgtgtaccaggagcctgtatgtatacatattaatatatattttacataacttgaactaagtgtaggtgaacttgaacatgtataattatcttgcaatttgtttttcaattcaaagataccagctgaaaaattttccatgtctcagcaataagtctaccccgcgttttccttcatcactgctggtattcctttgaatggttatagacttgtttacctgtttctccattgactgatcattttctctgtcacaaatgacagcgatatcccgacacatccctcttcgtgtggttcatgaacatttccatagggtggatttctagaagtggggccttgggagcaggtgtgctcagtttgagttttgatgattacggccaaattgcccttctgcacagctctgttgctgcatccacccacaaggtatgggactgtgctacttcccctatctctgccatcactggtaattactgatttatcattaccattttttggtagccaagttcccgtgtgtctctggtcctccaaggaaggcccagctggtggacatgggggagaggcccctcactgcagctgggctgcaaaaaagggatgctcatcttccgaggctgctgtcttcaatgatgagctggggtgaagatgtggatattgtcacactagttgacatctttttccctttggcctgcttctttagactgaatttcttaagaatggcttcttgtccacatttcatgtctatgtccttttcacagaacttggatgtgtgcccccagggatctgaaccatgtcttcattattcaccggatcacctgaggtcaggagtttgagaccagcctggccaacatggctaaaccctgtctctactaaaaaatacaaaaactagctggacatggtggtgcacgcctgtaatcccagctattcgggacgctgaagcaggagaatagcttgaacctggaaggctgaggttgcagtgaactgagatcacgccactgccctccagcctgcgtaatagagtgagactccatctcaaaaaaaaaaaaaaaaaaaatgaaggaacttagaaatatgtctcagcatgggtaggccataaaaacacattactaattgaaaaaagctctggtgctatttatgtttaaaaaaaacccaccaaacaatattctatattttctttccatttttatttttattttcgtagagacaaggtctcactatgttacccaggctggtctcgaactcctggccttaagtgatccttctgccttggccttccaaaacactgggatgataggtgtgaaccaccgcgccctgccattattttcaatggcttaatattagaatatgttaaagtttgggaaaaggtgagactaacagaagtggctactctaatgagagaaggcaggacactgggggtgtggccaaaggaaacctaatactttatctgtaatgctattttttttttcttttttgagatggagtctcgctctgtcgcccaggctggagtgcagtggcacgatctcggctcactgcagcctctgcctcctgggttcacaccattctcctgcctcagcctcctgaggagctgggactgcaggtgcctgccaccacacccagctaattttttttttgtatttttagtagagatggggtttcaccgtgttagccgggatggtcttgatctcctgaccttgtgatcttcccctctcggcctcccaaagtgctggaattacaggcgtgagccaccatgcccggccattatttttgttttaacagagaaaatgtatccacatgctacgtgtttgattaaaaattacaaggccaagcatggtggctcaaacttgcgatcccagcactttatggggctgaggtgggagggtcacttgaagccctgagtttaagactagcgtgggcaacatagtgagacccccatctctacaaaacaaaacaacaacaaaactaagctggtgcatggtggcatgcacctatagtcctagctacttgagaggctgaggtgggaggatatcttgagcccaggagctcgaggctgcagtgagctgtgtttgtgccactgtactccaacctgggcaacaaagtgaaatcccatctcttttttttttttttgagacggagtctggctctgtcgcccaggctggagtgcagtggtgcgatctcggctcactgcaagctccaccttccgggttcacgccattctcctgcctcagcctcctgagtagctgggactacaggcgcccgccaccgcacccacctagttttttgtatttttagtggagacggggtttcactgttttagccaggatggtctcaatctcctgacctcgtgatccgcccgtctcggcctcccaaagtgctgggattacaggtgtgagccaccgcgcccggccaaaatcccatctcttaaaaaaaaaattacgaatgaacagatacatagttttcctcaaagactggccagatgaatgcgccacacagaccgatgaggcacactgcaaaggggccctgtggtcgaggttgcttggagaggctttggggaagcgcaactcatttcttttcccttctgccagtgggtaggattggagagaggtgtttggacaggcacactaagggccgtgattgtgaacttcatggcatccattcatgggcagcttactgtgcaccaggcagggttcaaagcacctttgtgaaaattgtctcatttagtccctgcagagggccgtgacatatgatttattgtcttcagtgtccgttaaggagacaagctgaagagagtaatttgccccaagtgacctcgctagtgtatgtgtgtgcgtgcatgtgtgcacgtgtgtgtgtgtgtgaaggtgtctgtctgtcccagaggcagatgccatgagaatggggactcttgctcccattccctggatctgagcctggcatgcagctgtgctcaggtatgtgggtgagtaacgaaggcctggttcaggtcctggggggcacacatccaagttcccgtatgtctctggtcctccaaggaaggcccagctggtggacgtggggagaggcccctcactactgctgggctgcagggaaggggtcatcttccaagaccaccatcttcaatgataggcctcatggccttcttccatgtccaggagagaacctgggtcccctctgctgtctttaagttggttttctagatggactcaacctcggttgccttgtcctgctgctgggcttcccccacctatgatccctgtctcaataaacggcacctccttttgtttcccctggggtagaggcaaaaaccttcggtcatctttgcctgcatgcttttttcctgatacccctgtatctgctgaggcaggggctttcccatcactgtcactgcagcgtccccgagggccatagcagcgcctgagctccttgccaccccttcaacaccagtcaggttacagaatgaatgaggcgggcgcgacccccagccctggcctcaggctctttagctcacccctgcctccctcagccagagccacacagtgagccttggggagccccggcaccagggccagccagggatgtcaccggctgtccctgagtttgtgccttttgggaaatctttgtcaatcagttaaaagatgggggttgatgggagataacagtcaatgggcactcgttgtggccagatactgttccaagtgtttatgtgcattattcattttagtatctaaaataggtactattgtgtcttattttattgagggaaatggatgcacagaggcggaaagtaacttgccccatgtcacatagctccaagcggttgaatcaggatttcaagtctgggggccgactccacagctggtcccggtggcctctgcgcactgcgtcctcccggttctccgtgtgtctgagcaggtcgactgcatgcttaaggcgggcggcggggggtgcccttcttatattctcttcctgggctgccccttccttttctgtgcatcaccagggaacagcagggtcccttcgaggctttgtcctaatcatcaccccgccaaactttgctggtgcagagtgcaccctggcctctcccttccgggggtagtctgagaccagggacatgttctccaatcaaaggcaccaagtgaggctcccggggaggccacctgttcctagcccagggctcccagtgaccccgggggctggactcccacccatcctgcaggggccgcccgctctgcgcctttatcagcccccctgcggaacctgggggggaggcccagtgtctccacctaccgggcgtttcctgtaggacccccttgtttggacatgtggggcaaagccctagaactgatcactgggcacaggtggggagggggctcctcgaggacagcttggatcacaggtgtgtgccaattctgttttgtttttcttcctctttcctgccattgaacttcctactccttctagcatgtgagagacagcttcaacttactccctggcgacggctgaaaaacatgggctatttttagtttgtgtgagtctagtttatttgctcctggtagatttgcctctccctgtcttcgtgagtgtgtgtgtgtttgcacacacgtgtgttggtgtgtgtacacaagtgctgatggtgaaaacagtgacacacacacctgtgtaggcatgcacacacctgccttgatgtgtgacgacgtgatgatgtgtatgcagacacctgtgttgatgtgtgcctacatatgttgacacaggcacacatggtgtgtctgtacatgcaaatggacacacatgaacacacgtgtttatgcatgtccttgtgtgttgatgtgtctgcacatacatgttgatgtgtcccgctgtggttggcctttctggggccaggcccagcacctggggtttccaggaaacattccctgtcccttcccggaatggccggtacttgctgtgcctccgccgggagatgcaccctgattaactagaacgtggcgaagctcagccacctggaatcgccttaccctggcctttggtttctagcaaatgggatggaagtgagtccccatggagggcttgctccatgaaggtgtttttcctggatgagtcttggtcccagtggcgatttgctgcaggcttgttggcactgtcattcgtgggtcctgcatggaggttccttagtgtccagagggtgattccatgtctgtggtcagcaaaagagaggcccctggggccataagccacaccccccaaggctgaacccagagagtttgtggtttaaatcttgggcctggaggattctgtggaggagagttcggtccaggccttctgctccaggaggcgctggcagctccgacaccacagacacattaattgtgcggagaattcaacgctagggctcagtcaaaaatcaaaaacgcaaaacaaaaagagaatcccttttatttacctcgtctccctccccctgtttggacatgaccttgagctctgctggcccacaagtggccaggctggagctgtcttgcaaagagaaacaaaaacaacacaaaaagctgcgttcttgactttgaagccttaaagggcccaggggctggctccctgtgggtgttgggggcgattttcctcccaaagcctgcgtgagatatggagacactccgcctgctcagaagctccccaggtcccgggttccaggaagcctcatggcccaaggcctggccgtcttaattttcttgttttctttccctccactccactgtttcttcctgttcactgattgcctgtgctggggagggggaaggaacgggaggggcctgaccttgttcacttcctggcattttgggtgaagttccttacaccttctctggaagcttctagaaggacccttgaggcgctttaaatctccattctctgggttttcctcccaccttcctggctgctctgtcttcttgcctgctgatgcctcctcatctccctggcctcctgcctcctgctggtggagctccaggcatcctttctgtgtgtcctcatccctcatccctggggtgggctcctccagccttgcgcctgaatggcatctctgtcctgaccactcccaaattggtatccctgggcccagacctttcccctgaaccccacccccgagtgtccaacagcagagtccgtatctcaactcggggtcaaaggcagctcacgctcgccccggctggctcctcatcaccctcggccacacctgtggctcccaccagcttcccactccatcatagcccccccatcttccagttgcccgggccaacatcttgcactcagccttgactctgttctctccacttccctcagagaacccgtcagaaagttttctagcttcatcatctaaatatacccagattccaactacttctcaccacgcccgaggcgccatcacctctggtccaaggcaccatcacctctcccccagattcctgcatccgcctcctcactggcctccctgtgctcatccttgctccccagtggggtttctcaataagcagccatgggagcccatcaagattgcacttagcacctcctcccctcaaagccctgacatggccagacccgtcccctaggagtcacagccaggtcctaacctggcccagggcctgtgccatccacccctgccacttttctggcgacgtccgcattcccttttcccttgcacaatggcctcctggccattcctcagccccatgggcccaatcgccttagctctcctgacacaagccctctcatctcccgtaggtctctgttcagctctcacttgctcacggagaccctcccctgattccgtttgtgcatcatgcaggttcccccttgtccccctgtgctgccagccctccttacccgctctgcttagacctgtcagccactgtagataccctggaacttccctgggtatcatgttgattgtttattgtctatttctccccatgagaatgtcggactgtgagggcagggacctttgtgttattcgttgccgtgacccaagcccctggaacaatgcctagcacataatcgcaggttctcaaatatttattgaaaggatgtttaaaagacaagggttgtttcacaggatggttcgtgaccagtggcaggttgtggtcctgtgcagggcaatggggcctactcctccacctgccgtggccgtcgccccagaccgagctgccaccgttgtttcccagtggatgctggagtgtcatcatggggctgtttgctctgctgatttataccacactgttgtcacttctccccatcaaagccaggatgctctttaaaacatgcaaattgggccgggcacagtggctcatgcctgtaatcccagcactttgggaggccgaagtgggtgggtcacctgaggtcaggagttcaagaccagcctggccaacatggtgaaacctcatctctactaaaaatacaaaaattagccaggcgtggtggcatgtgcctgtaattccagctactcgggaggttgaggcaggagaattgtttgaacccgggaggtggaggttgcagtgagccgagattgcaccattgcactccagcctgggtgacagagcgagactccgtctcccaaaaaaaaaaaaaaaaaaaccaaaactatgcaaactggatcatttcaagaagctgaataaaatcttcctgcatttggtatcaaagctgtgagcctcattttcgtgggccctgcccatctcaactcagcattctcaccccactgcaacctcacaggccttccttttcctccaacgtgtcacatgctgtcctgcctcagggcctttggaagtgcttttctttctgcctggaccgtctttttgtctccctggctcttatgcttggttcctcttttatgtttaaatgtaaccttttgaagcttaaatgtaaccttttgaagaagacaccccgtgattgcccaccccacccaatggacagttgccccccacgtccactgtctgtgccatctgtgtggtttttcagctggagggcaatggccccatctcggctcactgcaacctcctcctccccggttcaaacgactctccagccttgcctcttgagtagctgggattacaggcgtgcaccactatgcccagctaatttggtatttttagtagagatggggtctcaccatgttagccaggctggtctcgaactcctgacctcaggtgatccacctgtcttagcttcccaaagtgcttggattacaggcatgagccaccgcgcctggcttgcgccatctgtgttataaccacaccatgctattcccttctgagcccttaatagtctctgaaattatctcatccacttgtgtgagttccatgaggacagagactttatctgtctcgttcatggctgcattccatagttggagacccttgtccagggcagagaaccacctagcgtaggaccttgggctaaggcagagaggccccagtgggggtcctccgcagcgtggactttggaaccagactccctgagttcagcagtggctcttgcacttcctgtctctgtggctgtgggtgagttgcataaccctgccgggcgtgtttctccgggcctccctcctcgggctgtagcaaggggtaagggaggtcatacgccctggggaacaccccaaagcctgggtccctgggatgcatccacagattgtaggcctgagtcttaacacactccatctggatttcaatgacttctgcctggttccagtgctgggctgtttccctgtctgagctttggtggcttttgattgacccctttcctgccccagcatgaaggtggagtagccagaaggaagggatgcgggtgtataaagatgtcatcggggctgtctgtggatggtgggtaaagagacagcacctgtcatggtggaagggccacaggaagcgtggaggctgtttctggggccacctcctgcctccaggaggaagcagggatcctcctgttggcatcttggtcccatcaggtgtcttggatggggctggggctgggagtgtttctctccctgagcatttaagccaaggttcattatttagaatggaaccatttataggccgggcgccattattacattattcctaaagtgttaggattacaggtgtcatgcctgtaatcccggcactttaggaggctgaggtgggtggatcacttgaagtcaggagttcgagaccagcctggccaacatggtgaaaccccatctctactaaaaacacaaaaattagctgggcatggtggcacacacctgtagtcccagctacttggaaggctgaggcggaggactgcttgaactcgggaggtggaggttgcagtgagctgagatcgcgccactgcacttcagcctaggtgacagtgagactccatctcaaaaaaaaaaaaaaaaaaatggaatcctttatgtttcactttgttctcattagcaggactgtgcgaggctgagtcaggagaccgaggtccattctgcttgtgattttgctccgtgcaggaatgtggaggtgtggcccataagcatgtcattcatgcaaaatcatctacatgcattcaattagaaaaaaaaaggaaaacagcagtgaccctcataagtagacttggttagtgtcaatgtagggagtgagtttcttgtgaccctgctgttcttcctgggtcccgtgacagggcatctggacaggctgaatgcgattctagaattagattcctatgtttttatatgtacgccccagtctcacttgccagtggcttcctctgacgcttagaaaataaatggcatctgcaccacgtcagggagaaactgactgctttggaattcccagaagctcttggaagggaaccttcctgagggatattgaaggagaattaaagaattttctcagtggctggcacaacttatggagtcaatgctcattggctgtgattggctgagctgggatcacatgtgcatccttggaccaattgctgtggctcgagtaatggactgctgtgattggtcagccttgggtcgcctgcccatttggagccagggagggaagtagttcttgcccacagagactcaggtaggagtagggtggttcccaaaaggcaaaaaggaggggctgttgtcgggggaagaggcggccataggcagcaaaaatggggctgagcccctttgcccccaggtagcttcccacttcatccccacattgcctttcactgtctctggctgttacagtattagagattattttgtttggctgactattctgtttaccaaggcctcttgaggaggtagtagcttaccagctgtttattatttatgtatttacttatatttacttacctatttattttgagacggagtttctctcttgttgcccaggctggagtgcaatggtgtgatctcggctcaccgcaacctttgcctcccaggttcaagcgattctctcacctcagcctcccaagtagctgggattacaggctgcgccactgtgcccagctaattttgtatttttagtagagacagggtttctccatgttggccaggctggtctcgaactcctgacctcaggtgatccgcccacctcgacctcccaaagtgctgggattacaggtgtgagccacgaagcccggcctatttatttatttttttgagacatggtctcagtctgtcgcccgggctggagtgcagtggcatgatcttggctcactgcaacctccgcctcccgggttcaagtgattctcctgcctcagcctcctgagtagttgggattacaggtgcccaccactacacccggctaatttttgtatttttagtagaggcgaggtttcaccaggttggccaggctggtctggaactcctgacctcaaatgatccacccaccttggcctcccaaagtgctgggattataagcatatgccacagtgcccaccctttattatttatttatttagattttttgagacagggtctcactctgtcacccaagctggagtgcagtggcatgattacggctcactgcagcttcaaccactcaggctcaatcgatcctcctaccttggcctcctgaataactgggactacaggtgtgcaccaccatgcccagctaatttttagattttttgtagagacaggggtcttgctatgttgcccaggctggtcttgaactcctggcctcaagcaatcctcccaccttggtcttccaaagtgctgggattacattcatgaatcactgtacctggcctaattgctctaacggggaaagtttcatcagctgtcagattgttagatctggactgacttgggttccgaagctcagttctatcttttatttttcctttggaaaccaaattctgtaggtagcagaggtttactcaaggccacggagatagttagcagccagtgctgggtggggccgactgtcccaggctagctggatggaggccaggagggcccgggcagcaagggtggaaggggcctgggtgggtgccggaggaagtcattaacgaatgttcttcaggcagaaagttcccagggtcccattgatacccctgcctgttcacatcctggcggcaggactgggatgaggcattttttaaaaagttggggagatatcagggctggtgtgccaaagttcaggctttgtccacccaaggtgagaggctgcaggggtgtgccgtgggcagagaggggatgaggtaggggtgggagggatgagctgcccagatgcacccgtggaggagttgatctggaatcctagccactgggtttaccctgcagtgtgtcccagcagcatcccaggcttctctccagcctttggcagggctttagcttccagcagctcaggtggaccccagcatatggactttgaaggcaggcagcccaggttcaaatcctggcttggccacttcccagttgggtgccttcaggcaagtgacttaccctctctgtgccttttttacttttctgtaaaatgaagttaataaaagtgtctcctacatagggcttttaaggtggcagaattggcacatgtcacacttcaaatagcagctcggcaagtgtcaagtaagggctggctgtttccaacatcttaaccggatagacacagacatagagagggatccatctgtcagcagtttgctgaaatgggaccatactatgcacgctttgctgcaccgtgggtttctcacgctgtcatcgcttgtccatgtcgtcctcagtcagctgggattttctggtgatgatcacgctctgattctctagatgcctggaaacgctccacggtgcggatgtaccacggctcgttctgccgttctcacgagggaggcatccagcttgtaaaataaagcagcccagtgtgttcttccaccaccacatcacccaaggttctattttcaaagattttattttgtaaaaacgggaagaaaagtacaagttgctgcatgtgcatcctctctctctcgttgctgagccttttgggtgcatcctaaggacaaggacgtccttctccatggccgtggaccacggccccactcaagaaggccacgaggatccacacctttaatctgacagtctgtgttcagattcccttacggccccaataacactttttgtcatagttgttcattaaaaaattttgaattggccgggcgtggtggctcacgcttgtaatcccagcactgtgggaggccgaggcgggtggatcacaaggtcaagagattgagaccatcctgggcagcatggtgaaaccctgtctctactaaaagtaaaaaaattagccaggcatggtggcgcacacctgtagtcccagctactcgggaggctgaggcaggagaatcgcttgaacccaggaggcggaggttgcagtgagccgagatcgtgccactgcactccagcctgggcgacagagtgagtctccgtctcagaaaaagaaaatttttttttgaatccaaggttgcatgctgtgtctggttgcctcatgtgtttttcctctttaatccagacctgttctccagcccttttctctttgctgggtctttcaggacactggcatctgtaaaggggccaggcgggtgcttttggcaggatggcccttgatttggatttgtctgattgctttctcaggagtgcacgtggtcttcccacagactcccacacaaaagcctcattgtgtgaatcagattggagcagagtgtttctgatgagccggggttgggtgcctggatcctcccccagctcccagcctggcagtcacagtgcaagtctgaacctcttgggttgaagaagcctgcaattcctcctggtcccttcctccacctgctttctaaaatttctggctctcattccttgcctttgagcggtgatgtgtccatccttcagcggccctcggccagcctctgcccaccccagtgccatcacatgggaagagatggcggatctgatccctgactcatcccctgggccaggaagattgtggaaaccctggggtctcagggctggtcgggtggaaacgggaggctggatggagtggcaggtgggggcttttcctgttttgcctctccctaactgggcctcccggcagccactagcccagatgcccaggcctcagagccttgtggaaattcttgtgccagatcatcttggccctgtctggcctcctggcaggcaggtggaggtcaaactggccttacttggccgagagcccattgcagccaggatcccttggcagctctgggaacagccaagtctcccctgtccttgggatttccttccactgtctgttcccaggctcctggactccacctgctgcaacccctcgctttgcactttccacccagagtcttggatttctgttttttgtgaaatttgctcactttgaggaaagtgtaagacatatgcaatcaaatatgtaactaagatgaacatgcatgcaatcaccccacgtgaagaagagggaaagctcatctgccccgaagcccctgcagaagacactgtgtttggtcccagcttgctttgctttttatagtatcactccctcatagccatccctaaacaccgggattagtttggtccggttttggacttaacttggatgcaggcatactctcagtatttttgtttggtttggtcttgctggtgttacttcatatggtatttgtgggatccacccacattgctgcgataagctgcactctattttcatggccatgtcatatcacagttcatgatgctaatcggaagaagctgagtatcacagttcatctgtcttttttttttttttttttttttttttttgagatggagtcttgctgtgtggccaggctagagtgcagtggcgcgatctcagctcactgcaacttctgccccccgggttcaagcaattctcctgcctcagcctcccaagtgcaccaccatgcccagctaatttttgtatttttagtagagatggggtttcactatgttggccaggatggtctcgacctcttgacctcatgatccgcctgcctcggcctcccaaagtgctgagattacaggcgtgagccaccacgcccggccagttcatctgttttaaccctgatgccggtgactgtgttcacttctgggttatgacacactcgtgtccctgcctgcaagggacatgtgcctgaatccctctagggcccgacagtcagagtagggggtctggtcatggcgtgcgtgtcttcacctgcatggagaagggccaagctcttgtccaaagtggttgcagcgtttccaatcctatcatttgtttttcatttaataatttattgagttcaaattcacataacatataattaatccttgtaaatcgaataattcagtgataccaccacttctacctagtttcaaaacatttccatccctcccaagtagaattgcccattctccactctttgcagctccccagcccctggcaatcactcattttctttctgtctctacagatgcacctgttacggacatttctttctttctttctttctttttttttgagacagagtcttgctctgtcgcccaggctggagtgcagtggtgcaatcttggctcactgcaacctccgcctcccgggttcaagcgattcttctgcctcagcctcccgagtagctgggactacaggcgcctgtcaccacacccggctaattttttttttttgtatttttagtagagacgggtttcaccatgttggccaggctagtctcaaactcctgacctcaggtcatccacctgccttggtcccaaagtgttgggattacaggcctgagccaccgtgcccggccctggacatttcttttttttttgaggcagagtcttgctgtgtcacccaggctggaatgcagtggcgtgatctcggctcactgcaacctccgcctcctgggttcaagcgattctcctgcctcagcctccccagtagctgggactacaggcgcccgccaccacgcccggctaatttttttttttttttttttttgtatttttaatatagacggggtttcacatgttggccaggctggtctcaaactcctgacctcaggtcaaacacctgcctcggtcccaaagtgttgggattacaggcctgagccaccgtgcccggccctgcacatttcttataaatgaaatcatgcaatgtgtggccttaagtgcctggctgcttccgcttagcgtcatgttttggggttcatccgtggtgtggcatgtggagtgctgctttcctttttgtagctgagcaggcctccacggtgcgggtgcactgcatgctgtttttccgcgcctctgtggatgggcgtctgggctggtggctgccgggagcggtgctgctgggagcgcgcatgttcgggaactcgcttggcttctgctttcagtggtctccttttatgccctccttcccctcacccctctcgctcttcagcccgccctgcccctgcgcccatcctctgtgtggctgcgtctgtaaacctgagtgtgtccttggaccttgtgcagtcctagattccggagcctgcaggtgtgggtccagatcccggccctgcctcctgctgctgtgtgaccatggacaggctcttcgagtctctggtctctggtgggtgtctgagtctgcatgggaggcagaggttgcagtgagccgagatcgtgccactgcactccagtctgggcaacagagcaggactctgtctcaaaaaaaaaaaagaaagaaagaaagaaagaaaaaaatgtccataacaggtgcatgggccaaagaccatgtattcccgtacagttctggagaccggaagtctgagatcaggatgttggcagggctggcttctccggagacccctctcccggcctcatagacgccaccttctccctgtgtgcgcacatccccggtgactctctgcgggtcctaatctcctcttttaagggcgtcagtcagattggattagggctcaccccactgacctcatttaaacgtaatcaccgatttaaaggccctgccccccgcgccaatacagtcacattctgatgcaccgagggttagggctgcaacatgggaattttggggggacactgttcagctcataatagtagggtgcctataaaatgggctaaaaccatgccttcctataggattcagtgaggaccgagggagctagaggtggaagtgctttgagctgggggtggcacagggaggcccccttcatgtggcctgtcacgtctgaggagagggcggcttttccatgccatgcacggtaactcgtgtcaacattcctcgtgctgccctgtttaaaatctatccgtgttcctatgtgtgtatcaggcttattgcttccttctgctgcctggaccccctaattcatgttcatcctgttgtatttattcccttagcgacgggggtaccttggttatgtctgactcctgcctccacaaacagcaaatatgctggaccctgctgccttgtacttctccacaatttcctggggatgcgcaggagtggaattgctgtagggcagagggggagccattttcacccaacatgccttccagaagggccactgctgttcaccctcccagctctcacatcctctccagcacctgagacgatttagtcttcgagaatgtctggggtctcagtgagggtacgtggtgcagcattgttctcatgtgcttttctgaggtgtgaatttgagtcttcttcctttcataagtcctcaggtgggggtctgaggctcagagattttgagggccatgttggagggtcacagagcaaactggggctagaccccaccagcttgggcttggagggcctccagcttggatgtagggcccttcataaatccaggatgatctcatcttgggatccttaacttggtaacatctgtagagaccctatttttaaataaggccacattctgaggttctaggtgggcatgaatttggcaggggacatgcttcagaccagcactatgtgtgcaggtgcccaatcctcagatctgcagagctctgggttcaaatccaggtcccattacttgggtcctgtggaaactcacttttttcctaaaagccgatttccacctctgcacatggggccaatgttcttccatctcacaaaccagaagtcaaggccaggcgcagtggctcatgcctgtaatcccagcacttagcgaggcagaggtgggaggatcgcctgaggccaggagttcaagaccagcctgggtaacatagtaagaccccccccccccatctccacagaaagtaagaaacaaaaacaaaacaaactggaggccaaggagagcagctgcggatggtcacgtgcctctccctgggtgtgcccagctcttacccagaaagccctggctggcattaaaaataaggaaggtaaaatagggatatgatcaaacaaattaaaagtgtacggaaaaagagtcagccttctggaaagatcacagcacgacactgctcccctggccccagctggtctttgctccagaggtgacttgggttaatagttccttgtttttccttcctgcaataaacatgtttgcgtccacagagggggacccacacccgtatccttcccgtccgtggcacacgtcccacaagggcacacggttcccatgcttttctgcctcttggctggggcacctaggtggatcttggcatctcttgttcccgcacagaacccatcctcatccgagccctgggcctctgtctcccagcaggctttgcaaataggaccttgtaaaggacagggctgtgtttcccaaaggccagagcagtgaagaggggcatgtggggtcgtggggcacacctctaggacattggggtccaggggtcctttccagtaagaccttgctgtgctggaaacacccctgtgtctttcagggcttttttcagagtcagggttgatgtgaccgccacgtttcctctgggcctgacagctgtaatctgtggcttgggagtgcagataagtgtgatgaagctgccagcaggcctgggcatctgtgtccttggtgggggcagggagaagagacagggactgggatgctggggccagggccagagccccgctgagatatgaggtccccttccaccctgggaggtgtgtggggaggagcttcctcgaacccctttagctgggacggatggaagaatgagcagctttgcatttccggcagcgtctccagctttcctggggctttctcggcttgtgttattgatgaactccagtgcgtgaggccattggagccttagaggcctgtttcccctggacaggtgactgcctgggccagaggcagcactggcatggtgccctcttgctcctggctgggagtgacacggggcgtggggcgctttgcattcatccccagctgtttgggcacatttacaaccctcattttacagatgggacaaaccccagtggagaatctgctccgggcagctgtttatgaaccacctgaatggggcacacaggactgtgggaggaggaggagggacccccagggctgaagtggcagggaaagctactcatcctttcggcccatgtttactgctcacaaattgtgggccaggtctcgtgccaagtgttggagctacagccgtggacaaaagagacctggtcctgctcacggcagctacgctttagcaggagggatgggccatggagaagcacatggaagaggtggggtggcgagaagagctaggaaggggacgaggcaggtgagctgacatggagccactgctgggaaggggactccttctgatgtgggagtcaggagggcctctcagaggaggggctctatgagctggggagcagctggcaaagagcacagcaggttcaaaggccggaggtgcgaaggagcctgctgtgttggaggaagagggagcaggccagtggggttgggagaagtgactggagggggtgaaaggggacaggcatgtgggggccttgcaggacacctggaggagttcagatttggttttcaattccatggagggttctgagcagggaagagccatgatctgactcagtattttttttttttttttttgagacagagtctttctctgtcgcccaggctggagtgcagtggcatggtatcagctcactgcaacctccgcctcccgagttcaagcaattctctttttttttttttttttgagacggagtcttgctctgttgcccaggcgggggagtgcagtggcgcaatctccgctcactgcaagctccgcctccctggttcatgccattctcctgcctcagcctcccgcgtagctgggactacaggcgcccgccaccacgcccggctaatttttttgtatttttagtagatacggggtttcaccgtgttagccagcatggtctcaatctcctgacctcgtgatccgcccacctcggcctcccaaagtgctgggattacaggcgtgagccaccgcgcccagcctcaagcaattttcttgcctcagccttctgagtagctgggattacacgtgcgtgccactacactcggctaatttttgtatttttcgtaaagatggtgtttcaccatgttgggcaggnnnnnnnnnnnnnnnnnnnnnnnnnnnnnnnnnnnnnnnnnnnnnnnnnnnnnnnnnnnnnnnnnnnnnnnnnnnnnnnnnnnnnnnnnnnnnnnnnnnnnnnnnnnnnnnnnnnnnnnnnnnnnnnnnnnnnnnnnnnnnnnnnnnnnnnnnnnnnnnnnnnnnnnnnnnnnnnnnnnnnnnnnnnnnnnnnnnnnnnnnnnnnnnnnnnnnnnnnnnnnnnnnnnnnnnnnnnnnnnnnnnnnnnnnnnnnnnnnnnnnnnnnnnnnnnnnnnnnnnnnnnnnnnnnnnnnnnnnnnnnnnnnnnnnnnnnnnnnnnnnnnnnnnnnnnnnnnnnnnnnnnnnnnnnnnnnnnnnnnnnnnnnnnnnnnnnnnnnnnnnnnnnnnnnnnnnnnnnnnnnnnnnnnnnnnnnnnnnnnnnnnnnnnnnnnnnnnnnnnnnnnnnnnnnnnnnnnnnnnnnnnnnnnnnnnnnnnnnnnnnnnnnnnnnnnnnnnnnnnnnnnnnnnnnnnnnnnnnnnnnnnnnnnnnnnnnnnnnnnnnnnnnnnnnnnnnnnnnnnnnnnnnnnnnnnnnnnnnnnnnnnnnnnnnnnnnnnnnnnnnnnnnnnnnnnnnnnnnnnnnnnnnnnnnnnnnnnnnnnnnnnnnnnnnnnnnnnnnnnnnnnnnnnnnnnnnnnnnnnnnnnnnnnnnnnnnnnnnnnnnnnnnnnnnnnnnnnnnnnnnnnnnnnnnnnnnnnnnnnnnnnnnnnnnnnnnnnnnnnnnnnnnnnnnnnnnnnnnnnnnnnnnnnnnnnnnnnnnnnnnnnnnnnnnnnnnnnnnnnnnnnnnnnnnnnnnnnnnnnnnnnnnnnnnnnnnnnnnnnnnnnnnnnnnnnnnnnnnnnnnnnnnnnnnnnnnnnnnnnnnnnnnnnnnnnnnnnnnnnnnnnnnnnnnnnnnnnnnnnnnnnnnnnnnnnnnnnnnnnnnnnnnnnnnnnnnnnnnnnnnnnnnnnnnnnnnnnnnnnnnnnnnnnnnnnnnnnnnnnnnnnnnnnnnnnnnnnnnnnnnnnnnnnnnnnnnnnnnnnnnnnnnnnnnnnnnnnnnnnnnnnnnnnnnnnnnnnnnnnnnnnnnnnnnnnnnnnnnnnnnnnnnnnnnnnnnnnnnnnnnnnnnnnnnnnnnnnnnnnnnnnnnnnnnnnnnnnnnnnnnnnnnnnnnnnnnnnnnnnnnnnnnnnnnnnnnnnnnnnnnnnnnnnnnnnnnnnnnnnnnnnnnnnnnnnnnnnnnnnnnnnnnnnnnnnnnnnnnnnnnnnnnnnnnnnnnnnnnnnnnnnnnnnnnnnnnnnnnnnnnnnnnnnnnnnnnnnnnnnnnnnnnnnnnnnnnnnnnnnnnnnnnnnnnnnnnnnnnnnnnnnnnnnnnnnnnnnnnnnnnnnnnnnnnnnnnnnnnnnnnnnnnnnnnnnnnnnnnnnnnnnnnnnnnnnnnnnnnnnnnnnnnnnnnnnnnnnnnnnnnnnnnnnnnnnnnnnnnnnnnnnnnnnnnnnnnnnnnnnnnnnnnnnnnnnnnnnnnnnnnnnnnnnnnnnnnnnnnnnnnnnnnnnnnnnnnnnnnnnnnnnnnnnnnnnnnnnnnnnnnnnnnnnnnnnnnnnnnnnnnnnnnnnnnnnnnnnnnnnnnnnnnnnnnnnnnnnnnnnnnnnnnnnnnnnnnnnnnnnnnnnnnnnnnnnnnnnnnnnnnnnnnnnnnnnnnnnnnnnnnnnnnnnnnnnnnnnnnnnnnnnnnnnnnnnnnnnnnnnnnnnnnnnnnnnnnnnnnnnnnnnnnnnnnnnnnnnnnnnnnnnnnnnnnnnnnnnnnnnnnnnnnnnnnnnnnnnnnnnnnnnnnnnnnnnnnnnnnnnnnnnnnnnnnnnnnnnnnnnnnnnnnnnnnnnnnnnnnnnnnnnnnnnnnnnnnnnnnnnnnnnnnnnnnnnnnnnnnnnnnnnnnnnnnnnnnnnnnnnnnnnnnnnnnnnnnnnnnnnnnnnnnnnnnnnnnnnnnnnnnnnnnnnnnnnnnnnnnnnnnnnnnnnnnnnnnnnnnnnnnnnnnnnnnnnnnnnnnnnnnnnnnnnnnnnnnnnnnnnnnnnnnnnnnnnnnnnnnnnnnnnnnnnnnnnnnnnnnnnnnnnnnnnnnnnnnnnnnnnnnnnnnnnnnnnnnnnnnnnnnnnnnnnnnnnnnnnnnnnnnnnnnnnnnnnnnnnnnnnnnnnnnnnnnnnnnnnnnnnnnnnnnnnnnnnnnnnnnnnnnnnnnnnnnnnnnnnnnnnnnnnnnnnnnnnnnnnnnnnnnnnnnnnnnnnnnnnnnnnnnnnnnnnnnnnnnnnnnnnnnnnnnnnnnnnnnnnnnnnnnnnnnnnnnnnnnnnnnnnnnnnnnnnnnnnnnnnnnnnnnnnnnnnnnnnnnnnnnnnnnnnnnnnnnnnnnnnnnnnnnnnnnnnnnnnnnnnnnnnnnnnnnnnnnnnnnnnnnnnnnnnnnnnnnnnnnnnnnnnnnnnnnnnnnnnnnnnnnnnnnnnnnnnnnnnnnnnnnnnnnnnnnnnnnnnnnnnnnnnnnnnnnnnnnnnnnnnnnnnnnnnnnnnnnntgaaaccccgtctctactaaaaatacaaaaattagcctggcatggtggcaggcgcctgtaatcccagctacttaggaggctgaggcagagaatttcttgaacctgggaggcagaggttgcagtgagctgagatcacaccactgcactccagcctgggtgacagaccgagactccatctcaaaaaaaaaaaaaaaaaaaaggctaagttggtaaattttatgtttaccccaattaaaattaaaaactgtggcagggtttaacctgaagggagaaatggtactggcccctcctgcttgaatgggttgggctgttggtttgtagatggtagaccagacggcccagcctgttggccagggtcaaattccaacatgctgagcctgttgcagaagacttagcctttgaagcaggcagccctgagcttctgattcctccaggcccaaaccaccgttgccctattttacaagaccttggctggcttcatgacgtgttcttgaactggagccagtggtgagctcagggaggctcgtgtaacaatagttccctgaggcatgtttatagccgggtgccctcttcacaacagacacatgtcctgggtcatctcattctctctgcactgccacggggaggatggggaggcagtcacgtctccatgtggcatatcaggggaccggggtgggaggggctgactgagccgaggccagaactaggtctgcgccctggccctctccctaatggccagatccggcctcacccgtgaagctggcctggcaggggatggcccttcctgaatttctgtgtggtctaggctggggttggcatgcttttctgtacagagacagatagtcaatatgctcagctctgcaggctgcacgggttgtgtctcagctactcagccctgctgctgtgatgctgaggctgccattgacgacacagaaataagtcgaggtggccgctgtgggccagtgccactgcatttatgaacaccaaaatgtgaatttcatataactttcacatgtcatgaaatggcatttttctttcaattgtttgtttatttatttttaacatattttttggagacagggtctcactgtgtcacccaggctggggggcaggggcaccatcatggctcactgcagcctagacctcctgggctcgttatcctcccaccttactctcctgagtagctgggacaacaggcatgtgccaccacgcctggctcatttttttttttataggttggtgggtgggtgtgtagggggggtcctcactatgttgcccaggctcgtcttgaactcctggcctcaagtgaccctccccaccttggtctcccaaagtgttgggattacaggcgtgcagcactgcacccagctggctgactttctttcttttcttttcttttcttttcttttcttttcttttcttttcttttctttctttctttttctttcctttcttttctttcttctcccttccttccttccttccttccttcctttctttctttctttccttctttctttcttttctttcttccctttcttcccctctttccctctttccatttgaaaannnnnnnnnnnnnnnnnnnnnnnnnnnnnnnnnnnnnnnnnnnnnnnnnnnnnnnnnnnnnnnnnnnnnnnnnnnnnnnnnnnnnnnnnnnnnnnnnnnnnnnnnnnnnnnnnnnnnnnnnnnnnnnnnnnnnnnnnnnnnnnnnnnnnnnnnnnnnnnnnnnnnnnnnnnnnnnnnnnnnnnnnnnnnnnnnnnnnnnnnnnnnnnnnnnnnnnnnnnnnnnnnnnnnnnnnnnnnnnnnnnnnnnnnnnnnnnnnnnnnnnnnnnnnnnnnnnnnnnnnnnnnnnnnnnnnnnnnnnnnnnnnnnnnnnnnnnnnnnnnnnnnnnnnnnnnnnnnnnnnnnnnnnnnnnnnnnnnnnnnnnnnnnnnnnnnnnnnnnnnnnnnnnnnnnnnnnnnnnnnnnnnnnnnnnnnnnnnnnnnnnnnnnnnnnnnnnnnnnnnnnnnnnnnnnnnnnnnnnnnnnnnnnnnnnnnnnnnntttattttatttcattttattttgagacagggtcttgctctgtcacccaggctggagtacagtggcacgatcatggctcactgcagcctctatctcctgggctcaagggatcctcctgcctcagccttccacgtacctgggtctacaggcatacactaccacatttggcaaatttttaaacattttttgtagagatggggctcactgtgttgcgcaggctggtctcgaactcctgggctccagtgatcctcctgccccagcctcccaaagtgctgggattacaggtgtgagccaccacacccagcctaattgttaggtttaaataaatgaaagcattgctttaaatgggatgctttgagctggaaacaacataaaacttgcctccagtggcttctgtaatgcagatgtttactgttgtgcttcctgagagatgggaggtggtggtttccagatgcgttcagcagttcagaacatcgtgctctgcctcagtagattttgcccagtggctctccgaggtggctgtactgatggacattctggccagtgacacatgcgcgagacctctggtgcttgccagtgcgtgccagtgaatacgtgtgatgtccctgagctcttcctactgggtacctgagtcacttgtgaattgcgtgtcctcttccccacttcctgctcagtccacgagggcaggaatcctgttggattaactttacccctgtagcactgatcgcccgctttggatgctcaggcagggttgaaatgaatgaatgactgagtgaatgaatgaatgaatgaatgccacgttctcatcgtgtgttactataggacagggattgcaaactgtgcaggaacatacatgggggaagggccctggcatgaggtgatagggagtggtggggcccgttgcaagctggagggcacaccccaactgtgaagcggctcctgctttgctccagcgggctgggccacgtggcgtgcaggcccagagctggacatcacccaggttcccaaaagaagccagaaggcaggaatttacctgctggtttaagatactgtcaacagattcaaatattttgaaatatgtgattcaaaacccatctactggccaaatctggcccatgggcccagtttgtggcatctgtttcaggaagagacaagacctagtttgtgttttttttagtgggggcggggaggatgcggtgtataagaaattttgagtgaattaaaaaaaatttatgaaaaatttcaagggctgggtgcagtgtctcacgttcgtaatccagctctttgggaggttgaagcgggagaattggtttaggccaggagtttcagaccagcctgggcaacatagcgagacccctacaaaaaataaaatctacaaaaaatgaaaaaattagctgagtatggtgacagaagctgctgtggtcccagctacaaggaggctgaggcaggaagatggtttgagcccaggagttcaaggctacagtgagctcggactgcaccagtgcactccagccagggtgacagaacaagaccctgtctcttaaaaaaaaaaaaaattcaaacatacataaaaatagaccggtgcgatggtcatgggccctgtaacttgctgaggagataccaagtcttgccttctgcacgtgcctccatacactttccccttttccacattgttctggggctcatgtcagacattgcctcatccgtcagtgtctctagtatagccacggcacttcatggtgcattggagtctggacgctggagggctnnnnnnnnnnnnnnnnnnnnnnnnnnnnnnnnnnnnnnnnnnnnnnnnnnnnnnnnnnnnnnnnnnnnnnnnnnnnnnnnnnnnnnnnnnnnnnnnnnnnnnnnnnnnnnnnnnnnnnnnnnnnnnnnnnnnnnnnnnnnnnnnnnnnnnnnnnnnnnnnnnnnnnnnnnnnnnnnnnnnnnnnnnnnnnnnnnnnnnnnnnnnnnnnnnnnnnnnnnnnnnnnnnnnnnnnnnnnnnnnnnnnnnnnnnnnnnnnnnnnnnnnnnnnnnnnnnnnnnnnnnnnnnnnnnnnnnnnnnnnnnnnnnnnnnnnnnnnnnnnnnnnnnnnnnnnnnnnnnnnnnnnnnnnnnnnnnnnnnnnnnnnnnnnnnnnnnnnnnnnnnnnnnnnnnnnnnnnnnnnnnnnnnnnnnnnnnnnnnnnnnnnnnnnnnnnnnnnnnnnnnnnnnnnnnnnnnnnnnnnnnnnnnnnnnnnnnnnnnnnnnnnnnnnnnnnnnnnnnnnnnnnnnnnnnnnnnnnnnnnnnnnnnnnnnnnnnnnnnnnnnnnnnnnnnnnnnnnnnnnnnnnnnnnnnnnnnnnnnnnnnnnnnnnnnnnnnnnnnnnnnnnnnnnnnnnnnnnnnnnnnnnnnnnnnnnnnnnnnnnnnnnnnnnnnnnnnnnnnnnnnnnnnnnnnnnnnnnnnnnnnnnnnnnnnnnnnnnnnnnnnnnnnnnnnnnnnnnnnnnnnnnnnnnnnnnnnnnnnnnnnnnnnnnnnnnnnnnnnnnnnnnnnnnnnnnnnnnnnnnnnnnngaccagcacaagggactggcaccggtgacgtctgtttctggtcccggcccagcctggaagtttctgggaacctgaggaccctggagtggttctgacctctggctgcctccctgtccccccgtgtgtcccgtgggagctcactggcttgggaggcctgcttttgacaagacccctggctctggccttgcagggcccctcaggcccctgctggctgttgcctgcattcttcctcccatgtggctgaggatgaagctggcttagcccttttcagggcgggcctcggtttgtgtttctggacaccctcgtgtcactggcaggaggtctcgggagtcacgaggaggcagtgcaggcagcacgggcacgtccgcagcccagagggcttgcttttcagatcccagctgcaagaacaaagtgcccccgctgagctgcttgaaagcagccgcgggagagtgtgctgctccgcagatcattccccggcccgggtttctcttaggacagctcaggccaaaacacagcagggttcaaaagcgggggacgtgtgagcatcctgggcgtggagcttcccattaaagaggacactgggcttcctgccgggtccaccttgtttctagcgaagcctgccttctggccaagatagggctgtggggagaggaaggggtgcacggggcaaatgtcacactccctggtgcaggggtgttccctggggtggagggggctgtgtgggaggatgctctggggtctctgggtgggtgtggcaggctgaacaatgtccccaaaaggtgctggcgtcctgatccccaggacctgtgaatatgtgaccttcctcagcaaaagtggctttgtaggcgtgattaagttaaggatcttacaccaggcatgatggctcacacctgtaatcccagcactttgggaggccaaggtgggagatttttgagcccaggagttgaagaccagcttgggcaacatagtgagaccccatctctataaaaaatttaaaaattagccaggcgtggtggtgtgtgcttgtggtcccagttatgtgggaggctgaggaaggaggattgcttcagcccgggagttcgaggctgcagtaagccgtgatcacaccactgcattccagcctggcaacagagtgagaccctgtctcaaaaaaaaaaaaaaagttaaggatcttgagatgggagatgaacttggattgtcccaggggccacaatgctttcacaaggatctttgacagagggaggcaggagggtcagagtaggagatgtgacctcagaagcaggggttggagtgataaggggacaggagccaaggaatgcagaggcctcttagaagctgggaaacggaaggcaatggattccccctgagctccagaaggaagcaccctgcctgcaccgtgactttcatcccatctcaggggcagtcccagtttggacttctccccccgagaactgtaagatgataactttgtattgatctgagccagtgttaattgttaattcttacagcagcagtgggaagctaatacaatgaaaatgcttccattaaagccaggtcattaacatgatagtataatctggtttgggtgggcttaaataaaatatttaaacttaaaataatgttgtgttaatatgtgaacttttgaaattgtcagtgtttttacaaaaagactttaatgttctggaaaaagtataaatatggggtgcacattttttccttttgcttgaagctgtaatatgattcggtgaggcactgatttggccctccctgtattgccgcgacagagcctgcttgttttaaaataactttctgttttagaacagttttttttttttttgagaccaagtctcactctgtcgcccaggctggagtgcagtggcacaatctcggctcactagaacctctgccttccaggttcaagtgattctccttcctcagcctcccaagtagctgggaccacaggtgcctgacaccacacctggctaatttttgtacttttagtagagtcgggatttcactatgttggccaggctagtctccaactcctgacctcaagtgatccacctgccttggcctcccaaagtgctaggattccacaggtgtgagccaccgcgcccggcctagaacagttcgactttcagaaaaattgggaagatagtgctgagttcccacatatcccacagccagtgtcccctgctattaacatcttaaaggaatgggatacatttgttgctatgaatgacccagtgttgatacatcagtaataactaacatccagacaggattcacgtttccttcgtttctccttcgtatcattttctgtcccaggacccaatccagggccccacattgcgtttgtccctcacgttgccttaggatcctctggtctctgtgggttctcagactttcctggctttggatgacctggattgcgttcctgagcaccggctaggaattttgcaggacgcccctctgctgggatttgtctgttgttcttctattgattaggccctagttccgggttttggaaggaagatcgcagtgacgaagggctgttcccagcacattatgtcaacatgacctgtccctgctgcatgggtcctattctttattccttgttacaggtaaagaaacaggcacaggaagttgtatcaggcgcctgctggtaggtggaggatgggcagggggttgaggggacagggagtggacagagcccctttgctggtaaagaggggaccccagacctctcacgtctctccagggcccctggtggtctcctggctggcctcgctgctctgcttcagaaatcagatttgacggggcactgggaccctgattgggccttggtggctgtaggtgctctcttattagcgacaccacttgagggtgtattgaacatctgaagagtacccaaccctggatcaataattttttgctttaggccaggcgcagtggctcacgtctgtaatcccagcactttgggaggccaaggtgggccgatcacctgaggtcaggagttggagacctcagcctggccgacatggtaaaaccccatttctgtcaaaaatacaaaaatcagtccaggcgcggtggctcatgcctgtaatcctagcactttgggaggccgaggcaggcagatcacctgaggtcaggagtttgagaccagcctggccaatttggcaaaaccccgtctctacttaaaaaaatacaaaaattagccaggtgtggtggcgggcatctgtaatcccagctacttggggggctgaggcaggagaattgcttgaacccgggaggcagaggttgcagtgagccgagatcgcgccactgcactccagcctgggtgacagagcaaaactccgtctaaaaaaaaaaaaaaatcagctgggcatggtggcatatgcctgtagtcccagctattctggaggctgaggcaggagaattgcttgaatctgggaggtggaggttgcagtgagctgagatcacaccactgcactccagcctgggcgacagagtgagactctatctgaaaaaagaaaaaattttttttgctttaatttttttctttttaaaaattgaagtatcaaatacattaagaaaagtgcacaatttcggttagaggttgatggattttcacctaggtatgcacgcttgtaatgaccccctataccaagtgtaaacgcctcccccgcacccctccctgtcagtatccacccctgaggtcctgctgcccccacctctatccccatggattggttttgccattccccgggacgtcacttatatggactcatgcacgtggtccctgtgtgtgatttaccctgtcattgtgtgtctcaattggtcattcccttttgtcgctgggtagcattccatggtatgagtgtgtccccatttgtcatgcattcacttgcttgtagacatttgtgttgtttccagttttgggctgttatgggtacggctgctatgagcatttgtggataatctttgtgtgggtgcatgctttcatttttctgggacaaatactgggggtgggattgctatattgtagggtgaacgtccagctttggtagaaaaagtatattccacagtgactgcactaatgcacttccaccagcaatgtgtgagcactctggctgctccacatcctcaccagcacttgttattgtcagtctttttcattgtagccattctggtgtatggcatgggatctcactgtgagtccagtggacatttctctgatgactaagccacccagggctggtgggtggctccaggaagtcacaggaatcctttctcctatctcctattctgctccgcccttcttcatgtgtggctttcattcttaagggtgcctcatgatccaagatggctgctctagctccatccattgtgactgaattccgggcagcaggaagggggacttatcaacaactacatagaaatttcagatattgataatgtcagggagataaaacagggtgatgaatataatgtgatgggggaagggctgctttaggaagaatggtattttcatccattttgttcactattgaagtgcccaggcctagagcagagcctgccatacagtggggctcaatagagatggttaagggattgaaaattgctcagggaaggtctcacggagaaagtgactttagacttgagaagtgaggggctcacttttgtgggcatcaggggaaagattgcccctggaggagcaaagagtcagtgcaaaggccctgtggcagaaacttgcctggtggctcaggagcacagcaaggccagtgtggctggagcagagtgagcgaggcagataggaatgggggaggagactggagtgactatagggagctgggttgtgcaagacctcataggtcactgtcaggaatttagattctattctgagataaatagggaggcatgggggaggtttgagcagaatgacatgctctgactttaatcttaaaaggataacttggattctgtggggagaacggggcggggggcaagagcagaggcaggaaaacagcggggaaactacggcacccatccatacaagccaggatgggggccaggatggtgttggagagaagtggatggatttgaggcatgctttaaagcgagagcagcccagccttgctgatggagggtgctaggtgggaggaaaatggaggactcaggaatgactcaacctcttcgcttaagcaacttacaagcgtgggtttcttgtaaaaaccttttattttagtcttcttaccttagtcctttaaaaatcaaaagaagttggaacatgagccaagggtgtggtgttcccaagtcccagattggattagcctgtgtcgtagttgttcctgcatcttaaggccccatggagctggggatgcctggagccctgggattgagagtgtagtcagccactgactgctggtccagagtgggcagggcctggccttgtcccagaactaggcttcgtctgagcaaattggcttcttggctcatttggtcagaggtgtgtttcttggaagcctgttttctcttctcataggaggaggaattagaccttgcaattcagtggccaggtcaagttaatgattcatttgtgaagctcccgtgcaaggagcccagcggggatggcctaggagagaagcgtgagggcacaggcctagacgtggatacggagcctggggctctgtctctccctgctcctgtgaccttggtcaggcatttggctttggagcctcagtgtctgcttcgatgagatgagccattgagaatttaagaggtgaagtaggtggaagtgtttcgctacctgaacagggccgggcagattgtccagacgattccgctcccctggtgtctgagggcaggggcgtctcagggcaggggccccatcgtgttcatccctgtgtctttaaattcctagcatagcatctagcatggggcggatgattgtacagggcatgaactgcaatcccaatgaggtcagagcagcctcactgtaggccgaggtcgttccagtgggcttcatggaggaggtggcacctgggcgagcggggtgttaggtttggaggtcaggggcctctccaggtgcaggggagagtgctgtgggtggtaggaagagaatgctaaaaattaatgtctatgaaatcttcatctcatccatcacacatttaccgagttgttgccccggcctaaacaggcggtactctctgtgtatttaaaaaaaaaaaaatcccttcttaagtatgagctgtttaaaacacacaaaggaggactagcgttaccacccgctagacatttccacgttgattatatggtttcaggtctcacttttgctcattcacccagaaaatatttacagagctcctgcaaggtgccaagagctgtcccaggccctgaggacagacacatcgccaaacaaagcagctgaggatcttgcccttgtgggtttatggccaggcaggtgatacagatggacagcaataaacctgataagctaattataccgtgtgctcgaaggccacaagcagcatggaaacaacacggcaggtcgggaggtcaggagttttaggggcaggttggatgagccttctgagaagggggcatgtaagcagagattcgaaggggtgagggatttgaccacgtgtttaggaggaagcagtgggtgcaaaggccctggggcaggagcgtggcctcttagacaggatagcaaggaggctgtggggctgggctgagtaacagacagtggttgtggaatgagaccaccgcttctgctgttgtccttcccagcttctccccagcctccccttttccctagtttataagacagcagaaaagggagaaagcaaaaagatggaaagaaacagaagtaagataaatagctagacgaccttggcgccaccacctggccctggtggttaaaataataataataataataatattaacccctgaccaaaactactggtgttatctgtaaattccagacgttgtatgagaaagcactgtaaaactttttgttctgttagctgatgtatgtagcccccagtcacgttcctcacacttactcgatctattatgaccctttcacatggaccccttagagttgtaagcccttaaaagggctaggaatttctttttcggggagctcggctcttaagacgcgagtctgccgatgctcccggccgaataaaaacctcttccttctttaatccggtgtctgaggagttttgtctgtgacttgtcctgctacagttggatgtggggccagagagaacacaggggccagaccaggcagaggggcttgtaggccaatgttcggacggtggctcgtatgttattttcaagaaataacatgttcacaatgacagttaaagctttccccacatccccagcccccagccctctcctgagattgtttgcaggtatcatttccctgaatgtttttctacatttccacatgggtttgtcttcagaaagaatatagagtattatttcatgtgtttggaaaattcacatcaagaggcccatgtcaattgtttctttctttagccttttcttcactcaagatttttttttctttaaaaataaaaattgaggccaggtgcagtggctgacacctataatcccagcactttgggaggctgaagcgagtggatctcttgagctcaggagttcaagaccagcctgggcaacatagtgagaccttgtctctactaaaagcaaaaaaataaaaaaataaaaaaatagccgggcgtggtggtatgtgccttgtagtcccagctactcaggaggctgaggtgagaggattgcttgatctggggagatcgggaagtcaaggctttccagcctgggcaactgagcgagactctgtttcaaaataaataaataataaaaattatgtatatttaaggcatccaaatgctgttttgctatatacacacacatagtgaaatgattactacagttaagcagattaacatatgtatctcctcatatagtcacctctttttttttttttttttttgagacagggtctcgctctgtcacccaggctagagtgcagtggggtgatcacggttcactgcagccttgaactctcaggctcaagtgatcctcccacttaagcctcctgagtagctgggaccataggtgcgcgccactgtgcctggctaatttttgtattttttatagagatgggctccctatgttgcccaggttgttctcaaactcctgacctcaagcgatcctcccacctcggcctcccaaagtgctgggattacaggcatgagtcccggccacctctttgtttttagtggtgagagcacctgaaatctgcttccagtatacagtacagtattaatcacagtcctcgtgttgtgcatgcaacctccagaccacccatcccacatgactgcagctttgcgccctgtgacctgcatctccccacctccccagcctccgccccgtaagcaccattcaactctctgtgtattcaatgtcttcagattcctcacctctaaaagacaaatctggaagtatttgtcctgcagtatttgtccttctgtcaagattctgcctttgagatatctgcaagtcgatggcgtttactcactgtgcagccaccgtgtgcagaagcccagcttatctttgactgagaacctggctgggctctctgttgtttttcaaggcagggtctcgctctgtcacccaggttggagtgcaatggtgtgatctcggctcactgcaacctccgcctcctgggctcaagcgattctcccacctcagcctcccgagtagctgggactacaggtgcatgtcaccgtgcttgggtaatttttgtagttttagtagagacggggttgcaccatgttggcccggctggtctggaactcctgacctcaagtgatccacccgcctcggcctcccaaagtgttgggatcacaggcgtgagcccccgtgcctggccctctgttctttttttgaggtctgacaattcttctggcgctttcttgcacacttaggagaatctttctagggcagagttttcaaactgtcagatgtgatcagattgtgggttgtgaaataagtggggtgggtggggatcagcttttttttttttttttttttttgagatggagtctcgctctgttgcccaggctggagtgcagtggcgcaattttggctcgctgcaacctccgcctcctggattcaagcgattctcctgcctcagccacccgagtagctgggactacaggcatctgccaccacgcctggctaatttttttgtattgttagtagagacagggtttcactgtgttggccaggatgatctcgatctcctgacctcatgatttgcccgccccagcctcccaaagtgctgggattacaggcatgagccactgcacctggcctgggatcagcattttaaaaacagaatggaataggatagaataccagaggggcgaataatggagtcataacgtaagttgcatcatgctgggaaggtgcgtattccctcatgaggcttctggtgggtgtgcaggtcgtggccctagcctggcaggagctgggaagctggtgctctgcaccatgtctgaacagggaacccacagaccatggggctttgctcacacctgacccgattagaaactgtcccgactccccagtggcctgacccccgctgtgcacagcggtcctgtttccaaacatctttgcctgtagttgttttcttggatgtcctaatttttgctcatctactgggaaatgatatctcattttaatttggagttaatctttctttttgaaattgtgattaagatccagttaacgtaaaattcaccaaaaccatttacaaatgtacagtttagtggcatttagtgcgttcgcaaggttgcgcaatcgttaccacgatctagttccaaagcattctcattaccgtgtacccattaagcagtcacccaccattcctttctgccccagcccctggcaaccaccaatctgctgtctctggatttgcctattctgggcatttcgtaagtgtggtcagacactaagtgtggccttttgactggcttctttcactccatgtcaggtttttgaggtttgtccatgtggtggcatgtgtcagtgttgcattcctttctttttctttctttctttctctttttttttttttttgagatgaaatctcggtctgttacccaggctggagtgcagtggcgcgatctcggctctcactgcaacctccgcctcccgggttcaagcgattctcctgcctcagcctcccgagtagctgggaatacagttggctgccaccatgcccagctaatttttgcattttttttttttttaatagaggcggggtttcaccatgttggccaggctggtcttgaactcctgacctcaggtgatccacttgcctcagcctcccaaagtgctgggattacagatgtgagccaccacacctggccgcattcctttctttaaaattattttttttggctctttaaatacatttcttttttacgcagtagtaaacagccaacccatgcattcctttttctaagtgagtcagatgccgctgtctggacagaccacactgcgttcagccattcatctgttgacggactcttgggtcgttttcgcccattgcgaacagtgctgctgtgcacattcttgtacgtgttgttttttacacccattttcagttcttcttgggtctgttctggggagtggagttgcagggtcatacggtaactttgcgtttgatcgtttgaggaacggtcagactggtttccacagtggctgttccacgttacacttctgccggcaatgcataaaggttccagttcccacacccttgccaacacttgctattttccatgaaaaaaaattctagccatcctggtgggtgagaagtggtggcccattgtgactttgatttgcatttccctgatgatgtcaagcaccttttcatgagcttgttggctatttgtgtattttctttggagaaaggtcttttcaagtcctttgcccatttgcagttaatcttttatttttaaaatttcacattatagtttcaaaagggttttagtgaagtgtagcacacgtatagaaaagcccacatataaagggaataacaccatacatttttcagtgaacatagtcccgggtaaccagcaaccagatcaggaaacagaattttcacccgcttatcccccaacctcccaggtgacccctgttctggtttctattgatatgttagtcttgcctgttttagaacgtcacataaatgggattatatgtgtatgcacatatctgccttttgatcaacatgattgcattatattttaaaggtagtaatagtattcatttttaaatttttttttacttaaaatattctggagattgttccatagcggtaaatatagcatgtcatgggtggtggtgttgctgttgtttttttcagacagggtcttgctttgtggcccagactggagtgcaggcacatgatcacggctcactgcagccttgaactcctgggctcaagtgatcctcccagctcagtctcctgagtagctgggaccacaggtgtgcgccaccatgcccggctaatattttttgtatttttagtagagacacggtttcaccatgttgcccaggctggtcttgaactcctggcttcaagaaattctcctggcttggcctcccaaagtccttggattacaggcgtgagccaccatgcctggcctaatttgatgagttgcatcagatgtatacacttcacctatatggcaaccaaaatcaagatagctgggccagttcacgttagtcccctccctccatcccggtccccggcagccactggtctggcttctctctctagagtattccctttccccgatgtcgcggaaatggtgttgtgtagtatgattcttcttttcttttttttgcttggggtagtgcttctgaggctcacctgtgttgtggtgttcatccatggttggttctttttgattgccaggtagcattccattgtgtggatatgtggcaattcatttatctgttgatggatatttgagttgtttccaactatcaaatatggatatatcattccatatttgtttttggtgaacattcaggcaagtcacgctcttaaaggcttcccagcctttgcacaggctgtgtcctctgccaggcactcctccaccatcttcttttcctagcaaagcccagcttattttaaaattcccagctcagatgtcccctcctccaggcagccttcctgggctcaaagggtctatttcgccagatgggagggagtggcgtccaacaagggctcaccttggcattctatcccaactctgtgttccagggccatggtctttgaccttgggggtggtggggacagaatcacagaatcagccatgttaggcaaaaggccacagtgtccccaccactgttatctaatcagctgcctggtctagtgtggtggaaaaaagtcatcctgctgatcaaaagcagggcaaagtccatcccttaacccgggtggaggtggggcagaggaggaagggtcacttaatgactgcagggctgaccctctggtgcccggggtcttcagaccttgttctaagcactttacctccatggactcattcaaacctcacagcagcccatgaggcgacactctccttacgcccattgtatggttgaggaaactgagactcggagaaggtcagtgacccatccctgatcacccagttggacagggctgcgctgggtctctgaagattccctttgggcagtgctgaatgaatgggctgaaacccagggcctgaaagcctcttctttggggagagagagagagagagagagattgagacatggacacgcggccggatcccatgacttcttggtttagccctgattcatcttcagaaccaggccaagcggccaggggaggaggaaagcatggtgagattccaaaggagaaaggtatctccagcccagcagcctctgctgagaaaccaggtgggagagggaggctgcaaagggaaattgaggctgcgtgtgtgtgtgtgcgcgtgtgtgtgcgtgtgtgtgtgtgtgtgtgagatggagtctcgttctgttgcccaggctggagtgcagtggtgtgatcacagattgctgcaacctctgcttcctgggctcaagtcatcctcccacctcagcctcccaagcggctgggactataggcacctgccaccatggatggctgatttttctattttttgtagagatggagtctccatgctcaggctggtcttgaactcctgtgctcaagtgatctgcctgcctcggcccctcaaagtgctgggattacaggtgtgagccaccgcactgggccttgttttgcttttttaaaaaagcagctttattaaggtgtgattgatataaaacaatggcacatatttaatatatgcagtttgatgggctggtgtgtgcacaccgggaaacccgcccctgagatccaggtgctgaacatacctgtcacctctacggttccctcctgccccccactgttttctgtggtgagaacatatagttcgtgctctactccccgaacacattttccagggttctgggttttgatgctgtgttttctatggggggagcaccagcagctggatgtgtcccccaggctggtgaaggggtctggcctgtggtgagcagggtccccagggctgcagggtctgtcccagacagagggacctgcagtgcatgggctttgaggctgggtgaaggccaggactgaaggaagggctgggcgatcggggcctgagagctgggaggggctggagctggtgcctgtgggctgtggtcgcatggggtggtgggagccgccatggggtggggagggcgttaccgagggggcaggactgctctttgatccagctcacataccacctcccccaggaagacctcccggactcctcagtgccctccaactattggttgaatctctctccagccttagttgtgcctcagtttcctaatctgtaacatgggggtaataatagtggaggtggctgcctcaaagagtaatggtgctgttcagaggatgagaacacagtgaacagcatcaccaggctcatggcgcaccccggaaatgctcgcttctgttacctcattaatattcagtttatgcgccttcgtttgcacctatgggctgctcagaccataaggtgatccttctggtgctggcagctgggtaggaagacacgtttatcaataaacaattatggcacttgaaggccagtctctgatctcctgatttttccaagagaactctgaaatccagattttacattacatcttccagtttcttgacaaagaattcagcttcttcattgacacgccacgtaggtcaaactagacacagttgtagctacagtgtcactagctccttcgtacagatgagaaacttgaggttcacaggggctgacttgcccaagtggccccgtggagtgcgacccagggtctggctgcctccaaatctgctccttccgggggacatggggctggccctgactggccagctcagctgtctgcctcctgtagagcctctgcctgttggttctggctgtccttgtcttagaaggccatgttcaaaagagggtggaaggtgacgcagctgcctggctttgcgacatcagctctagtctaatgggctgggtcactcctgccgggctctgacgtggtgtgggcactgaggggcccgagatatgtcccggctgggttgagggtgggggtcaggtggactaggggggacctccctgtgacactggggcagcgaattatagatctagaggaggaaagctggcagaggagtccaagtggaccccaggcgtgtttcctatagtccctttaagaaaaccatgtttttgcaacatttttaaatcaggagatttcatatacatttctttatttctggttttcatggaaaacttctgtgttctcatcttccgactggctcactcagccacacagggaggctctctcccagcgtctccctaccacagggcctttgcacaggctgtggttgctgtggaatgtcccctgcgcctcaccttctagatttgtgagctcccttcctcactgccttctgttttgattttgggtctaggttgtgtttgtgtgtgttctttttctttctttcttttctttttttttttttatgagacagggtgttgcttggacacccaggctggagtacaaatggcgccattacagctcactgcagcctcgacctccttggctcaagtgaccctcccatctcagcctcccaagtagctgggactacaggtgtgcagcaccatgcccagctactttttaaaaaattattttttataggccaggcacagtggctcatgcctgtaatcctggcactttgggaggccaaggcagacggatcacttgaggtcaggagaccagcctggccaacgtggtgaaaccccacttctactaaaacaaaaacaaaaactaaaacaaaaattaaccaggtatggtggtgggtgcctgtagtcccagctactcgggaggctgagggaggagaactgcttgaacccgggatatggggtttcggtgagccgagatcgcgccactgcagtccaacctgggccacagagcaagactccctctcaaaaaaataaaataaaataaaaatacaaaaattagccaggcgtgatggtgggggcctgtagtcccagctactcaggaggctaaggcaggagaatcgcttgaacacagaagcagaggttgcagttagccaagatcatgccactgcactccagcctgggcaacagagtgagactccatctcaaaaaataaataaataaataaaattattctttatagagacagggtcttgctatgttgcccaggctggtctcaaactcttgggctctggtgatcctcctacctcggcctcccaaagttctgggattacaggcatgagccatggtgcctggcctatatttcacttacgtgatgactgtctcaaatcccagtctctccccaatccctgctgtgttttctctgtgctctgtcacgtggcatgcgttttacctgagttgtttggtgcctgcctttcctccgctatggtaaagccccacatagctgggcttttggtctgtcctggtcattctcccatccccagctcttagaacccgcctggcaggtggtagtgctcagtgcttgcttgtggaatgaatgaatgatccccctggccacacggagcccatgttcctgcatgaggctatccctgccctgagcccatccgctaccctgagctccggcgctccctttaggtggtgcatgggcccctgtttaccacagtcccttgactggtgtcacctgttgctgttaggacatattttaagatgcattatgacagcatggataggttgcctgtttaattccataagctccaggtgcgacagcctcatgtgcgaagggctttcccaccacctcctatcccaagctcccgccgaggagccccttccctggccgggctcgggcagctgttccggagccttgtggtggggcgtggggccctcatcactctcctcacaagcgtacttgtcccttcccctgcagaacgtgcgcatcgaccccagtagcctgtccttcaacatgtggaaggagatccctatccccttctatctctccgtctacttctttgacgtcatgaaccccagcgagatcctgaagggcgagaagccgcaggtgcgggagcgcgggccctacgtgtacaggtgaggctgtgtccaggtgagggtggaggggccggctgaggctgggcaggggaggggtctcagagtggacgggatggggaggctgctgactgagccccagagattgttccggaagcaggcaagtcatagtcggggtaagtgctagtcccagagaagtttttgttttagggttttttttttttttttttttttttttagagatgggatcttgctatgttgcccaggctggttttgaagtcctgggctcaagcgatcctccgcctcagcctctcaaagtgctgggattacaggtgcgaatcaccagacgttgcctagagaggttctttatggagcagggagggaccaatggtgtgcgtctgggtggagggtgcatgtgtgagttacacacatacatacacacacatacacatacacatacacacatacatacatacacacgtacatacacatacacacacacatacatacacacacatgtacctacacatgcatacacacatacacacacacacacacacacacatgcatgaccaggagcagggaccgaccccccagaccctatctgggccagaggaccgggtgggtcagcacgggaaggggtcagctgtttgtggaacatgctggcccaaggaccacagagttgtgcctttgctttctgcttgtcctgtacctggctgtggcctaggggaagtgacttcattcctctgagcctcagtttgcccgtctgcagactggagagacacaagagccccttcatggggtcaccgggacactcaggatgcactcggagctctgagacggctggcggatgtgcctgttacaactcccttacctcctggcgttttcacagcacctcccctcctccacacccccacttcccagttcacagacaggggagctgacttgcccccggcacacggtgttccagggatggggcgggcagagggtgttcccgctgttggagacccacagtctggttctgggaaagccaagatgaaaacccagcaaatgtgcctgaggtttgggaatgggaaacatgaatcagctgctgcattccgttcactcattcactcattcgctcgttcatttaacaaatgtttactgagcacctgctaggtgttggctgccgttctaagtacaggggacccagcagtggacagaatgggcaaaaatgccaaagctctctatactccttcattctgtgagcactgactgagcacctcctgtgtgctgggggcgcaggcagaccaaggccctgcctcaccaagctgatgttctgatggggagagagtaaagaagtggacaaataaggggaaatcaggcagccatcagtattgtgcagacaaaacagtgtgaagccggagtgcaggagggagggtggccttggggctcggtctgactggagggtcgggagcacctctgcaaagggacactcactggacccgcatggtgggaagaggccctggggagacagagtcccgggcagagcatgtgcaaaggtctgaaggctgggacagaggcctgtgcggctggggttacgagggagggagacagtggagagacgaggcctgagccttgctgagggcctcagaggtcacgttaggagcctgattttaacctgcatgcaaagtggggttgtggtccagagcatggcacgatctgatttctacttttttttttgagacggagtctctctttcacccaggttggagtgcggtggcgcgatctcggctcactgcaacgtccgccccccaggttcaagcgattctcctgcctcagcctcccgagtagctgggattacaggcatctgccaccatgcccagctaatttttgtatttttagtagagacgtggtttcaccatgttgggcaggatggtcttgaactcctgacatcaggtgatctgcccacctcagcctcccaaagtgctgggtttacaggcatgagccactgctcccgacctgatttccacttttcaaagattcttctggatggtggagagtggcttggagagatgagagatcataaggacagcagcagcaacagtcacagcagctgatgtttacctcgtgctttctctgcacccggcggctgtgttgattgctttccgggtatctgattgcttaatccccacagctgccctgtgaagtagggcttgtgattacttccttttgtagatggagagacgatggccgtgttgggtgggggagagcagaacgaggccgggtgggcggcgacaccatgtcctgcagtgggcaggcagcgggagggacagacttggcgaaggggccgagctcagctttggctgtggggccggaggtgtgcacagacgtccagggcccctggttcccaggcaggcattgcaggcgagtagaagggaaacgtcccatgcagcggggcggggcgtctgacccactggcttcccccacagggagttcaggcacaaaagcaacatcaccttcaacaacaacgacaccgtgtccttcctcgagtaccgcaccttccagttccagccctccaagtcccacggctcggagagcgactacatcgtcatgcccaacatcctggtcttggtgaggctgccctgtggcccacgccgcctcgcaccctgacctcgtcccctgtctctcctcccgcctgccccttgtgcagagagcagtccctgaggtggtcggagcgtggggactcacgcctggtgggtggctttcggccctgtgctgtctccaccacccccagtgggttctgagtttcccaggtgggtccacctgtcttggtttggaagtcctggccaaagtacttttttttcccttttcaatttacatttctgagatctccaaaaggggctgtcttgttgagggctgagccacaggcccgcctctgggactggggctggagttcacttagcctgagtccagtggggtgcaagggggagaaggggttctcgggagcacatgtggccttggcactggaggagcagagggtggttctggtgtcccagatgccccacgtggccactccaggggcctcctgcaccccagcatttcccttcatgggctctttgctgtgaggcccagctggggccaagggaggatgggccagccacgtccagcctctgacactagtgtcccttcgccttgcagggtgcggcggtgatgatggagaataagcccatgaccctgaagctcatcatgaccttggcattcaccaccctcggcgaacgtgccttcatgaaccgcactgtgggtgagatcatgtggggctacaaggacccccttgtgaatctcatcaacaagtactttccaggcatgttccccttcaaggacaagttcggattatttgctgaggtacgtgtggcctggtgagaagccaaagattcaggcctgtgtcctgtcttcccctcacacagcctggacactggtcaccagcttgctttgtagctggctggggatctagtggctgtgggttgtaagtgactgagaacctgactcaaaccggcttgagtgaaatggggaatgttggggctcatagaactgaaaatgctagggttggattcaggtacagcttgatccaggctcaaatgatgtgactgggccttagcttagcaaattggaggctttgctggaggaagggggcatggctgctggggagtaatatcacaagctgactcttaatcttgactcttggcaacctggtagggtcactgactgggcttcggagccaacatctcgtccatggagggtctgaccctgaccttggctccctcaccgcaggtttcactgagtccttgggactgctccagcctcagccatctctttggtctctgctgatcagggtagagtgctgggggggatatcgtggtgctgcgtgtgatagatactcagtacgtttttgtcaagggtgacgggctcctgtcgtgtgggtaaatgagcaagtttgggctaagtggcatgatgctgtaaaggcatcttgtaaatcctgaagtgctttgcaaatgaaagttattacaaagtccctagtttagtataatctacgtttgactgcatataatgaaaacctcacaagaaaagtctagcggtaggctgttcagtgttggtgtggtggcttcatggtcttaagtgatctggaagccttctactactgtgctctgccatccttggcatgtggttttcatcctcaagataacctcattgtccaagttggctgctagagtgtcagcaatcacatcacattccaggcagcacagcaagaaggaaaaaatggtggggctttggggagcagatggaggaactgggggtaaaacagcgtgttccagtttcctccctcttagggaggaagaaaaccaatgtccacttcctttctattggccagaactgagtcacatggccacacctagctccaggggaagctggaaaggtagccttttagctgggtgtgctgatgctctgagtatggtttgggtcttgtatgaaagagtaaggagagattgggctttgggtagtaactggcagtttctgatgctctccgtccattataatgatcatttaaggatcctattgggtgagcatttattaataataacaataataatgaaaataaagactatcattttgagctcttactgtgtccggtgcactgtacctggccgtttttgcacatgagtccctttagtgctcccctttgtagtggctctggttattcttggctccacatgggcacgtgacagacacacccgggatgctgggctggggccttgtgctgggtcctgctctggaggtctgtgatgggtgcagtcactcagccgggcaaccttggagctcctcagtgtgctccaccctgcaaagcacttctagatatttccttcagtcactcataccactttgtgctttgcatgtctttgggattagaaaccagcttctgggaaatgctctcggagcaccaaagcctgggccccactatcaagaacctcgatgggttaggacaggccaggttttgctgctgtgacaagcagccccggaatctccatggcttagaacaaccaagacttattcctttgcttgcactccacgtccagtgtgggtgactggggcacccgcgcttgtggtggtcacttggggatccaggctgagggaggctctgtcttgacacatacctccttggctgctatagcagcggcagagagcccggtgaaaggcgtgtgcacagtccttaaagcatccccccaagtgacatgccacttctcctttttcattgctcagggagctgacctggccatgctttattttatgctggagtagggtgtggtgggggtgatctgccatttacctgggaggaaagccagactctcctggagttaggaagggagggtggaacactgcagccacagaacccgggaccattcctcctagaaagctcccaagcctcctctcggtccccagacactgggcatttggcagtgaaccagatgctgggggccctgtccttctggtggagggggaggagggctcagcccagaatgttcagaccaggccggctcaatggcaggcctaagccttacgatgctgttccctgctgtgtctgtagctcaacaactccgactctgggctcttcacggtgttcacgggggtccagaacatcagcaggatccacctcgtggacaagtggaacgggctgagcaaggtgaggggcgagaggcgagggcccctgtcgccagggagaggggagggtgggcccggccatggctgctcgggagtggcagggaccagagagctccttcttcctttgtcgtgaagagggtgctgggaggatgaacactcttgaagttggaggagggattttacctctggttaaagcttgaccacccagaggggcaggtggggttagtgattgcttactgagcttactgagcacctggcatctgctgggaactgagtgctttcttcctttcgattctttacttacaaaaatgttttgaaggccgggcgtggtagttcatgcctgtaatcccagcactttgggaggccgaggtgggggggatcacctgaggtcaggagttcgagaccagccaggccaacatggcaaaaccctgtctctactaaaatacaaaaaattagctgggtgtggtgttgcatgcctgtaatcccagctactcatgagctgaggcaggagaatcgcttgaacacaggaggtgaaggttgcagtgagctgagatcacgcaatttcacttcagcctgggtgagaagagtgaaactcggtctccaaaaaaaagagaagagattcacattacaaaataaaacaagagagggagataagtgcccttagtatcacctcccacccctaccccttgccccagaggaaacccacagttatcagtttgggatatattcttcccatccatttttacccatgtgcacacctgtgtgtacgcagagaaatacggaattgtttcttctttgaacatcatgaaatcatactacgtgcattgttttgcaactggcttttttcaccttcgtgaccttttctcaatatgtgtgaaaatgactgtgtgacttcccactccccactccccgtggtagttactgcaaagaccctgagggctagggacaaatcgtaccccaaccggtgcccagagtggcaaaaatcaccatctgcaactggcagtagccattcacgatagatggagttcacattcattgtggcttgtatattccaatatactgtacatgtgcacgtgattttaaacatcctcatcatacagaagattggaaagtgagcagttggttttgtcgagtctgggtctcgctccccagagtcagttaacctgacaggttctgttttggggttgcccggtggtggccaccattatgattttaagtagtttgcctgtgtgccgattgttttcaggaggtgcctgttgacttccgctctgagggctgagcacagccgcgccccacctctcacctcacctgctcaccacacttcttttccagattcaggctggaaatgtgggtgataggcctattttgcagatgaaagaactgagtccctagcgaagttacacattcaggggtctgggagggggaagctgtggtaggcattctctctgtgtgtctacatagcctgccctcttcccaccgtgccagtattgggaattgagtggccgtgcgtgcaccagggtgagttaggtgtgcagcacctgagagggcttattaaggggccttggccctactgaggggtctagtctggatgcttccccccaggttgacttctggcattccgatcagtgcaacatgatcaatggaacttctgggcaaatgtggccgcccttcatgactcctgagtcctcgctggagttctacagcccggaggcctgccggtaatcactgggactcggggcctcctgggtttcctgggtagctcatggccaaattctgtggtgttggctgtgcacttggaaagcattttgactcatcgtggatttgactcagtagcccttggcaccagcttgaattctctttggtcacaccaccaaaagccaaactccagctgccaatgcctctacacagcccaaagagaggctgctggtggtggtttgcagccaggtggtgctgggctgggaggagggggcaggacatgtcaagtcacagggggccataaaatggaggcgagaggtgggctccctctggcgtctggctggtggcccccatgaccatctgggtgctgagacatcagctggctctgcttggccccttcaggctcagctctgtgtcccatggtcccagttgtggggtaagagtagacagtgggtggctcctacagcccttttctggaggccttgctgtgtcgtgttccattctggtcactctggaaaagtcctttacttaggaattcactcatgtggaccttgacttatctgccctcccagcaaaccctgtgaagccctactgtgtgccaggtgcccggtagtgagagggtgggccaagtctccgttccccaggaggctgtgtcctatcagggcaactcaggcaaatgcacaaacactagagtgtcagagagtgacagtgcttttgctctgtgtggccactttttactattttaagtttttacttatttatttatttaattttttagagatggggatctcgctatgttgcccaggctagtcttgaactcctagcctcaagggatcttcctgcttcagcctcccaaagtgctgggattgcaggtgtgagctactgtacccagctgactttaaaagctgaattttaaacttaaagaaaagttgcatgagaaatacaagtggcccccgtctccccttcacccaggttcactagccgtgttaagccccccaccccctcttctcgccgagtgtctttttccagaaccatcggagagtaggttggaggctgtatgcccccttacctccaaatactcagtgggtgtttttcagaaacgaggacattttcttacataaccataatgctgttatcaaaatgagaaaatttggcattgacataatactgttatctaagctggcactttcctataaatcaaaatatgcaaggcacacatgcaatttaaaattttttagtggctgcattaatacaagtaacaagaaattggtgaaattatttttaataatgtattttatttgacctcatatatcaaaaatgggatcatttcaagtgttattgatgaggttttttttttgttttttttgctagcaagtattagaaatctggaatgtattttatacttgcatcccaatttggactcaccccatgtcaagggcgggatggacagccatgcgtgctgagtggctgccgtggacagagtgggtagcacagtgcatgttcaagttcagaagtgcttttgagaaagtacaggagcatgaatggatggagggtggatggggtgggtgtgggggacggtgctgccacccgaggaagtgacagctgaactgagatctgactgaagggctgaagtctggtggatgaagatgccagaggagactgttcttaggcagagggagcagtgatgcaaagggcctggggcaggagtgagtgtgcttaggaactgcagggaggccctgggcacaggaagttggggcagggctgagcagagcttatgcaggggctagataaggtcaatgaatcctaatggtaggttagactagaaagggtcacagattttcagcaggggcatgatatattctgttctttttttaatttcataactttcaaaaacaattttatttttagagactgggtctcactatgttccccaggctggtctcacactcctgggctcaagtgatcctcccacctcggcctcccaaagtgctgggattacaggtgtgagccataatgcctggcctctgttcttttgtaaaactccatctggccacggctaatacattggtgtgggtggggaggcagagtcggagcggagaggcctgttaggaggtcgctgcagctccgcgggtgagagatgggggcggtttggacccgggaggtggtagcgcccgtggggagaagtggctggatctgggcagcctttggcagggcctggctctggccgccgggtctgggtgtcccctctcatcctgtctgtcccctgcagatccatgaagctaatgtacaaggagtcaggggtgtttgaaggcatccccacctatcgcttcgtggctcccaaaaccctgtttgccaacgggtccatctacccacccaacgaaggcttctgcccgtgcctggagtctggaattcagaacgtcagcacctgcaggttcagtacgtgccgtcccctgtgctgggatggcgggagggtgtgagggtggggccagctgagggtttatctgcccagtgctgtctgcttaatctctggcctctgtactcttgataatcccattaggcgaagataatgaggccgcaggaagataatctgaaaaggaagaaatgccaggtctattagttgctgtcacaatatattgccatgaacttcagggcttagaacaacacacactggttatcttgcagttctgtagtcagaagtctgcgtgggtctcaccgcgctcagaacaaggcggctgtgttccttctggaggctctaggagaagctgcgtctgccttttctggcttccagaggcccctctgtgtttcttggctcccaggcccttcctccacctttgaggccagcaacatggcatccttctgatccactctgtcctcatatctcttcctctcctccctcttctgccccctcttccagttctaaggacccttaagaccacatcgtgctctcctggataccccaggacaatctccccatcttgtttattattattttttttgagacagactctcactctgttacccaggttggagtgcagtggcgccatttcagctcactgcaacctccgcctcccaggttcaagtgatcctcccacctcagcctcccgagtagttgggaccacaggcgtgcaccaccacacctggctaattttttgtatttttggtagagatgggggtttcaccatgttgcccaggctggtcttgaactcctgacctcaagtgatctgcctgcctcggcctcccaaagtgctgggattataggtgtgagccaccgcgcccagcctatttttatattttgagacaaggtatcactctgtagcctggagctggagtatagtggtgcgattatagctcactgcagcctcgacctcatgggctcaagcgatcttcctgcctcagcctcctgagtagctgggaccgcaggtgtgggccatgatacctagctaattttatttttgtaaagtttttatagagatgttgtttcaccatgttgcccaggctggtctcaaacacctggcctcaagtgatccacctgcctctgcgtgttaaagcaatgggattacaggtgtgagccactgtgcccggcccaatttctggaccttcaaggcagctgctgagcaggcccagcgcccgtttaccctgtgacctgacatagtcatgggttctggggcttagggcatgtacgtgtcctaaatgacatgaaatgaggctggcgagggtctgtgtgttacgtaacatcttctcgttccgcagtgtgggtggctaggcagatgtgatgactgctgttggcgtcggtcccctgacattgttggtgtgtctcaattgtgtgccagtccctgagacacccccacctcaagttgctcagtttggaccctcgggcgtcagtttgattccctgtcctcacccagctcttccagtgcgtcaacaagcccagatggctttacctccaggttgagtcctcactccttcctctctcttgctccccaccccaacccccgcctcattgtccaggccacggacacgtccttcctggtgatccagccctttcagtagcccatccctcaatgcagtgttgccgccttaccatccatcccctagaccatccagtgcggtcactgctggcctcttgcggctgtttaaattgaaattgatttaaacgaaatcaaattaaaaggcagttccttggttgcaccggccggaagttaaatgctcataagccatgtgtgtctagcagctactgtcttggatagcacagatagagaacatttccatcatcataggaagttctgtagcactcccgacagcagcggagggatcttttaacaatgcaggccgagtgtggtggttcacgcctgtaatcacaaccctgtaggaggccgaggtgggaggatcacttcaggccaagagttcgagaccagcctgggcaatatagcaagacctctctctggcaaaaaaaaaaaaaaaaaaaaaattagctaggcatggtggtgcatgcctgtagtcctagctacgtggaaagctggggtggaaggatggcctaagcccagaggtcaaggctgcagtgagctgtgatcaccccactgcactccagcctgggcaacagaggaagacccatctcgaaaaatatgcagatggccgccgtcctcttaaaatgtctggcagctctgtctgcattcatagtgaagtccaaactcccaccatggccctgggccctgcaggatccagcccctaccggcctctctgaaggatccagccccgccagcctctctgactccatttctccctacacgtcccctgttcattattctccagccctgatgccttcgccctttttctaaagtataccaaggtcagtgccttgcactgtggtttgcatgggttgcttcccctgcttggagagctctttgtctggatttctgagtggatcatccctcaccttcttttggcctgcatgcaaatgccacctcctccgggaggcctcctctgatttcctgttctaaagttgccccctctcccacctgctgctccctatggcttcctcttcttgtcttcttgtcttggtcttcttgtcttcctcttcttgtcttggtgctcattgctccctgaactcatggactgtggattttattcattgccccttccattcactgtcatccctgtaggcagggccccaagctcctcttgttggttttattcttagcttctagaactgtgccccgcatgtaatgggtactcatacagtatttgaatatagggatggtgagtgcgttctgtacttaggaaattgaggcctgatgctggatgcgaccaaggtcacagggttggtaggaccggaagcggccctctatttgactgtgtcttgccttctgggagcctttttggttgaagccccgtcctccagctggcaatggcgactctaaaggactggtctgcaacaggggtcaggaggaggggctgtcaacagattggatgctttcccctatttcaggcagaatggaacaacctgtgaatgaatggtttggagctggggcctgggacgcccgctgctgtctcctggtcctgtctggcccgtctgggcattggcctctgcttgcttcattctttgctggtatcggcggggatttctgctcctaaggttgaggatgttacacacccaataggtgtgctacagcaactgtcgcaagtggcagatgctggactccacctgatttaggccaaaagggcacttcttggtttgcgtaatgaaaaattccagggcagatctctgcattaggcacaaatccagaacttagatgttgtctggaagctgcctctgccaagtcccagctcagttttctgctggactggctttgctgccaagcaggctctccctcctggctgcctgtggaggctccaggctcacctccgcccagctccgagtcctgcagaaagggggccacctgtgtttccttcactccagcagaagttccagggtttgctctaattggtctgcctggctcccatgcccagctgtaaaccaatcacagtagccgaggtggactatgctgattggccaggcttgtgtcacatgctcagatggctcctgggtgggccggccccactccaagcacaaggctgaaagtagggaaggcttaaagtgggggtgtaggtaccaggagaagggggagaaacgacatgcccatcccctccaagggcgtgggacgaggtgtgtcccgccttctcttagcacatctgccaaaagaatttcaaaagcgcaaaggaattttaaaatctttatttaaatagagttttttcttatatttatttatatttttgagacagggtttctctgttgcccaggctcaagtgcagtggtgcaatcacagctcacagcagccttgacctcctgggcacaaatgattctcccacctcagcctcccaggtagctgggagcacaggtacacaccaccatacctggctaatttattttatcttatttcaattttttttttttttttttttttttttgtagaggtggggttgtgccgtcttgcccgggcttagtttttgcttctaaataaaatatacatagatacaaagaagttcccagatgactcatgcagtttttggggttttttgctttgttttttgagacagggtatcactgtcgcccaggctggagtgcagtggtgccatcatggctcacagcagtctgacctccatcactcaattgatcctcttaccccagcctcctgagtagctgggactacaagcggttgctaccatgcccagctaattcttaaattttttttaagagacggggtctcaccatattgcccaggctagtcttgaagtcctgggctcaagtgatcctcccgcccaaagtgctgggattacaggcatgaaccgctgcgcctggctgacacctgcagtttgaaacttcacaaagtcaacgcaccccgtggccagcaccctgactgagaaacagacaggacaggccctggatgccactcgcggtcctcccaccgccctgacatccagccccggagctcagctggtttgcatcttcatgtgaatggacccataatgctagactccttttcctccttttctggcccgtgcaccccttagcaccctggtgcaattcgtccgtgacgttgtgggtggtagcagcccctcctctccgttgctgtgtggtgttccatcgtgggtgccacctccatcttctccttccattgctcctaggcatccaagttcctgtttttcgaccgtgaccgtggtgcacacgtgtcgtttggtgcacctatgtctgtgtttctgtggcatgttatctaaagagtaaaggtaccatgcctttgcctttctgggccttgaaatctgttggactcagacaactccctcatctcaaacctccctgttgcgtgagggcatccgacttgcctcacagagccaactaattatcatcggtggcaatcctgggcaattatgtctggctagatatgccataaagctacaaattaattaccacttacagctgggaagatctctctcggcgtgcttggtaataacattggaagaaacacgtgcgtgggtccatgcaggctcggcctctgaagcaagggcgggggctggcaagttgttccatcccacctcggtctccacctggggctgtgggcaggccagggcttgtttgagattcctccagagttcggctccgtggctgcctcctccacggaggaggcacgagaggcagcgttttccagattgtggaggacactgtccctgcgggtgcttgggatggcttcagaaggtccaaggaggtgagagtgagcttctgggtccatgctcttttcctccttgccatcacctgcaggagaaggtctcttggtgttgagaggacttgaagagccttccacactcatcagccttttttgttttgttttttcttttaacagaaaaagagcagggctcccagttaaagcctcatgcagtaacaggttctagttagaacttacaacatcattattttccacggtattttttaactatgtcttttttttttttttttgagacacagtcttgctctgttgccaaggctggagtgcaatggtgcaatcttggctcaccacaacttctgcctcttgggttcaagcgattctcctgcctcagcctcctgagtagctgggattacaggtgtgcaccaccaggcccggctaattttgtatttttagtagagacggggtttctccatatcggtcaggctggtcgtgaactcccaacctcaactggtccacccgcctcggcctcctaaagtgctgggattacaggcgtgagccaccgcgcccggccctttattttattttattttttttgagacacagtcttgctcttttgccgaggctggagtgcattggtgcaatcttggcttactgcaacctccgaaaactattgtccaggctggagtgcagtgatgcgatttcagctccctgcagcctccgcaacctctgccgcccaggttcaagcaattctcctgcctcagcctcccgagtagctgggattacaggcacataccatgctcagctaatttttgtatttttagtagagacggggtctcaccatgttgcccaggctggtcttgaacttctgacctcaagtgatccacccgccttggcctcccaaagagttgggattacaggcatgagccaccgtgcctggcctctgattcaggtttttgttttgttttgttttgttttccttactgaggcaaaattcttgtaacataaaattaaccattttaaagtgaatgattcggtggcatttagcagggtcacaaggttgtgcagccatcacttgtatctcgttccagaacatttctgtcaccccaaaaggagacccagactcatcagaagtcactccccgccccctcccccagcccctggtcaccacccgttggctctgtctgtggattagcactgtctggatccttgtgagctttttaaaaaaaaattgtttttcttttgagacaggatcttgctctgttacccaggctggagtgcagtggcacggtcacggctcactgtagcctcaacctctgaggctcaagcgattttcctgcctcagcctcctgagtagctggaactacatgcaggtgccaccatgcccggctaatttttgtagagataggatcttgccatattgtccagcctggtctccaattcctgggtgcaagtcatctgcctgctgaggcctcccaaagtgttgggattacaggtgtaagccatggcgcctggccctcgtgagcttttgagagaggcccgctcgctgttccttgttaacttgtccttcaggcctgttgtccattgtcccgagggtgagctggtgtttgcctggtttggttggtcagtggcgaggttgagctcacatttgtagcaggtgtgtctacagggacacactcctgtggatgcagggagatctggccacaggtgcacacacctgagctccgatcattgctgcgtgtcctgcaggggacagtgtgggctgcttggcttgcgcttgagactcccctccccacacccaagttcaaatctggcgttgccttttccatccgtgcctccctagcacccttgtgcaccatgcatttccccctccccacgcttgcttctgccttcccttccacctggaatgcgcttcccgggcatccttcacctggctcctgtgaagaggcctcttccttcttttggtctctcctgtcagaatcagcggctcctgcctcaccccttctctggcgcagagcttgtccctcatcacagggcctggggctttttacagaatggaggaagggatcctctctgtctggttatcttgtcatcgccacgggggtgccctgcagaccacagctctgtgcagacctccggcctggcaggacctgccaatatactgtccttgtctgatgtcccctccctgcccctcttctaggtgcccccttgtttctctcccatcctcacttcctcaacgccgacccggttctggcagaagcggtgactggcctgcaccctaaccaggaggcacactccttgttcctggacatccacccggtgagcccctgccatcctctgtggggggtgggtgattcctggttggagcacacctggctgcctcctctctccccaggcagagagctgctgtgggctggggtggtgggaagcctggcttctagaatctcgagccaccaaagttccttacttcaccccgactccatagttcaaggtagttcaagggttttatgatccctgtactggtttctataaatgggctctaagacagtaaattaattagaacttatcagctgggatgtctcctacatgtgagctggaggcagccctctggatgtgtcaagataccataaagatctttaggtaccaagaagagcctggggtattttgcagataaatcacacagggaatttgtcccgtgtgaagttctgtctacaagcagggagctggacatgtggccctcccaaggacactccttcagcttgtggcctcttctcttggcacctccgttctctgtaaaatatgcccagttggtcttggtggctgctaccattgattcagaaatctgtggttttctgtttcctgggtgggcacttgtggtctatcccatgggcctttaacaaaattattattatttttgagacagggtctcactcggttgcccaggctggggtgcagtggcatgatcatggctcactgcagcttcgacctccctgggttcaggtgatcctcccacctcagcctccctaagtagccaggactacagacatgtaccaccatgcctggctaatttttatattttttgtagagacgcggttttgccatgttgcccagtctggtctcgaactcttgggctcaagcgatcctcctgtcttggcctcccaaagtaccgggattacaggcatgaaccgccgtgcccagccaaaattaattctctaaattgaaaaagaaaagctgtctatttttgagtgtacaacatgatgttatgatgtatgtatataacttgtggaatacctaaatcaagccaattaacatatgcattacctcacatactgatgatgtattggtgctgagaacatttaaaatctactgtcagcaactttcaagcttacaatacattgctattcactctagtcactgtgttgtattgtatagtacaatacagtgactgttgctctatttcccagtaggtctcctaaacttactccccctgtctaactgaaattttgtatcctttgacggacttccccatccctgcccctggtagccagtattctaccctctgcttccatgaattcaacttttttttttttttttttctgagatggagtttcactctggttacccaggctggagtgcagtggcacgatctcggctcactgcaacctccgcctcccgggttcaagcaattctccctgcctcagcctctcaagtagctgggattacaggcacacaccaccacacccggctaatttttgtatttttagtagacacagggttttgccacgttggccacgctggtctcgaactcgtgacctcaggtgatccacccgcctcggactcccaggttgctgggattataggcgtgagccactacgcctggcctgaattcaactcttttagattccacatacaggtgaggtcatgcagggtttgctttcctgtgcctggcctattttacttcgcatagtgtccccaggtccgtcatgttgtcacaaataacaggatttccctgtttttatttatttattttttgagacagagtcttgctgcgtcacccaggctggagtgcagtggcatgatcgtggctccctgcaacctctgcctcccgggttcaagcaattctcctgcctcggcctccagagtagctgggattaaaggcacacaccaccacacctggctaatttttgtatttttagtggagacgggatttcaccatcctgaccaagctggtctggaactcctggcctcaagtgatccgtccacctcggcctcccaaagtgctgggattccaggcgtgagccgccgcgcccagctggatttccctctttttaaacgctgaacagtatcccactgtgtgtgcaccacgtttctgctgcccattcattcactgacggacacttcgcttgattccgtatcttggccacagcgtacatgggagtgcccctgtccctttgacacactgatttcatttcctctggggggatgcccggcagtgggatcactgatccgatggtagttctggttttcgttgtctgaggaagctccacacgtttgccacaatgctgtgcaccttaggcccttcccgaagctccatggcggatgctgttctgcaccatttttctttgtcctcccaggcctccttagccgctgactaggccctctcggccccggccccagccctggtctctgccttccctcttttagttaattcctcctccagcctctcttgctctgctggcttccggagaattccaccatgaacacagtctcctgtgcgctctcagtgatcgctttcctttcagggcacggattttctttcttcccctcacatcaagaaagaaggggttaagtttgggagcccagagagaggcaaacagctgttttgccgcagccactttagctgctgcgtccaattctacctccagatgagcttgaggccgacggggagaggaagtggcctttatttctttgttttttgagctgggcacgttggggagggggatcaggagatcagcttgctgcctgttggcctttagccttgaaaaacgaacgtgtgttggaagctgcttccgtgtggccacttttctgctcctgaaactgggggagggcatggggacgggggactcaacaggacgctgcttatggtggtatcacagctaagacttattataatgacagaattcaaagcaaaattagcaaagggaaaaagcaccttgggtgaagtcgggggaggccaggctggagcttccagagtcctcttccagggggttcctacaggatgcacttaatgtctttagcaatgagttgtgacaacatgtaggagatgttgtctagcagggaagctcattagaaattcagtgcccatggtgttttgctaggggccagtcatgtgggcacctctgcctggcaggtaccaaaattctaggctctgggaaggaaagcaggtgctgagcaagaaccatattgtttgtacaaataatttcggcccagtgaactactctcatcagttaggggatggtggggaccctcctgaaatctgggttcccagatgccagcagaattcctaaggagagcagcttcaggcctgtggcgtgaactctgttctactcacgggtgatctcatgcccatcccaccaggctctcgagggcaagcactccccagtcgtgggcgtaagtgaggcctttaatgagctcttctttgccacaggggcctggaaggtcctcagcatgctgggccataatgaagaaaacatcctttccctatagtgtacgtgataataacctaggcatttatggccctgcgtgtggctatcttgcataccttacttttgctcttgcaaaaattctgtcaggtcgggagagttctctctgttttacagatgaggacgcgactctcagttaagaagaaccaactgcagttctctgacctcaaatctagttttatttccactatcatttcctgacttcattctggaaccaccttcctgttgtttttgatgacacatgtgtgtcacttcggttatttacttaaaaaaaaaagtctcgttaaaaagagctgggtatagtggctcatggctgtaattccactgctttgggaggctgaggcaggaagatcacttgaggctaggagtttgacgccagcctgggcaacatagtgaaactctgtctctacaaaaataataatgataaataggctgggtgtggtggctcacgcctgtaatcccactttgggaggccaaggtgggcagttcgcttgctgccaggagtttgagaccagcctggtcaacatggtgaaaccctgtctttactaaaaatacaaaaattagccgagtgtgctggcgcacacctgtagtcccagctactggggaggctgaggcaggacaatcgcttgaactcaggaggcagaggttgcctgcactccagcctagatgactgagtaagactctgtctcaaaaagaaataaaaataaatttctgcacaaaggaagctttttcttactacctcaaataggaaattacaaaattctccaaaaaaagaagacaaccataaaaatgaacaaggaaaaaaatattaggctctatgtaaaatattgttgtctgtcagcaggagtgaacctggggccagctgtcagcaccattgttagaagtggagattttgtgtaggtgtattagaggggtattaaagaccatgcaaacacctggctgagacctactcttcaaaatgatcaggaggagttgggagtgaattgagaagggacttttgtctgttttattgaatgtggaggttgagagggagcatggacaaattgccattctgcactttgggaaacgctgtcttaggaggacaggtgaaagtgattaggtattttccaccctgagacagccttgctttatagaaggaacctctttgaggctgtgaacataactgtgtgggaagcacttgtttccctataaggggttagaatcaggagaggagatcccagtgcacctgcccagcatttctagaactgttgaccccccccagcctgtggcttgttttaggtaagatacaagcaagctccactgggcagttagctgggacgcccaccctcttgactgggaccagggagaggagggttgacggtgtccctggagcttgggggtggccagtctcctcactgtgtttgttgccgcaggtcacgggaatccccatgaactgctctgtgaaactgcagctgagcctctacatgaaatctgtcgcaggcattgggtgagtggggactgggagctggggctgcattgctcattgagagattaggtgctcagtgctccagtggtcccagactccagtgacataccccaggaaccagggcatggggaggggagagggtcctattgggggtggaatccagtccctgctgatcttctccctgaggggtcttggttttgagccaggtcctgacctgcatcctgatattccttccccagaacaccacttttctttctcttttttgttttgttttgttttgtttttgagatggagtctcgctcttgttgcccaggctggagtgcaagggcgggatattggctcaccacaacctccgcctcccaggttcaagcgattctcctgactcagcctcctgagtagctgggattacaggcatgtgccaccacgcccggctaatttggtatttttagtagagatggggtttcaccatgttggtcaggctggtctcaaactcctggcctcaagtgatccacccacctgggcctcccagcatgctgggattgcaggcgtgagccaccgtgcccggccttcacttttcttttttaacattcaccccctccctgccaattagccagagcttcaatccaagctgtttcctacacgacagagtggcagaaatgaaagcctggcaaaaccaaatgtttgaaaatggaaacgctgaggcaggagaatggcgtgaacccgggaggcggagcttgcagtgagccgagatcgcgccactgcactccagcctgggcgacagagcaagactccgtctcaaaaaaaaaaaaaaaaaagaatttttcaagcactgatttcctctttttgatttttaaaataaaacagctttatgcaaatataatgcatgtaccataaaactcacccctttaaaatgcacaattcaaaataaaaaaaataacccccctaataaaatgcacaattcagtgatttgtagtatattcacagaattgtgtatctatcaccacaatcaattttggaacattttcatcatccccaaaagaaaccccacactcattaacactcacttccctgtcccctcagccccaggcaaccgttcatccacttcctgtctctgcggacttacctattctgggcatttcatataaatggaatcatacactatgtggtcttttgcgactggcttctttcatttaggatcacgttttcaaggttcatccatgtcgtagcatggatcagtatattttatggctggataatattccattgtctggatagaccacatttatttatcggttgatggacgtttgagttgtttccacgcctgggccgttatgcataatgcagctgtaaatgttcttgtgtcagtcccagtgtggacatctgttctcgttttccttaggtatgtaccgaggggtggaatcgctgggtcctatgttaactctttgtttaaccgtttgaggaacagtcagacttgcacagcctctgccccccatccccattctttttttttttttttttttttttgagacggagtctcgctctgtcgcccaggctggagtgcagtggcgcgatctcggctcactgcaagctccgcctcctgggttcacgccattctcctgcctcagcctcccaagtagctgggactacaggcgcccgccaccgtgcccggctaattttttgtatttttagtagatacagggtttcaccatgttagccaggttggtctcgatctcctgacctcgtgatccgcccgcctcgggctcccaaagtgctgggattacaggcgtgagccaccgcgcccggccccatccccattcttagcagcagtgcagcagggttccagttcctccccacgcgcaccagcacttgctataacattacacgttgctagaacttggtgagggattatactgatttgttgctatgtcagtgtctgtacttcttagcatatctgaaatagtttcgttaaaaaaaattctcttagaaaaatccctgggttgcaggaatgtgagcatctattcagctttgtcaaatgcctctcggctggaaagaataacactttgtcagagcacggcagcgagtaataactgtgagctctcttccttcatcccgcccttgcattttatttttatattttgaggccacttagggaatttgttcttgatggatttgtgggtggggaaacagccccaggcatggaagaggcgtttgcagcccaagtcctccctctggttccaccgcgtggcacctgggctgctaactgggatgcaactggggccaagtgggtgacccagatagaagaggcgacctggggccgaggatacagccccttcccagcaccagctgactgtagccccatggaaatgcgggctcagtgtggccacatcctctgcatttttcaaaaggacttccaaatctgaattttaacaggagctctgtcaatttttacttattgggaggtaattcacattctttttttttttttttttttttttttgagacgaagtcttgccgtgtcacccaggccagagtgcagtggcatgatctcagctcactgcaacctctgcctcccgggttccagcgattctcctgcctcagcctctcaagtagctgggattacaggcgctcgctagtacacccagctaatttttgtatttttagtggagacaggatttcaccatgttggccaggctgttctcgaacttgtgacctcaggtgatccgcctcccagagtgctgggattataggcatgagccctgcgctgggcctaattcacattcttaacaaacagttcacgcgggcagctggattgtgcctgccagtgacctgtggaccggtcacccaacctctctgggccgcacagctgctgacctccctgtggactgggaacaaggcactccaggaaagtggtctcaacagcagatgtggagggccacgagggatggccgtgggaaaagtctagagacacagctgccgggaagcagagctgtctcgtgacctgtcggggaagcttctgtgctccttgctcgctaggtaaaggcagtggggttgcatgttacttgaatacaattcccattggttcttacaaagtctttcagagaaaagcagccaaagtaaatggtaccgtctgttgtctccccatcgtgtttcgtcctctgtagggtgatagtgtgagcccatttcactgtgcaataccctacttaacaaggggcctgagagacctccaataattgtgattgggggatttcagcctttttttttttttaagatggatcttgctcttgtcgcccaggctggagtacaatggcgcgatttcggctcactgcaacctccgcctcgggttcaagcgattctcctgcctcagcctcccgcgtagctgggattacaggtgcccgccaccacgcccagcaaatttttgtatttttagtagagacggggtttcactgtgttggccaggctggtctcaaactcctgacctcaggtgatcacctgcctcagcctcccaaagtgctgggattacaggcgtgagccaccgcgcccggtctctgattgtggtatttgagccttttgtgctgactttcgtcaccgcccctcagtgacttccatctcccctccctactgctgtgcatggcaaagtgacagaatatttgtgtgtccatttctttgctgggatttaacaattataacaacaacaataataaatgtgccaagcacttttatatgccgggtaattttcgaagcactttacatgtattactgcattgaatcctccctagagtcctaggaagagttacgttataatatctcgcttatacagaagggacacaggctcagtagcacgcccaaggtcacagagctcgtaagtggctgtgtcaggggtcccaaggccaccgcaggctcgacgatttgctgggaagcctcaggacgaagcatatggttgtacacgtggctatgatttattacggtaaaaggattcaaagcaaatcagcaaagggaaaagccacacggggccaagtccagaggaaagcaggtgccagtttccagagccctctcccaggggagtcacccaattcttgctgcaaggagttgtgacaacccacgtgacatgtcatctggcagggaagcccgctagagagactgagtgcccagggtttttactaggggctggtcatgtggccaccctctgcctggcaggtactgaaattccagacccttagaaggcaagctggtggtcagtataaaccacattacttgtacagattgctcaggcacagtgagccatccttgtcagttagggagcaatgggaggcctcccgaatccaggctcccagacgccagctccgggccagcattgccagcagcctgtgtggggtggaagggctcgggcctgccacgtgagcacgtgcctgcacagcggcccaggtgggattcaaatccaggcagcgacgcttgagtgtgcactattaaccacctcgccacactgccttttctgctagacacctgttgtgggggggtctgtgtggggcaagtggtgagccagcccaccctgctgctccatactgagtgtgagttgctgtattcatttccttttgctgctgtcacaattttgccacaaatgtcatggctcacttttaaaaactatcttgcagtgttgggagtctgaagtctgaaaggaacacaacaaggctaagatcaaggtatctgcaggccttgttccttccagaggctccaggggagaacctgtgccttgccgtttacagcttctagaagctgcctactttccttagctcatgaccttaatcctagccctccctgttttgttgttgttgttgttgttgttgagacacagtctcgctctgctatctagactggagtacagtggcatgatctatagttcactgcagccttggcctcctgggcttaggcgatcctcccacctgagcctcctgagtagctgggactacaggcatgtgccaccataccctgctaatttttgtgttttttttgtagagacaggggtctcactatgttgcccaggctggtcttgaactccagggtgcaagtgatcctcccacctcagcctcccaaagtgctgggattacaggcgtgaaccactgcacttggcctctccctctttaaagccagcagtgtagcactgtccaatttctctctgcctctaacctcctgcttccctctttttttttttttttttttttttgagacggagtctcactctgtcgccaggctggagtgcaatggcatgatctccgctcactgcaacctctgactccctggttcaagtgattctcctgcctcagcctcccgagtagctgggattacaggcatgtgccaccacgtccggccaatttttatatttttagtagagatggggtttcaccatgttgcccaggatggtctcaatctcctgaccttgtgatccacctgcctcggcctcccaaagtgctgggattacaggcgtgagccaccacgccccagcccctctttttaaaaattaatttttctttttttagggttttaaaatttgtttttgttttttcgtttttctttctcttgcctgattgctctggctaggacttcccgcttctctctttaaggacttttgtgattctctggggcctacctaggtattccaggatactcttcccatctcagaaccttgatgtaaccatatctgcatggacccacctagatattccaggacgctctccccatctgagagccttgatgcagtcatgtctgcacggtccccttcgtcgtggcaggtcacagtttcccaggtgtcgcattggtcttccggtctccttaggcaccttttggctgtgacagtctctcatctctccttcattttgatgacagtgacacttttgagaagcactggtcaggtattttgtaggatgaccctctactgggattggtctggtgcttttctcatgattagactggggtgatgggttttgggaggaggaccgcagagagaaagttccagtttcagagcatcttgggtacattccgtcaacatactgtatcactgttgatgtcgaccttgatagcctggatgaggtcatgcctgtgacgtttctgcagtatcaagtttacttttattctccctttggattttattatctttttaacttgacgtgtaagttttaacttcacaggtaataagaacatatcttcctgaggggaagaatatggtttcctgtgactccccgccatccccagccgtacccaccatcatcaatttgctgtgcttccttccaggccttttcctacttatttacattcatatatatgtggccatagagaagatacatattgtcgtttgtctgtttgtctttgctagtccaagcaacactgaacatctttgtgcctctgtgtgcatgtgtgagcatctctagggcagtttctgaagagcgtaattgctgggtcgtgaggtatattggtggaattaggtttggcagtatagatcagtaaactcaacagttgtggctcaaatgggacaaaggtatattgttattttaaaaatcttcttttagaggatgtctggaggcagacagtccaagtatggcaagagacattcatagtccaagttccactcatctttctgttccattttcccaacacatggcttccatcctcaaggtcacctctggtcccagtgtctgcagagctccagcccttgcatctgcgtttcaggcatctgaaagggaggagggaaaaaaggttcacctcccagctgtgaaagcttctttttaagcagccctcccggccatcccacgtaacgcttctgcgaacatctcattaaccagaacttggtcacagagcctcacttgccacaagagaggctgaagtggagtctttaactgggtgcattgccatcctgagtaaaatttgggtcctgtttctaaaagggaccaatggattttggctgggtcactggtggtctctgccctgtaggagatgtgagtttttagtttaaaaagattattatcaagttgtcaagctctttgccaggggagattccttctggcagcacatcgaaacactggttccctcagcccatgccaatcaagtaccatggaccccttatccctgggggtatattccaagacccccagtggatgcctgaagctggggatagtactgaaccctgtatagcatatactatgcttcttcctatacacacacatctatgataaagttaatttataaattaggcatagccacaattaacaataactaagaatagggtaattataacaaatactataataaaagttatgtgaacatggtctctccctcaaaatatcttattgtactgtactgagggtaagaaatggcagaaatcaaaaccatggataaggagggatgactgagattgcagaatcaaatccctcctggcctcagagcttatgatcacaggttcaaagctgtgtgatgtcaaacagccctgtgggaaaacatctcaccttgtcaactaaagaaaaaaaaaaacaaaacgccttttaaagatttaaagttagtcttatttacaagtattattgagggctgtagactgagaccttcagcctggggacagttttgtcatatggctcctaaagtgtttcagctcattgtttatatttggtggtgagggtttagtgtgtgcaaaattatactaaacctgtttagatgttgtattcaagcagaattagatcaagtttgggtgtaagactttgtttcacacagctatgtcttgcttatttccagacaaactgggaagattgagcctgtggtcctgccgctgctctggtttgcagaggtaagggtgcgttgggcacagcgtcgggggcttttgttaagagccaatgtgggcatttgaggcaggaggcggggggagcagcttgtagaaagggagagggctgagccagggtaaccggactgtgacatggaccagcgtatcagaaacttcaccctgtccaagcaccctatgtcagttatcccaccaaggtgaaagggatccctagagatggggaagacagaagctgcatgaagaggtaaagtccctggccctgggtgtaaaataattttgttggggcatatgacctcttctcctgaaagtggggaagttggtttccaaggtgtcagcttttctcttaaacttacttctctcgcagcttttcagaattccttctggcctagcttgttttattttattattttattttattttatttactgtatttattgtttcttgcccacctcgttttaaatcagggctagctaatggccaggacaaacaagcctccgaatgtcaagtttacttcctactcacagccgaatctgaagtgggttgatggggaggcagagctctgctccctgcagtcatttagggttccagggccccggtggccccgccatcctggagagcctccattcagtggcagggaacgagatggagagtcacgtgaggccaggtccacctcccattggtcaggacacgatcatatggccctgcccaactgcaagggagtcggggaattgtagtctcaccttgtgtcctggagggaggaggtccctggcaggctccaacacatgctttagccgggaagcttgaggtggggaaaagctgaggcgggcacagaggaaggtgttgggtggcatctgcgctgtagcccgcagcgtgcggccccagctcatgtgtttgtcattctgtctcctcagagcggggccatggagggggagactcttcacacattctacactcagctggtgttgatgcccaaggtgatgcactatgcccagtacgtcctcctggcgctgggctgcgtcctgctgctggtccctgtcatctgccaaatccggagccaagtaggtgctggccagagggcagcccgggctgacagccattcgcttgcctgctgggggaaaggggcctcagatcggaccctctggccaaccgcagcctggagcccacctccagcagcagtcctgcgtctctgccggagtgggagcggtcactgctgggggctgcgcagcacgcttgcgtcttttgcatgccgcgttgccactactctgcctgttctggaaggcctgggaccctcccttggagggggcacaggtgggctttgagtaatgagacctggtacttgcatcatccattcatcaagtcagcacccggggatgccaggttctgttaggggcgaggggacgtacagcagtagaggagacagctgagatccctgctcagggggattgaggggggctggcatcccagccggggagacagatgaaaaccaagtaaatcagcagaaaagataatttcactcatgataggagctgtgaggggttagagccaaatagaaatacagcgtgagccacgtgtgaggttttcagtttaaattttctaatagccacttaacagtcaaaggaaacaggtggaattaattttaatcttatttaacccaaatatatgcaaagtattatcacttcaacatgtaatcagtataaacggcatcaatatttttgcagtgtttttgcatgaagtctttgaaatcctgtgtgtacgatacatgtgcagcaggtctcattttggactggccccgtttcaagggctcaccaactgaatgcagcttccagactggagagtgcatgtctggagcaagtggggacaaggacagatggagcttcaggaaggcctctctgaagaggtagatagtgagctttgacatggaggccagggaggcactcagcacacagccacatgaggaatgctgcctggagcggccactgcaaaggccctgtggcagggacaggcaaggcacattggacggtcaggtagggccagggtggctggaggggagtgagggcagggacagaggtaggaggtggtgtctgagagtggacagggcgggccacccagggcctcgtggtgcacagtgagcagtttggaactgattctgggagtgacagagccattggaggcttttaaagaggggaatcactaggtcagctgctggctggggaatgggccccgggctgggaggggtggaagcctgggcccagcggggaggccccagtgcgtgaggaagtcgatggcttgaacaggatggggcagctgctatcaggagggaacggaagtggggaagagctccagccctgggcttcagacctccagaagcagcaggaagaggggtgataacagtgtccctccttgcttcggggtcatttatttattcattcatgcattcactgcaaggccctttgcacaggtcaggagatgcagaaatgaccagaacatgagatctgcagcaaagatgggcaaggcaggcctttaggcaagttactacagtcacacgaaggacaggagagctgtgatcacagagctcaaggggcagtggagatgggcgagtggctgccatggcaggggaagggatgctgcccactggcaggtcatcaggaaaggctgtttttggatgcatggaccagaaagccactctctgaggtggcccccacctgcatcatcctagggccacaggccgaggccttctgaggggccttggggctgccccgctgctctgctggtcttggctcctctgcagcacctgcttcctttagcactggtgaatgattcttcctcttcccctgtctcagggaaggcttgcctgcttccatgcttgcatgctgggtgacaataaagcattcctggttcttcaccttggctttcagacctgaaacccgacttcctttcaaaattcctgtcctcggggggaaaaggtttccacaatgtgagatggtagcctggacaccagctgtcatcatgttgctgctctagcgtttgagctcccgatgaacaatgaccattgggtccaaccagcccttttgggagcccccttctctgttactgccccagggggagccagaacccagcagggctgtgactccagcgagcaaaatggaactccctccagtttctagactgaattatgtagggaggacagaaggactcagaacccacactcccagaccatgaataccttcccgtggcagagcatcaccataggtgtccacaagtgacgacgcacagccacatgagggggtccctggggactggctgagggactgggccagaggaggccatgacagcctcatccctctgtctccttctgtctgtctccaaattgtccaccagaatggggacagggaaggagggtcaggaagcacagaaggtctaggctgtggctagggtccctttccctgccgcagcccccaaatcagcatcccaccctcaaatccagtaagaatgctacgatcggcagtgtggctccctccctgcaggtttcattggaggccacgtaagtgaaatttatcccattatgtgtgttttgatgtagcaggaccttaccagttttttttgtttttttatttttattttttttggtttcttttttgagatggagtcttgctgtgttgcccaggctggagtgcagtggcacaatcttggctcactgcaacctccacctcccgggttcaagtgggagcctcagcctcagcctcagcctcagcctcccgagcagctgggattacaggcacctgccaccatgcctggctaatttttgtatattgagtagaggcggggtttcaccatgttggccaggctggtcttgaactcctgacctcatgatctgccgccttggcctcccaaagttctgggattacaggtgtgagccactgtgcctggccggccttatcagtttttatgtaatttgtcctgatttaaaaaaaaaaaatcacatgcgggtaaactcaacatattttaatttctctttagagaaattttccacttgagccaggtatggtggctcttgcctgtaatctgagctactcgggaggttgaggtgggaggatcacttgagcccaggagttggaggctgcagtgagccatgatcgcaccattgcactccagcctggacaacagagtgagatcctgtctcaaaaattaaaaaaagcagtaattttttcttctcaagtcattcttttaaaataaatcaaaagtattttaacagaacaatctgttcctcgttgattttaaacagccccccagctaagtccactggttgtcggtctccatggcccatctccccaccttgcttcctcgctggcttaaattttcaagtggacgagcccttttcagcttggcttgtccacctcccaggtgtgtttcctgaagatgcttgtacttatgtctaagagcggcagctccccacatctcagccacctgcaatcgttgagggttgttggactctaaacttatgtgcctttcctgtttcctctttgccttttgcaaattgaagaaccgtgtaaaaccatttttatgtggcttcaacgtcaactataaattagcttggttatcttctaggagaaatgctatttattttggagtagtagtaaaaagggctcaaaggataaggaggccattcaggcctattctgaatccctgatgacatcagctcccaagggctctgtgctgcaggaagcaaaactgtaggtgggtaccaggtaatgccgtgcgcctccccgccccctcccatatcaagtagaatgctggcggcttaaaacatttggggtcctgctcattccttcagcctcaacttcacctggagtgtctacagactgaagatgcatatttgtgtattttgcttttggagaaactgcccttcctatgttctgagtgaatagcagtttttttgatcccagagggcaacttgtattctgtgggctggtgcctatttgcaaggtcacattagaaagacaggagcaaggcttaggcctgctgcttctggaatctcttgtgcaatagactcccctggggaagtctgctagaaatgcagatccctgggcagccttctagccttctggaataggatcatggtgggaccctggaatctgtattttaatggaccctaatgagattctgatgtagaaacatgtttgagaggcattgatctaaatctgggatgactggccaggtgcggtggctcacacctgtaatccagcactttgggaggccgaagcaggtggatcatttgaggtcaggagttcaagaccagcctggccaacatggtgaaaacctgtctctactaaaaatacaaaaaaaatgagctgggtgtggtggcacacgcttgtaatcccagctactcaggaggctgaggcaggagaatcgcttgaacccgggagatggaggttgcagtgagccaagatcgtgccactgcactccagcctgggtgacagagtgagactccgtctcaaaaaaataaaactaaaataaataaataaataaatacatctgggatgactgaccaagaacaaagaatgtaggcatcaactgaacaccaactgtatacctgggactggatctgagggtaggattgccagattgagcacaaacaaacaaacgaaacacaagaaacaacagaagggtgcctgttaaatatgaatttctggtaagcaataagtaatttttattgtgttcctgtgcaatgataggacgcacgtatcctgaaaacctgtctgtagttcacctgaaattcacatttaactaggcgttctgattttatgtggccgccctatctgctgggaacataggctgatgcccctgggggttctgcgtttccttggccaggttcctgtagggctgaggtcatgggggagccgtggccagggatggtgtccttgccaggggaggtgacgggcagagctgcaggccctacaacttggggttgggcagggatgagtcgctctacggtggtgcctctgataatagctgttattttagtttctgaaaaatgtgctgccctcaagagcttctgaggctaggcctacttgggtgaaaatagctttccagggagccacattgtggggacgtgaggcagcagccccactctttggggccacttggctgtctctaactcatctcacttgccagggctggacaaggagatgaaaaagaaaatgccaaggggtgggcaggcaggagcctgttggcgttggcaggcgctgccagccctgtgtcccagtcaagctctggggcgcccttcctgtccatctgggagtagggggtggagtctgaccatgttggggcggagtgttaatattaggagaggatcctccctgggacagggtccccaggcttgggggcaaggccttctgcctggacccccttcctttcctctctcccaggattcctccaggacaccgtagtgctgtgcacggtttggccccatcggtgtgcctgctccttccagccactgctcccttctgcagaaacttgcctgggattcccagggtgcaggggtgggggctggtcaggggctggtcagggcctggtcagtgtagagcagggagcttttcacttttagcatagatagagtggccagggccccatggctgcacctccctggacataaccaggatgtcctgtcatctgccccccaaacaaaactggggtctcccctttattttgccaacagaatccaatttttaggtgatgagacaagtgtttgacttgaaaagaccctcctgccctgcctcctggaaggtctggagcccagcccagcgccccggatcccctaggcatgtgaaacggggaatgcagtgtcctccagtggctggctgcagcttggggtgggcacctgggtggtggctggtggtccccctgcaggccactgctgccccctcttgggtcctgttctgagtctcaggcctgagtccctggggaaggccccacacctttgccctgtacctgggtatggggatggccctgaggggctgccttgcttgggagaaggggggaaaacagatatttttatataaataagaaaaagacagcccctctgggcagatgaggcctgctgtagggcagggggcttggtaaactgtgtgtccactggtctgtaacccttcagctgggtccttttgtgcagtgaacagcctggacaactgtccaggtggcccttcagggatatgttcctggacctttcttagcttctcaccgatctttcttccacgccaagtccatgttcctcagtcaaacaagtggcaaagaggaggaggaggaggggaaggaggaggaacctgcttcaccctctggcacctgcgggttttgttccacgtgtcttccttgggaaagacaaggggttcttttacagcctaggggtggtttcccctttctacttctgagtgagaccttctcaagtcacggctctttgggcccacatggctaaggtctagccacctgtgggtgtcctgtgctgcctcagtgggtggtgtgggggcggggctgacctcccccgcgcctggctcagtgcagcagaccctggcccctgtgcccgctctctgccctgagcaggagtttgattttcctaccccgtggtgaagcaagcacaggtgggcggaggtgggcagcggtttccagccccagccaccggggcagggaggcctctgttgctcagggcaagggaggcagggggcttagtgggacgaaggctcaccccacactcttatcattagcattatctgtatttttaatttttaagttgagaaattttctacaactgtcaaactagacaaatgacagtatccagttcccctcacccagacgcagccattgctgacagctgtcagtgttgaagatggccagcatctcatgcccttggtttcactcgttccctgggtggccctcgtccccctccccacgtcccgcgccccgcataccctgagcagccatggccaggaacttggcacgtgggtttgttttttctgaatctgcatgtgcgcagccatgagcatgaggtcactttttgaatgtgaccgaagctgcatcctgctgcgtgtattgctgtgtggctggctttcctccctgtcttctgttcaggaatactgttcaggctgaataccgtcctgtgacatgggtttaaaaacacaggccaggcatggtgtctcacgcctggaatcccagcgctttgggaggctgaggtgagaggatcgcctgagcccaggagttcgagaccagcctgggcaacatagacctgatctctacaaaaaattaaaaaatgagccgggcgtggtggtggcacgtgtcattgtcccggccacttgggaggccgaggtgggaggatcacttgagcccaggagttcaaggccgtggtgagccatgatggcaccaccgtactccagcctgggcgacagagagagaccgtctctaaaaaataaaaaataaatcaacacataaacatacgttctcctcctgagggacagagcttgccccggttgttccatgttgactgtgctgcacacaggccgccccccttgctctgcccctcactgtattaagtctctttgggcctcagtttctccatctctaaaggaggtcggggaggccaggcgggtgttgagtgagatgaagaggcccttggagtcattccaggagtctataggtgactccagtctcttctcacttctgacagcctggtggcgggggtggagtctctgctggggatgtgggtacagggctggggtgggcggggatgagggtggggtttggtgacagggcgtgggtggtcacccagctttgcctttctccacagggtcctgaggacaccgtgagccagccaggcctggccgctgggcctgaccggccccccagcccctacaccccgcttctcccggactctcccagcggacagccccccagccccacagcctgagcctcccagctgccatgtgcctgttgcacacctgcacacacgccctggcacacatacacacatgcgtgcaggcttgtgcagacactcagggatggagctgctgctgaagggacttgtagggagaggctcgtcaacaagcactgttctggaaccttctctccacgtggcccacaggcctgaccacaggggctgtgggtcctgcgtccccttcctcgggtgagcctggcctgtcccgttcagccgttgggcccaggcttcctcccctccaaggtgaaacactgcagtcccggtgtggtggctccccatgcaggacgggccaggctgggagtgccgccttcctgtgccaaattcagtggggactcagtgcccaggccctggccacgagctttggccttggtctacctgccaggccaggcaaagcgcctttacacaggcctcggaaaacaatggagtgagcacaagatgccctgtgcagctgcccgagggtctccgcccaccccggccggactttgatccccccgaagtcttcacaggcactgcatcgggttgtctggcgcccttttcctccagcctaaactgacatcatcctatggactgagccggccactctctggccgaagtggccgcaggctgtgcccccgagctgcccccaccccctcacagggtccctcagattataggtgcccaggctgaggtgaagaggcctgggggccctgccttccgggcgctcctggaccctggggcaaacctgtgacccttttctactggaatagaaatgagttttatcatctttgaaaaataattcactcttgaagtaataaacgtttaaaaaaatgggatgcctgcctctgtgacagccttgtttgctgaggtcgtgggggtgggggcctctgggaagttccgggctcctcttctcttggtcaatagctcctttctggtggctgccaagagcgtctctcccagggccgggctgctggcttaccttcctgttgttttcaaatttcaaccttgtgcaatgttgagtttcatagaaatactgcatgagtacgcccttgtttagaagcagcagggtctgagtcccatcccacagcccccagtgcagacgcttttgccacttttgcatggggccccctggatgtgtttctgtgcatttatctacaaatcctggtgcccgtaggacatgccccgtgttgttctagacctttgctttctgcttgttacataaatggtgaagaagagaagcgggtaagagaacagattggagccatctaaaagttctcatcttaagtgtagatcattgcaaaggatggaattttctccgattgtcatcatcgttgatgtttgaatatgagaccatttcatcagtatttaagtgtgcccgctgggatctaactaggagaggagagggtattcactgccaaacatttcaaagaatatacgaacaagctcttttatggtcagaaatgttagcccttttccccccttaaacttgtatttcctttcttcttccctcctaaaattttatctaaatgatatttatatttgatgcttttaagccttttattaatcactcttatacttgcctgcaacataaatatataagttgaagcaaactttttttttttatttcttgtgaccatcaagggtaaatttttttaggtctggggctgccataacaaaataccatcaaggccgggcgtggtggcacacgcctgtaatcccagccctgtgggaggccaagaccggaggattgcttgatgccaggagttcaagactagtctgggtaatatggtgagaccctcatctctacaaaaaaaatacaaaaattagccaggcgtggtggtgggcgcctgtggtcccaactactcaggaggctgaggtaggattgctggaagccaagaggttgaggctgcagtgagctgtgatcatgccactgcactccagcctgcgagacagagtgagacactgtctcaaaaagaaaaaataccatcaataggtggcttaaaccatttatttctcacagctctggaggctggaagtctgagaccagggttccagcagggttgggttctggtgaggcgtctcttcctggcttcagacggccgccttctctgtgtcctcacatggcctttcctcggtgtgaaagggggaagagagagggagagcgagagctctgtggtgtctcttataaggacactgatgctatcagatcagggcctcatttaattattttcttagaggccccatctccagacacagccacactggaggttagggcttcaacaggaattttgggtcaacacaaacatttagcctataccatctggattgcctttcaagtctcaggacacaattggtcaaaactatatcactatgttttatgtgacatatcaaagtagcaaaattttattggaatgcatgtccttttggtatgcattttatatatctttttcatttacagattagagttgtgtgtgagtgtgtgtacaattccatgaattttgacatgtttatagagttgagtcattacccctacaatcaagacaaaacaatttcatcatcccccaagatttcctcatgtcttccctttgtttttgtttgttttacagtgggctcccataatttttttttttttttttttgagacagagtctcgctctgttgcccaggctagagtgcagtggttcaatcttgactcactgcagccttcacctcccaggctcaggagagcctcctgacttagccttctgagtagctgggaccacagatgtgtgccaccacacctggctaattttttttttgtagagatgggggtctggctctgttgcccaggctggtctcaaacttttggcttcaagcattagtcccacctcaacctaccaaagtgctgggattagaggcgtgagccactgcacccagcctgcgacctgtgctgccttcctcccactttgtagggaagtccctcatccccatgcttagcccttggccactagctatttttaccttttccagaatgttctaaatgggatctacagcctgtaaccctctgagcctggcttccttcactcagcactgtctctagatgcatgcctgttgttgtgtgtagcaatagttcctttcttttcaccgctgagcagaactccatggggtgcacacaccagtgcttttcagccgttcacttattgagggacacgtagagtggttgcagcctttggcaattgcattagttggttttcacgccactgataaagacatacccaagactgggtaacttttaaagaaaaaaggtttcatgaactcacagttcatatggctggggaggcctcacaatcatggtggaaggcaaaggagaagcaaagtcatgtcttacatgggaccagagaagagagaatgagagccaagtgaaaggggaaacccccgatcaaaccatcagatcttgtgagacttactcaccaccaggagaacagtatggggttaaccgcccgtatgattcaatgatctcccactggctccctcccacaacatgggaattatgggaactacaattcgagatgagatttgggcagggacgcagccaaaccacatcagcaactatgaacaaagctgctgtgaacgttcatgtacagatttgtgtgtgaaggcgtacgttcatttccctggggtgtatacctcggagtggagctgctgagtcaaactggagctctgcgtttcacttttgggggactgccagtttcacagtcgctgtaccaggctgcattcccatcagctctgcgtcctcaccagcatcttggtgttttcagttttaaaaaacttcagcccttcgtagtggtttctcattgtggcttttatttgcttagaaatacttcttgtcctgagatgagtgggacttcctctccacccccaattaattcatgtatccgtgaatgactgtcacgtattgctagaatgaaaccaatttttaccatcaattctttgtccctgcaagtgcagagaagccttgttttcataaggaagtcactgggagtggaattcttatactccttctgggtagtatgcgaatgtcacacggcgatctgtcattggaagcgattctcactgatctcccagcagacaggtccgtttgacctttcttcaaatttgtagaaagcagcaaagtggaaaccaccggcttgcaaaagcatttcttacccaatctttagatgggttctcgaaacctgtgtccgggaagttccctctgattggggctggaggtcagggaggctttgcccgttggctgtagagtggaggggtggggggtcttgtgacctgcccggggaaatggcaggcgagtgacaagctcaggagagagtccaggccccgaggatggttcccttcaaactccccatgtctgatcctctgggaagctgaggccagctttggttatttgatagccacggtgaggattttgacttaatctgtgtatgcaacacatcacagacagttttaactcttgcattcaagtctacctgctcataaaacagaaaaaaagacaggccccagaaggcattcggtttttttttttttttttttttttttttggagacagggtctcactttgtcacctaggctggcacaatcactgctcactgcagcctcaacctcccaggctcaggcgatcctctcacctcagccagcctcccaagtaggtgggattataggcctgtgccactacacccggctaattttttgtatatttttgtaaagatggggtttcgccgtgtcgcccaggctgatctccaactcccaggctcaagcgatccgcccgcctcggcctcccaaagtgctgggataacaggcatgagccactgccctggcccttaagtcattcttgtgtttgtgtgtgtgtggggtgtgtgtgtgtgtgtgtgtgtgtgtgtgtgtgtgtgttcccgagggacttagcctcccgtgtgtctcattgggtgaacatcttgcttctgagtgaggtttgatttttttgtagggtgtgcgtttggacacatccttggtcttaagcccagccaacgaccttagccagggctcagggagggaagcaccgcctgccccacagctggagggctggggttcgggacacccggtcgagcttcagtgtctctgattctgagcatctttgactctgcgagactttcttctcatgccttcacttcaggcgccagcccctgccaacgatgggactccactacttaccatgttgatttaatttggcttactttttttcttaaagaattttattttaaaaggaaggcagtcatatctgtgaaattatgggtcctttgggcaagtaatagttttccagtcgccattaaaataaatacctaactattaaggacgttcctcccagtacctcgaagcagcctgctacctgcaatctctgcaccatcccatgattgtgtcccatgcacccttcttcctgctcggcctgcatcgcccctgcgtggccttttcccccctctctgcctctctcagtcttcgccatcatcaaaggcgcaattccagccatgccctctcctccaggaagcacccctcccccatcactcctgcttgctgttcttccctgtctcaggactcctggggcactttgtatctcagttgatactagaatgttctagaataccagaagtcctgacaccagttgctgtaaccccaaactccaaggacctgcagcataaaccccggtacatgcccttgtgctggaaacgaatatttttggccggggcggttactcacattccttagtactccttggctcacgcggacacccattctttcaacacatacttatccagtgctcactacgcgctaggcacagggggtgcaattgtggaccagacagaggcggcccttcctctcaaacaactttacagttctgccacttactagctgtgggaccctggacaagtcacacagcctctctggagacctactgttctctcctttaaagcaggtgactcagatctgctttgcagggacgtctcctgctttgcagcgatgtcacccaggagagatgggtgaagtggatagtgaatggagtgggccagggcggtggtcctcggctgaaaacaatgcctctcggggtcagcgtggggctcaagaggtggcggccccgtgggtgggtccagggccagggaccctgtgtccgagcccctgccctggagccatcctgtctcacctgaaggctctgccagtctggtccactggcctcccggctcccacgcgtgtcccgagccgtccattctccaggtagcggccctgaaatgttaatctgtcacaagggtcatctttgcttgaattgtgggtgacttttccccatcctgggggtaaagtccccccgacttgtctctccatccgcgatcccctgcaatctggctgcagcacgcgagacttcaggacgattccgagctcggccactggggggcgagctgtgcacacaggtggtccagaggctgctgcctgggaggggctgcggatcacccggttcctggagcggagtggattgattttaaactggggaagctgtggtccacagcctggcttcggaaacccgtgacccctagaaattgtattttacgtgtgtgtctgggcgttttattctgggaagcatttcctcaagtcttcagattttcaaaggggtcttaaccctttctctctggggccttgggaacaagagtgacaaccctataacagggcgaccagggtcacacgatgtctgctcctccttagcgtgctactcccagtacctgcgtgctactcccagtacctgcgtgctactcccagtacctgcgtgctactccctgctctgctcaagttgctgggtggccttggagcaattcataacctctctgagactgccgtgaggtgggagtgaagattgctgtgtacgaatctttgagaacccctgtaagggtggaatcgaaatggacgtgtgagggctgggcgcgggggctcacgcctataatcccagcactgtgggaggccaggggttcgagaccagcctgggcagtatggtgaaacaccgtctctactgaaaatacaaaaattagctgggtgtagtggcgggcacctgtaatcccagctagacgggaggatgaggcacgagaatcgtttgaacccaggaggtggaggttgtagtgagccgagatcatcccactgcactccagcctgggtgacagagtgagactccatctcaaagaaaagaaaagaaaagaaaagaaaagaaaagaaaagaaaagaaaagaaatggatgtgtgagcattctgtacacagcctgggacgattatgaaagctctcaaatgctgagcctccagcaaacatttatcacacacctactgtgtgcagagcacttgctgggctctgagagggagtcaagctctgagaagtctgtgtcgatttgttcattccttcattcagcaaatgctgtttgggtgctcactgtgtgtcacacaccctcatatttattgcgaatcggcttgggttaggttccccagaagcagacactgagaccaagattcctggccagggagtgtcccaggagggcaaaggggactctagcagcccagggtcacggacagctctcaaaggcagaccaacaggtcttgggttttggatacaaaaatgctccaaaatcaggggtgtgcaaatacagtaaaaagaggattcatttggatctgcttagaacaccaagggtatccgcttcagaaatacagaggtgaccgggtgcagtggctcacccttgggaggccgaggtgggcggattgcttgaggtcaggagtttgagaccagcctgggcaacatagtgaaaccccatctctactaaaaatacaaaaattagccaggtgtggtggcacacgcctgtaatcccagctgtgggaggctgagccacaagaatcggttgaacctggaagcagaggttgcagtgagccgagatctcaccactgcactctagcctgggcgacagagtgagactccatctcaaaaaaaaaaaaaaaaaaaagaagagaaaagaaaagaaaaacaacaacaacaaagctggacgaagctagaaagctccctgccctcacaaacttgccttctagtgggagagacagctggcgagtaaatgcatgagtaaggtcacgtatgagtaaggtcactcataagtaaggtcacacatgagtaaggtcactctgggaagcaacgatgccaggatagaaagaagagcagggggtgcaccggagaagaggtgctgggcaggggggctgcttagatgagagcacatttccggaagtttcctctgagaagtgccaactcctgaaggcttcatgggaatctggagaagagcactccaggaaccgggaagtacatgtgcaaagggcctggggtagcaacacgcagaacagaaacggtgcgctgtggctggagcccagagagtgggactgagtgggagaaacgcaaactgcttttcctcctctgttcaccccacaacaatcaacacagaagacttctgtgaccaaatatggggggctccccccacagcagatcaaatgaacacctaattctgcagcggatgccagctgggggccctctgattcaactcaattctgccgctgtctacctggaggcagtgtcagaccccacaggtcgagggttcagaccccagggcggccccttactcccgatgcccctctcaagccctgggatgtgtcacctgtgcttctcacagaccagctgtgaattggggttcccacgaccctgtctttgggttcaattaatttgttagaacggctcacagggctcagggaagcactgagcttatttattataaaggatgttagaaggatacagatgaagagatgctagggagaggcatgggggaggggcacggggaaagggcatggggaaggggcatggagctgccatgctctccaggacaccaccctccaggagccttcccatgctcaaaaactctgtcctcttgagtttttatggaggcttcattaggtgggcgtaatttttaaaattatatcattttaaatttttaaatgtttaatttttgtaggttcatagtaagtgtatacagttgtggggtgcatgagatgtgttgacacaggcatgcaatgtgacgtaatcacatcatgggaagggcgtatccaccccttcaagcatttagcctttgtgttacaaacaatccagttacactccttcagttatttaaaaatatacaatcaagttattcttgactatagtcaccctgttgtgggatcaaatagtaggtcttattcattctttctctatatgtatatggtttttgtatacatgggcatgattgattaaaccacaggccattggtgatcagtttgaccttcagcctctctcccctcactgctggaggttggggactgggctgaaagtcccagtcctgtagcgctgacttggtttttcctgagaccagtccccatcctgaagctgcctaggggctgctggccaccagtgagtcattggcaaactaaacactttggagattccaaggattttaaggcagaagaccaaataaatattttacacgatcacagtgggagggggttggagggagatggaggtggagagctggggggcctcgcagttaggattttaagtacagtgggaaaccactggagatttttccatcagggagggctgcgtttgctgtttctgctgtgggagaggctgcgggggcaggcgtggatgctggaggtctggctggaggcagtggccctcctcctggtgacagatggtggtggtggtggtggtggtggcctgggccagggcggagcagtggatgaagaagggacagatgcggggtgtatttttaggggctggagctcatagaacatggtgctaaactggatgtgggaagggaggggtgaggacgcgtccagtgagactctcaagtgtctgagcctgacggccagggggagggaggggctgctttttgtttgttagttttcatttgtttttgtttgcttgtttgttgtttgttttcttttttgagacagagtctcgctctgtcgcccaggctggagtgcagtggtgcaatctctacttactgcaacttccacctcctgggttcaagcgattctcctgtctcagcctcacaagtagctgggatcacaggcgcccgccatcatgcatggctgatttttgtatttttagtagagacgggatttcaccatgttggccaggctggtctcgaactcctgaccttgtgatctgcctgcctcggcctctcaaagtgttgggattacaggcatgagccaccgcgccaggccattttcatttgtttttgagacagggtctctgtcacccaggcttgagtgcagtcgtgcgatcatagctcactgcagcctcgacctcctgggctcaagtaatcctcctgcctcagcctcccgagtagctgggtctacaggcacatgccaggacacctggctaatttttaaattattattattattattattattattattattttagaaagagagtcacactatgttgcccagggtggtctcgaactcctggcctcaagcgatcggcccacctctgcctcccaaagtgctgagattacaagtgtgagccagagggaggtgccactaactgaggagggaggcaggaaggtggggctgggagcaagtagggccccgatcccccagtgcagacccgggcttagctcagcatggattgaatggctgtgaactccctgtgggggctgcagagggaggagtcaggacactgaggttgttgtgtcacccacaccggattcatcccctatcccggtccacccacccccagggcatctggaatgtgagaggccagagagagaaagcaccaccaggaatcccaacgtagcaacagcacaaataacagcagccccttttgatgctcaggggagcacatgtttcatggagctatccagtgacctgtacagcagggagacttgaggggaccatttcacagatgggaagacggaggctgaggggtgaggctatatttgcaaggtggatcttttttgtgtgtgtgagcaattggtcgcgctgtctccctctttagactttacgctgctgaaggcaggcaccgagttctgtggggttcgtggtccatgggcatgcatgcaaatcagtctttgctgagttaatgaataaatgatctggggtgtagcgaggctggggatgtggttgcgggaggggagttctgc

SEQ ID NO: 977 - DNA, 2637 bp, Homo sapiens
gctcaggccccgcccctgccgccggaatcctgaagcccaaggctgcccgggggcggtccggcggcgccggcgatggggcataaaaccactggccacctgccgggctgctcctgcgtgcgctgccgtcccggatccaccgtgcctctgcggcctgcgtgcccggagtccccgcctgtgtcgtctctgtcgccgtccccgtctcctgccaggcgcggagccctgcgagccgcgggtgggccccaggcgcgcagacatgggctgctccgccaaagcgcgctgggctgccggggcgctgggcgtcgcggggctactgtgcgctgtgctgggcgctgtcatgatcgtgatggtgccgtcgctcatcaagcagcaggtccttaagaacgtgcgcatcgaccccagtagcctgtccttcaacatgtggaaggagatccctatccccttctatctctccgtctacttctttgacgtcatgaaccccagcgagatcctgaagggcgagaagccgcaggtgcgggagcgcgggccctacgtgtacagggagttcaggcacaaaagcaacatcaccttcaacaacaacgacaccgtgtccttcctcgagtaccgcaccttccagttccagccctccaagtcccacggctcggagagcgactacatcgtcatgcccaacatcctggtcttgggtgcggcggtgatgatggagaataagcccatgaccctgaagctcatcatgaccttggcattcaccaccctcggcgaacgtgccttcatgaaccgcactgtgggtgagatcatgtggggctacaaggacccccttgtgaatctcatcaacaagtactttccaggcatgttccccttcaaggacaagttcggattatttgctgagctcaacaactccgactctgggctcttcacggtgttcacgggggtccagaacatcagcaggatccacctcgtggacaagtggaacgggctgagcaaggttgacttctggcattccgatcagtgcaacatgatcaatggaacttctgggcaaatgtggccgcccttcatgactcctgagtcctcgctggagttctacagcccggaggcctgccgatccatgaagctaatgtacaaggagtcaggggtgtttgaaggcatccccacctatcgcttcgtggctcccaaaaccctgtttgccaacgggtccatctacccacccaacgaaggcttctgcccgtgcctggagtctggaattcagaacgtcagcacctgcaggttcagtgcccccttgtttctctcccatcctcacttcctcaacgccgacccggttctggcagaagcggtgactggcctgcaccctaaccaggaggcacactccttgttcctggacatccacccggtcacgggaatccccatgaactgctctgtgaaactgcagctgagcctctacatgaaatctgtcgcaggcattggacaaactgggaagattgagcctgtggtcctgccgctgctctggtttgcagagagcggggccatggagggggagactcttcacacattctacactcagctggtgttgatgcccaaggtgatgcactatgcccagtacgtcctcctggcgctgggctgcgtcctgctgctggtccctgtcatctgccaaatccggagccaagagaaatgctatttattttggagtagtagtaaaaagggctcaaaggataaggaggccattcaggcctattctgaatccctgatgacatcagctcccaagggctctgtgctgcaggaagcaaaactgtagggtcctgaggacaccgtgagccagccaggcctggccgctgggcctgaccggccccccagcccctacaccccgcttctcccggactctcccagcggacagccccccagccccacagcctgagcctcccagctgccatgtgcctgttgcacacctgcacacacgccctggcacacatacacacatgcgtgcaggcttgtgcagacactcagggatggagctgctgctgaagggacttgtagggagaggctcgtcaacaagcactgttctggaaccttctctccacgtggcccacaggcctgaccacaggggctgtgggtcctgcgtccccttcctcgggctgggagtgccgccttcctgtgccaaattcagtggggactcagtgcccaggccctggccacgagctttggccttggtctacctgccaggccaggcaaagcgcctttacacaggcctcggaaaacaatggagtgagcacaagatgccctgtgcagctgcccgagggtctccgcccaccccggccggactttgatccccccgaagtcttcacaggcactgcatcgggttgtctggcgcccttttcctccagcctaaactgacatcatcctatggactgagccggccactctctggccgaagtggccgcaggctgtgcccccgagctgcccccaccccctcacagggtccctcagattataggtgcccaggctgaggtgaagaggcctgggggccctgccttccgggcgctcctggaccctggggcaaacctgtgacccttttctactggaatagaaatgagttttatcatctttgaaaaataattcactcttgaagtaataaacgtttaaaaaaatggg

SEQ ID NO: 978 - protein, 507 aa, Homo sapiens
MGCSAKARWAAGALGVAGLLCAVLGAVMIVMVPSLIKQQVLKNVRIDPSSLSFNMWKEIPIPFYLSVYFFDVMNPSEILKGEKPQVRERGPYVYREFRHKSNITFNNNDTVSFLEYRTFQFQPSKSHGSESDYIVMPNILVLGAAVMMENKPMTLKLIMTLAFTTLGERAFMNRTVGEIMWGYKDPLVNLINKYFPGMFPFKDKFGLFAELNNSDSGLFTVFTGVQNISRIHLVDKWNGLSKVDFWHSDQCNMINGTSGQMWPPFMTPESSLEFYSPEACRSMKLMYKESGVFEGIPYFVAPKTLFANGSIYPPNEGFCPCLESGIQNVSTCRFSAPLFLSHPHFLNADPVLAEAVTGLHPNQEAHSLFLDIHPVTGIPMNCSVKLQLSLYMKSVAGIGQTGKIEPVVLPLLWFAESGAMEGETLHTFYTQLVLMPKVMHYAQYVLLALGCVLLLVPVICQIRSQEKCYLFWSSSKKGSKDKEAIQAYSESLMTSAPKGSVLQEAKL

SEQ ID NO: 979 - DNA, 3237 bp, Homo sapiens
gctcaggccccgcccctgccgccggaatcctgaagcccaaggctgcccgggggcggtccggcggcgccggcgatggggcataaaaccactggccacctgccgggctgctcctgcgtgcgctgccgtcccggatccaccgtgcctctgcggcctgcgtgcccggagtccccgcctgtgtcgtctctgtcgccgtccccgtctcctgccaggcgcggagccctgcgagccgcgggtgggccccaggcgcgcagacatgggctgctccgccaaagcgcgctgggctgccggggcgctgggcgtcgcggggctactgtgcgctgtgctgggcgctgtcatgatcgtgatggtgccgtcgctcatcaagcagcaggtccttaagaacgtgcgcatcgaccccagtagcctgtccttcaacatgtggaaggagatccctatccccttctatctctccgtctacttctttgacgtcatgaaccccagcgagatcctgaagggcgagaagccgcaggtgcgggagcgcgggccctacgtgtacagggagttcaggcacaaaagcaacatcaccttcaacaacaacgacaccgtgtccttcctcgagtaccgcaccttccagttccagccctccaagtcccacggctcggagagcgactacatcgtcatgcccaacatcctggtcttgggtgcggcggtgatgatggagaataagcccatgaccctgaagctcatcatgaccttggcattcaccaccctcggcgaacgtgccttcatgaaccgcactgtgggtgagatcatgtggggctacaaggacccccttgtgaatctcatcaacaagtactttccaggcatgttccccttcaaggacaagttcggattatttgctgagctcaacaactccgactctgggctcttcacggtgttcacgggggtccagaacatcagcaggatccacctcgtggacaagtggaacgggctgagcaaggttgacttctggcattccgatcagtgcaacatgatcaatggaacttctgggcaaatgtggccgcccttcatgactcctgagtcctcgctggagttctacagcccggaggcctgccgatccatgaagctaatgtacaaggagtcaggggtgtttgaaggcatccccacctatcgcttcgtggctcccaaaaccctgtttgccaacgggtccatctacccacccaacgaaggcttctgcccgtgcctggagtctggaattcagaacgtcagcacctgcaggttcagtgcccccttgtttctctcccatcctcacttcctcaacgccgacccggttctggcagaagcggtgactggcctgcaccctaaccaggaggcacactccttgttcctggacatccacccggtcacgggaatccccatgaactgctctgtgaaactgcagctgagcctctacatgaaatctgtcgcaggcattggacaaactgggaagattgagcctgtggtcctgccgctgctctggtttgcagagagcggggccatggagggggagactcttcacacattctacactcagctggtgttgatgcccaaggtgatgcactatgcccagtacgtcctcctggcgctgggctgcgtcctgctgctggtccctgtcatctgccaaatccggagccaagtaggtgctggccagagggcagcccgggctgacagccattcgcttgcctgctgggggaaaggggcctcagatcggaccctctggccaaccgcagcctggagcccacctccagcagcagtcctgcgtctctgccggagtgggagcggtcactgctgggggctgcgcagcacgcttgcgtcttttgcatgccgcgttgccactactctgcctgttctggaaggcctgggaccctcccttggagggggcacagggtcctgaggacaccgtgagccagccaggcctggccgctgggcctgaccggccccccagcccctacaccccgcttctcccggactctcccagcggacagccccccagccccacagcctgagcctcccagctgccatgtgcctgttgcacacctgcacacacgccctggcacacatacacacatgcgtgcaggcttgtgcagacactcagggatggagctgctgctgaagggacttgtagggagaggctcgtcaacaagcactgttctggaaccttctctccacgtggcccacaggcctgaccacaggggctgtgggtcctgcgtccccttcctcgggtgagcctggcctgtcccgttcagccgttgggcccaggcttcctcccctccaaggtgaaacactgcagtcccggtgtggtggctccccatgcaggacgggccaggctgggagtgccgccttcctgtgccaaattcagtggggactcagtgcccaggccctggccacgagctttggccttggtctacctgccaggccaggcaaagcgcctttacacaggcctcggaaaacaatggagtgagcacaagatgccctgtgcagctgcccgagggtctccgcccaccccggccggactttgatccccccgaagtcttcacaggcactgcatcgggttgtctggcgcccttttcctccagcctaaactgacatcatcctatggactgagccggccactctctggccgaagtggccgcaggctgtgcccccgagctgcccccaccccctcacagggtccctcagattataggtgcccaggctgaggtgaagaggcctgggggccctgccttccgggcgctcctggaccctggggcaaacctgtgacccttttctactggaatagaaatgagttttatcatctttgaaaaataattcactcttgaagtaataaacgtttaaaaaaatgggatgcctgcctctgtgacagccttgtttgctgaggtcgtgggggtgggggcctctgggaagttccgggctcctcttctcttggtcaatagctcctttctggtggctgccaagagcgtctctcccagggccgggctgctggcttaccttcctgttgttttcaaatttcaaccttgtgcaatgttgagtttcatagaaatactgcatgagtacgcccttgtttagaagcagcagggtctgagtcccatcccacagcccccagtgcagacgcttttgccacttttgcatggggccccctggatgtgtttctgtgcatttatctacaaatcctggtgcccgtaggacatgccccgtgttgttctagacctttgctttctg

SEQ ID NO: 980 - protein, 550 aa, Homo sapiens
MGCSAKARWAAGALGVAGLLCAVLGAVMIVMVPSLIKQQVLKNVRIDPSSLSFNMWKEIPIPFYLSVYFFDVMNPSEILKGEKPQVRERGPYVYREFRHKSNITFNNNDTVSFLEYRTFQFQPSKSHGSESDYIVMPNILVLGAAVMMENKPMTLKLIMTLAFTTLGERAFMNRTVGEIMWGYKDPLVNLINKYFPGMFPFKDKFGLFAELNNSDSGLFTVFTGVQNISRIHLVDKWNGLSKVDFWHSDQCNMINGTSGQMWPPFMTPESSLEFYSPEACRSMKLMYKESGVFEGIPYFVAPKTLFANGSIYPPNEGFCPCLESGIQNVSTCRFSAPLFLSHPHFLNADPVLAEAVTGLHPNQEAHSLFLDIHPVTGIPMNCSVKLQLSLYMKSVAGIGQTGKIEPVVLPLLWFAESGAMEGETLHTFYTQLVLMPKVMHYAQYVLLALGCVLLLVPVICQIRSQVGAGQRAARADSHSLACWGKGASDRTLWPTAAWSPPPAAVLRLCRSGSGHCWGLRSTLASFACRVATTLPVLEGLGPSLGGGTGS

SEQ ID NO: 981 - DNA, 3185 bp, Homo sapiens
gctcaggccccgcccctgccgccggaatcctgaagcccaaggctgcccgggggcggtccggcggcgccggcgatggggcataaaaccactggccacctgccgggctgctcctgcgtgcgctgccgtcccggatccaccgtgcctctgcggcctgcgtgcccggagtccccgcctgtgtcgtctctgtcgccgtccccgtctcctgccaggcgcggagccctgcgagccgcgggtgggccccaggcgcgcagacatgggctgctccgccaaagcgcgctgggctgccggggcgctgggcgtcgcggggctactgtgcgctgtgctgggcgctgtcatgatcgtgatggtgccgtcgctcatcaagcagcaggtccttaagaacgtgcgcatcgaccccagtagcctgtccttcaacatgtggaaggagatccctatccccttctatctctccgtctacttctttgacgtcatgaaccccagcgagatcctgaagggcgagaagccgcaggtgcgggagcgcgggccctacgtgtacagggagttcaggcacaaaagcaacatcaccttcaacaacaacgacaccgtgtccttcctcgagtaccgcaccttccagttccagccctccaagtcccacggctcggagagcgactacatcgtcatgcccaacatcctggtcttgggtgcggcggtgatgatggagaataagcccatgaccctgaagctcatcatgaccttggcattcaccaccctcggcgaacgtgccttcatgaaccgcactgtgggtgagatcatgtggggctacaaggacccccttgtgaatctcatcaacaagtactttccaggcatgttccccttcaaggacaagttcggattatttgctgaggtacctcaacaactccgactctgggctcttcacggtgttcacgggggtccagaacatcagcaggatccacctcgtggacaagtggaacgggctgagcaaggttgacttctggcattccgatcagtgcaacatgatcaatggaacttctgggcaaatgtggccgcccttcatgactcctgagtcctcgctggagttctacagcccggaggcctgccgatccatgaagctaatgtacaaggagtcaggggtgtttgaaggcatccccacctatcgcttcgtggctcccaaaaccctgtttgccaacgggtccatctacccacccaacgaaggcttctgcccgtgcctggagtctggaattcagaacgtcagcacctgcaggttcagtgcccccttgtttctctcccatcctcacttcctcaacgccgacccggttctggcagaagcggtgactggcctgcaccctaaccaggaggcacactccttgttcctggacatccacccggtcacgggaatccccatgaactgctctgtgaaactgcagctgagcctctacatgaaatctgtcgcaggcattggacaaactgggaagattgagcctgtggtcctgccgctgctctggtttgcagagagcggggccatggagggggagactcttcacacattctacactcagctggtgttgatgcccaaggtgatgcactatgcccagtacgtcctcctggcgctgggctgcgtcctgctgctggtccctgtcatctgccaaatccggagccaaaaccgtgtaaaaccatttttatgtggcttcaacgtcaactataaattagcttggttatcttctaggagaaatgctatttattttggagtagtagtaaaaagggctcaaaggataaggaggccattcaggcctattctgaatccctgatgacatcagctcccaagggctctgtgctgcaggaagcaaaactgtagggtcctgaggacaccgtgagccagccaggcctggccgctgggcctgaccggccccccagcccctacaccccgcttctcccggactctcccagcggacagccccccagccccacagcctgagcctcccagctgccatgtgcctgttgcacacctgcacacacgccctggcacacatacacacatgcgtgcaggcttgtgcagacactcagggatggagctgctgctgaagggacttgtagggagaggctcgtcaacaagcactgttctggaaccttctctccacgtggcccacaggcctgaccacaggggctgtgggtcctgcgtccccttcctcgggtgagcctggcctgtcccgttcagccgttgggcccaggcttcctcccctccaaggtgaaacactgcagtcccggtgtggtggctccccatgcaggacgggccaggctgggagtgccgccttcctgtgccaaattcagtggggactcagtgcccaggccctggccacgagctttggccttggtctacctgccaggccaggcaaagcgcctttacacaggcctcggaaaacaatggagtgagcacaagatgccctgtgcagctgcccgagggtctccgcccaccccggccggactttgatccccccgaagtcttcacaggcactgcatcgggttgtctggcgcccttttcctccagcctaaactgacatcatcctatggactgagccggccactctctggccgaagtggccgcaggctgtgcccccgagctgcccccaccccctcacagggtccctcagattataggtgcccaggctgaggtgaagaggcctgggggccctgccttccgggcgctcctggaccctggggcaaacctgtgacccttttctactggaatagaaatgagttttatcatctttgaaaaataattcactcttgaagtaataaacgtttaaaaaaatgggatgcctgcctctgtgacagccttgtttgctgaggtcgtgggggtgggggcctctgggaagttccgggctcctcttctcttggtcaatagctcctttctggtggctgccaagagcgtctctcccagggccgggctgctggcttaccttcctgttgttttcaaatttcaaccttgtgcaatgttgagtttcatagaaatactgcatgagtacgcccttgtttagaagcagcagggtctgagtcccatcccacagcccccagtgcagacgcttttgccacttttgcatggggccccctggatgtgtttctgtgcatttatctacaaatcctggtgcccgtaggacatgccccgtgttgttctagacctttgctttctg

SEQ ID NO: 982 - protein, 261 aa, Homo sapiens
MINGTSGQMWPPFMTPESSLEFYSPEACRSMKLMYKESGVFEGIPYFVAPKTLFANGSIYPPNEGFCPCLESGIQNVSTCRFSAPLFLSHPHFLNADPVLAEAVTGLHPNQEAHSLFLDIHPVTGIPMNCSVKLQLSLYMKSVAGIGQTGKIEPVVLPLLWFAESGAMEGETLHTFYTQLVLMPKVMHYAQYVLLALGCVLLLVPVICQIRSQNRVKPFLCGFNVNYKLAWLSSRRNAIYFGVVVKRAQRIRRPFRPILNP

SEQ ID NO: 983 - DNA, 3116 bp, Homo sapiens
gctcaggccccgcccctgccgccggaatcctgaagcccaaggctgcccgggggcggtccggcggcgccggcgatggggcataaaaccactggccacctgccgggctgctcctgcgtgcgctgccgtcccggatccaccgtgcctctgcggcctgcgtgcccggagtccccgcctgtgtcgtctctgtcgccgtccccgtctcctgccaggcgcggagccctgcgagccgcgggtgggccccaggcgcgcagacatgggctgctccgccaaagcgcgctgggctgccggggcgctgggcgtcgcggggctactgtgcgctgtgctgggcgctgtcatgatcgtgatggtgccgtcgctcatcaagcagcaggtccttaagaacgtgcgcatcgaccccagtagcctgtccttcaacatgtggaaggagatccctatccccttctatctctccgtctacttctttgacgtcatgaaccccagcgagatcctgaagggcgagaagccgcaggtgcgggagcgcgggccctacgtgtacagggagttcaggcacaaaagcaacatcaccttcaacaacaacgacaccgtgtccttcctcgagtaccgcaccttccagttccagccctccaagtcccacggctcggagagcgactacatcgtcatgcccaacatcctggtcttgggtgcggcggtgatgatggagaataagcccatgaccctgaagctcatcatgaccttggcattcaccaccctcggcgaacgtgccttcatgaaccgcactgtgggtgagatcatgtggggctacaaggacccccttgtgaatctcatcaacaagtactttccaggcatgttccccttcaaggacaagttcggattatttgctgagctcaacaactccgactctgggctcttcacggtgttcacgggggtccagaacatcagcaggatccacctcgtggacaagtggaacgggctgagcaaggttgacttctggcattccgatcagtgcaacatgatcaatggaacttctgggcaaatgtggccgcccttcatgactcctgagtcctcgctggagttctacagcccggaggcctgccgatccatgaagctaatgtacaaggagtcaggggtgtttgaaggcatccccacctatcgcttcgtggctcccaaaaccctgtttgccaacgggtccatctacccacccaacgaaggcttctgcccgtgcctggagtctggaattcagaacgtcagcacctgcaggttcagtgcccccttgtttctctcccatcctcacttcctcaacgccgacccggttctggcagaagcggtgactggcctgcaccctaaccaggaggcacactccttgttcctggacatccacccggtcacgggaatccccatgaactgctctgtgaaactgcagctgagcctctacatgaaatctgtcgcaggcattggacaaactgggaagattgagcctgtggtcctgccgctgctctggtttgcagagagcggggccatggagggggagactcttcacacattctacactcagctggtgttgatgcccaaggtgatgcactatgcccagtacgtcctcctggcgctgggctgcgtcctgctgctggtccctgtcatctgccaaatccggagccaagagaaatgctatttattttggagtagtagtaaaaagggctcaaaggataaggaggccattcaggcctattctgaatccctgatgacatcagctcccaagggctctgtgctgcaggaagcaaaactgtagggtcctgaggacaccgtgagccagccaggcctggccgctgggcctgaccggccccccagcccctacaccccgcttctcccggactctcccagcggacagccccccagccccacagcctgagcctcccagctgccatgtgcctgttgcacacctgcacacacgccctggcacacatacacacatgcgtgcaggcttgtgcagacactcagggatggagctgctgctgaagggacttgtagggagaggctcgtcaacaagcactgttctggaaccttctctccacgtggcccacaggcctgaccacaggggctgtgggtcctgcgtccccttcctcgggtgagcctggcctgtcccgttcagccgttgggcccaggcttcctcccctccaaggtgaaacactgcagtcccggtgtggtggctccccatgcaggacgggccaggctgggagtgccgccttcctgtgccaaattcagtggggactcagtgcccaggccctggccacgagctttggccttggtctacctgccaggccaggcaaagcgcctttacacaggcctcggaaaacaatggagtgagcacaagatgccctgtgcagctgcccgagggtctccgcccaccccggccggactttgatccccccgaagtcttcacaggcactgcatcgggttgtctggcgcccttttcctccagcctaaactgacatcatcctatggactgagccggccactctctggccgaagtggccgcaggctgtgcccccgagctgcccccaccccctcacagggtccctcagattataggtgcccaggctgaggtgaagaggcctgggggccctgccttccgggcgctcctggaccctggggcaaacctgtgacccttttctactggaatagaaatgagttttatcatctttgaaaaataattcactcttgaagtaataaacgtttaaaaaaatgggatgcctgcctctgtgacagccttgtttgctgaggtcgtgggggtgggggcctctgggaagttccgggctcctcttctcttggtcaatagctcctttctggtggctgccaagagcgtctctcccagggccgggctgctggcttaccttcctgttgttttcaaatttcaaccttgtgcaatgttgagtttcatagaaatactgcatgagtacgcccttgtttagaagcagcagggtctgagtcccatcccacagcccccagtgcagacgcttttgccacttttgcatggggccccctggatgtgtttctgtgcatttatctacaaatcctggtgcccgtaggacatgccccgtgttgttctagacctttgctttctg

SEQ ID NO: 984 - protein, 507 aa, Homo sapiens; identical to SEQ ID NO: 978

SEQ ID NO: 985 - DNA, 3143 bp, Homo sapiens
gctcaggccccgcccctgccgccggaatcctgaagcccaaggctgcccgggggcggtccggcggcgccggcgatggggcataaaaccactggccacctgccgggctgctcctgcgtgcgctgccgtcccggatccaccgtgcctctgcggcctgcgtgcccggagtccccgcctgtgtcgtctctgtcgccgtccccgtctcctgccaggcgcggagccctgcgagccgcgggtgggccccaggcgcgcagacatgggctgctccgccaaagcgcgctgggctgccggggcgctgggcgtcgcggggctactgtgcgctgtgctgggcgctgtcatgatcgtgatggtgccgtcgctcatcaagcagcaggtccttaagaacgtgcgcatcgaccccagtagcctgtccttcaacatgtggaaggagatccctatccccttctatctctccgtctacttctttgacgtcatgaaccccagcgagatcctgaagggcgagaagccgcaggtgcgggagcgcgggccctacgtgtacagggagttcaggcacaaaagcaacatcaccttcaacaacaacgacaccgtgtccttcctcgagtaccgcaccttccagttccagccctccaagtcccacggctcggagagcgactacatcgtcatgcccaacatcctggtcttgggtgcggcggtgatgatggagaataagcccatgaccctgaagctcatcatgaccttggcattcaccaccctcggcgaacgtgccttcatgaaccgcactgtgggtgagatcatgtggggctacaaggacccccttgtgaatctcatcaacaagtactttccaggcatgttccccttcaaggacaagttcggattatttgctgagctcaacaactccgactctgggctcttcacggtgttcacgggggtccagaacatcagcaggatccacctcgtggacaagtggaacgggctgagcaaggttgacttctggcattccgatcagtgcaacatgatcaatggaacttctgggcaaatgtggccgcccttcatgactcctgagtcctcgctggagttctacagcccggaggcctgccgatccatgaagctaatgtacaaggagtcaggggtgtttgaaggcatccccacctatcgcttcgtggctcccaaaaccctgtttgccaacgggtccatctacccacccaacgaaggcttctgcccgtgcctggagtctggaattcagaacgtcagcacctgcaggttcagtgcccccttgtttctctcccatcctcacttcctcaacgccgacccggttctggcagaagcggtgactggcctgcaccctaaccaggaggcacactccttgttcctggacatccacccggtcacgggaatccccatgaactgctctgtgaaactgcagctgagcctctacatgaaatctgtcgcaggcattggacaaactgggaagattgagcctgtggtcctgccgctgctctggtttgcagagagcggggccatggagggggagactcttcacacattctacactcagctggtgttgatgcccaaggtgatgcactatgcccagtacgtcctcctggcgctgggctgcgtcctgctgctggtccctgtcatctgccaaatccggagccaagagaaatgctatttattttggagtagtagtaaaaagggctcaaaggataaggaggccattcaggcctattctgaatccctgatgacatcagctcccaagggctctgtgctgcaggaagcaaaactggtcctgaggacaccgtgagccagccaggcctggccgctgggcctgaccggccccccagcccctacaccccgcttctcccggactctcccagcggacagccccccagccccacagcctgagcctcccagctgccatgtgcctgttgcacacctgcacacacgccctggcacacatacacacatgcgtgcaggcttgtgcagacactcagggatggagctgctgctgaagggacttgtagggagaggctcgtcaacaagcactgttctggaaccttctctccacgtggcccacaggcctgaccacaggggctgtgggtcctgcgtccccttcctcgggtgagcctggcctgtcccgttcagccgttgggcccaggcttcctcccctccaaggtgaaacactgcagtcccggtgtggtggctccccatgcaggacgggccaggctgggagtgccgccttcctgtgccaaattcagtggggactcagtgcccaggccctggccacgagctttggccttggtctacctgccaggccaggcaaagcgcctttacacaggcctcggaaaacaatggagtgagcacaagatgccctgtgcagctgcccgagggtctccgcccaccccggccggactttgatccccccgaagtcttcacaggcactgcatcgggttgtctggcgcccttttcctccagcctaaactgacatcatcctatggactgagccggccactctctggccgaagtggccgcaggctgtgcccccgagctgcccccaccccctcacagggtccctcagattataggtgcccaggctgaggtgaagaggcctgggggccctgccttccgggcgctcctggaccctggggcaaacctgtgacccttttctactggaatagaaatgagttttatcatctttgaaaaataattcactcttgaagtaataaacgtttaaaaaaatgggatgcctgcctctgtgacagccttgtttgctgaggtcgtgggggtgggggcctctgggaagttccgggctcctcttctcttggtcaatagctcctttctggtggctgccaagagcgtctctcccagggccgggctgctggcttaccttcctgttgttttcaaatttcaaccttgtgcaatgttgagtttcatagaaatactgcatgagtacgcccttgtttagaagcagcagggtctgagtcccatcccacagcccccagtgcagacgcttttgccacttttgcatggggccccctggatgtgtttctgtgcatttatctacaaatcctggtgcccgtaggacatgccccgtgttgttctagacctttgctttctgcttgttacataaatggtgaagaagagaagcg

SEQ ID NO: 986 - protein, 512 aa, Homo sapiens
MGCSAKARWAAGALGVAGLLCAVLGAVMIVMVPSLIKQQVLKNVRIDPSSLSFNMWKEIPIPFYLSVYFFDVMNPSEILKGEKPQVRERGPYVYREFRHKSNITFNNNDTVSFLEYRTFQFQPSKSHGSESDYIVMPNILVLGAAVMMENKPMTLKLIMTLAFTTLGERAFMNRTVGEIMWGYKDPLVNLINKYFPGMFPFKDKFGLFAELNNSDSGLFTVFTGVQNISRIHLVDKWNGLSKVDFWHSDQCNMINGTSGQMWPPFMTPESSLEFYSPEACRSMKLMYKESGVFEGIPYFVAPKTLFANGSIYPPNEGFCPCLESGIQNVSTCRFSAPLFLSHPHFLNADPVLAEAVTGLHPNQEAHSLFLDIHPVTGIPMNCSVKLQLSLYMKSVAGIGQTGKIEPVVLPLLWFAESGAMEGETLHTFYTQLVLMPKVMHYAQYVLLALGCVLLLVPVICQIRSQEKCYLFWSSSKKGSKDKEAIQAYSESLMTSAPKGSVLQEAKLVLRTP

SEQ ID NO: 987 - DNA, 26071 bp, Mus musculus
  misc_feature (1)...(26071): n = A,T,C or G
gctcagggtaaaacacttagatgcacaaagcactgcctgcccaatcccagattgttcctgccttttagaccagccttttttcccctcccatcgttcttttttctctgtgtagccctgggtattctggaactcaaaagttgcacctgcctctgcctcctgagcactgggactaagggggcatgcagagctgccactacccactaagacttttctttcatgggaagaattttactcactcattgttggctaagtattaagaattgtaatgcaagggctgcagagatggcccagcggttacgagcgctgctcttccagaggatctgagttcagttcccagcaactacatggtggctcacaaccatctgtaatggggtctgatgccctcttgtggtgtgtctgaggacagctacactgtactcatatatataaaataaatcttaaatatatttttaaagttaggtattttttaaatcaaagtcaacctgatttagtgagttctaggccagccaggactatagagtgagaccctttctcaaaagcaaaaacaaaaaagactttaaaaagttgtcagtctgcgaatatagctcagagttccccattatgtaccccgttaataaaagttataatatgaaatttaggaatagataaagctgttacctgtattaaacacggttcaaatctatatgatacacttacttacatttaaaacatttgttttatttctaggctcccggggggctttctgtgaagtaagaccagatgataaaaggattctggaattttacagcaagttaggctgttttgaaattgcaaaaatggaaggatttccaaaggatgtggttatacttggtcgaagcctgtgacacttgttggtactgtgaactgtccaaaagtcccttaactccgccttgtggttggtggttgaggtcttcacacagttcagtgtctggagctggagcggcagcagatcagccagttgacttggaaacaaagatgactgtaaagcgcacccatcaccttctcagatgctcactggttgggagaagatagtattgctgcataccccgtgcagcttgtggtgtgctcctctttgggtcttgtgttagggtcagggcctcttacgtggggctctctagggagagattcttaaataaatggagtcagcactattttctgcatccagtgtggttgcatttctcacctaagagcaacgaagttcactctctttactctccttggtgtgctggatgaaatgtctctgttctttggagacatggctggaatgagaaatttagtgagtttcaatttgggcaatttttctgctttttgtaaagttctgggcaactgtctcctgtaactgttggttcaggccattgagctttgttagggacaaatgtgcatttgtttgtggccaaggcctaaattgacaaacttgtaaatctctgtatatagattagctgtaacccgactgttctttgtttactgttttatatattatggggtttttttttcctttgaaaatgaaaggtgttggtttaggatggcactttgaattatgtaaatcagtgaatggtagatttcctttacatctgtccttttcttcctaatagtttttatttttgaagtgcctcccacatagggttaggccatgactatttagggtatgagtacctaacttcttatgactcagatatgttgggaagtacagtaactcctgggaattaaccttaatagcagatccgcatgtgaaatgttctgacattgttaagtaagggtaaggggactgaccagtggtctcctttgcccttgaacagttgtcatttaatcgcaaagacctgttaactactggtttaatcgaatcagtccttaattcttgcatgtttgtatctaatttttaaaagaaagaataagtatatgttaacaatatgtatactttttcttttaatcagagattctgaaaacttcatgttattttaatttagatttggtgaatttaagggttttgagcatgaagctggcacatagtgtctgcaggattattattctttaatcatggctagctatctagtaacgtcatagattttcaacagtcttttgttaccttgctttcctccagttctacatagcttttgaactttgagctgaggggggagagagaagagggagcttgaaacattttcctttctagaactccagtgtgagcttgtgaggtagtcttttagcactatatagagtggacccagggaggcccaagaaccagaggcccaagagtgtgctgaaatgtgccgcctccttagggtgcgaacctttgcgataggatgtgctgtgaaacctaagtcaaggttggttttgaaggctggggtgaggggcaaaattgttactagatattaagaccgtttaatgttccttagcgttctgaatccatctcatgcctcagtgagaattacaaggttttattcagagcgtttcagagtttcatacggaatcaggaattgaacaagttgctttttgtttaatgttggctttcaataatcacatgggatgatcttctggacataagtgaaaacatgtccaggtctctactgtcattgctgtaggataaagtgctctgccatcttccatggttatgaatatttattaatgttggaataacatttcattgtttagatcacagctcagttcctatagaaaacgaactgtaaacctatctgcagaccatgcaagaggcacaataaaacttgaagtgaatgtgtgctgtgctgctttttctctgggttctccctttttttccctcacatctcttgatcccttaggtatccgaagctatttcagtgtaggctggattgaagacagccctgccctcctgccttccacagcaaagatttttctcagaaaagtacatttgtttttgtttttaagtaagttgctctgtttactacaggtaaaatttgtgtgaagttggggggggtgtcacagagttcctcactggaacatggcttcatctccttagataaaggaattttggtggtggagggggggggggtgggtcgcctaaagaggaggctgtactatgaacagtagttgatcctccacatctgagtttannnnnnnnnnnnnnnnnnnnnnnnnnnnnnnnnnnnnnnnnnnnnnnnnnnnnnnnnnnnnnnnnnnnnnnnnnnnnnnnnnnnnnnnnnnnnnnnnnnnnnnnnnnnnnnnnnnnnnnnnnnnnnnnnnnnnnnnnnnnnnnnnnnnnnnnnnnnnnnnnnnnnnnnnnnnnnnnnnnnnnnnnnnnnnnnnnnnnnnnnnnnnnnnnnnnnnnnnnnnnnnnnnnnnnnnnnnnnnnnnnnnnnnnnnnnnnnnnnnnnnnnnnnnnnnnnnnnnnnnnnnnnnnnnnnnnnnnnnnnnnnnnnnnnnnnnnnnnnnnnnnnnnnnnnnnnnnnnnnnnnnnnnnnnnnnnnnnnnnnnnnnnnnnnnnnnnnnnnnnnnnnnnnnnnnnnnnnnnnnnnnnnnnnnnnnnnnnnnnnnnnnnnnnnnnnnnnnnnnnnnnnnnnnnnnnnnnnnnnnnnnnnnnnnnnnnnnnnnnnnnnnnnnnnnnnnnnnnnnnnnnnnnnnnnnnnnnnnnnnnnnnnnnnnnnnnnnnnnnnnnnnnnnnnnnnnnnnnnnnnnnnnnnnnnnnnnnnnnnnnnnnnnnnnnnnnntgtacccaggcgacactcgctggctcttgcaggttgtgagctctccggccacacccgctccttcactttcaaggttgaggaggaggatgacacggagcacgtgctggcgttgaacatggtaaggggccgcagagggagttggagatgcggggggctagccgacactccgcctgtcgcccctctcctccaccctctggtccccgcatccggtgccactgggactaggccgattttggggtaagacgccttggctttggtgtcagccctccctcacttgagacgctgaggttctgcctgcctttcagctgtgccttaccgagggggccacggacgagtgtaatgtggtggaagttgtggcccgggatcacgacaatcaggagattgcagttcctgtggccaacctcaggttgtcttgccagcccatggtgagttggagccgttcattcctctcggagtctggtgggactgagaacttcggtattgatctccaagtgggtgggccagcacggctcagcctgtcattcttgtcttccagctcagtgtggatgatttccaactccaaccacctgtcaccttccgcctgaagtccggttctggcccagttcggatcactggccggcatcagatcggtgagaagagtgggccctctccactcccgacttaccccagtctcatctcctagtgtgtcctgcatctcaggctatggttccagtattctgtgcctcccactgcctccttcaggcctgggaacttgctgtaccctgcctgccccaggggtccaactccagcgaggtgggtgggctcttttccatctagacttggggactctgggagatgaggttccctgtcagcctagcagctgaatgagtggctctatccttgtgtatccaccagtttgtataaacaacgacctttctgaagaagaaagtgatgatgagagcgaagaagatgaaattaagctgtgtggcatccttcctgccaagaagcacaggggcaggccctagccccctggtgagtgtgtgggtggagggtggggtcggttggtgggattcccgaaggatctgggaagtttaggggcagcaggtgaggaggaagactctgacttcattcttgcttttctcagatcaggtaactgcttgctacaggtgccatgctccgtatgttcctggacaagttcaagaatggttttctcgatgaagagaatagggggtgggagggagggatggactgtggttcctgaggcttcccttttctattggggtgggacaacctttgaacacctcttctgacccacctaacccagattcagtccccagcactgcaaaaaaaaaaaacaaaaaacaaaaaacaaaagaacatgaagttcagaacacatttttaacactttgtactttttttgataaatatctaaataaagtggtgtacggttggttgttttgcaatccttgtgtggctttttcaatgctgagatgacatttccccagggaccaccaggtggcactgtggccgcacaaaggttgacctagctcttgagttggtgagatgtgggatccgattccccagggctttgggcccaaagcaggcctaagttcctcggccttgcttgcagaggggacctctcattccagcctgttccatgttcctgcaagtgggggagggctgtcacaggaggttatcagcttccaaacaaggggtctgggcctctgtcagcactcaggctgatgggcagggggacagataagtggacttaagaaacctgaggaatgcatctcgagccccatgaggggctaggcccagggagagggcctgtgaggggtggggaccagtctctgctcctttggtcttttgaggtaggttcagggcccttagaaacctgattcccagggccagatggagggaactggccagattgggtgacagggaaaccagaatccgggtggcctggcatatgggggcagaaagagcccctgggaatcaacctcggctgaggggttaccccccctgcccccagcactctgccatactgtcttatccctagaccgaggtggttcttgggcctgcctactgttatgccaggaagagaaaaaggggttgcttgtgtgaggactgtgcacccccggggtcagcagttcagcagtgttgatgggttgggatgggtggggatcagtgtcctacaaacaaacaaaaggttacttccccagacaagctgaagactgacagagaacagggcctgagattcaggccaattcacaccagctgaccaacaagtagggggctggtttgagttcaggccattaacttcaagagtgtcccctacagtagagaaagcggtacctaacccaggtgtggtagcacaggagacaagaaaatcaggaactggtatcccgcttgggcttcatggggtaggggttcctcctgactgtacaagtgttcccccatctatgcgaggaattaggggtaagttttcagactccctttttctcaagtgaaagatgcctgtctgtgtttcaggggtcagggtcgcgggtgccttttctagagtcccggaccttacctccaggtgtttccaccacggccctggctaggagccattagcagaggatcgaatgggaggggaaggtggaactagcgccctctggtgggcgtgtttaaaactgctcgtggtcgtacagctctatgtgggttcaatgatagctaaatttaaggcaggataggagggaataagtcacttaagttttgagtgcaaatgtgttttcgttcacacgaagcgcccatgctagaggagaggagttagttgggggcactcacttttcctgcctcctttcggctcctgccgccaactctttctcacgtgcgtgcgttaagtgcggccatctccggaaaccttccaaactcactcgcctagcccacgctcatactcccccaccatcagtgtaccccctgtgactccactgatcgcccattgtatttctggcctgttttcctggcgggtggacgtcgagcacagccctgcccgcagtgggagcccaatccacatttgccttctagttcaggagttttccccggccccttgcggcgccgtgcagacagacctgggaattgttttttccttctttccagatcacaccttttcgggatagcccttttctgcactctcggcacacaacaggagtgctgccaattatctggcctcagagaacttgtgcgatgtaggcatatgatggtgtctggacaatgctgaaagaaaagctacccgatatggggtatggggacagacacgaaggacaggacggcagctttctgtcttggttagaagcggctaacgcagttgcagagatttgcatttgaaccatcctgacagagtctgtgtcactttgaacgctgggcactggaggcgcgcaaggctgtgacctgcaggcatggtggcctgggtgtgaatctgaggggcgagtttgggtcccggcgaccgcgtgtttgcagagagagccgtttgtgttggcaaagagtgtgtgtttgtgtttgcaggagggagtgtgtgcatgtgtgtgtttgtgtttgcggagtgtgggggcggcagggaaaggtggccaggctgtcactcagagatcaggatgacaggcgctccctcatctaggcgagggagctctgattgcagattcgaggaaacaaaatagcaattgtaattacggggctttgataagataaaggaaggagggagctggccgggaggcaggctagccagggagggagggagagcggcctgcgggagcccgatggcacatttgcatctgtcagtcaccgcctgctctgggtgcccactgtgggggaggcacatctatcctcgcccccctcccaaagacaggacattttggggagaccagaaggatcctgaagagctaggtgaagctcttctgaatccataggagttttcacatgtaaaagaattctgtctctcagaagtgggaagcagagttcaaatgtaggagtaaaacctgggagacctgggaccttttggggggtggggggggagaggccgcgctggtgtccactgagggtgagggaggtgattcacagatggtgaatcaataaggttcatctctggaggctccctaaccctgttacaactcaggtgctcggccctacacacacacacacacacacacacacacacacacacacaccacacctgggaggaactaaaacccaggatctactgacagactgcttcctgatccctacctgtgtcttgtgactcaaacttattttcaaagtcttgtgtccatagtgaagagagggcccttccttttccaggggagcccatccttcgctttccatctgtttaggcatttactcgtcgatacactcaagaataaacactcctgagtatctcatatgctccacacatgaagtaaattctgtgagcaaacagatatcacctttgtcagcttgaagcaatgaaaaaaaaaaaaaaaaagacaagtcattctaaaggcccctcagcaagcacacagagaaagcaaggggttggcctttgtcaaccccttggacactggagtccgtctaccccatttcccccttcatgggcccactctccagtgggactgaaaagagctattgcctgccaaatcactgacagataaaagctaccatcggttggcaggtgaagccaccaaaggtggaagatagtctaatggctcagtcaggtggcccccatccatccatccaacactacctgcagagctacagctctgccctgagcttcaatccttgggcctgtaagacagattcctccctcacctccaggtctgggtggatcaaaacagcggggaacagaatttgtgaggagactcacctatgagctcaggaagtctactctgaggagggctgagactgtctccttggaaccagttcttctctatattgctcagcacttgaagggctgagatggactcccctaaccatatatatatatatatatatatatatatatatatatattactccgtgtttgcatttgcaagatgggatgcataaaaggggggcggcaggccgaaccggatggggactgacaagggcctgcttgcctctctttagcctacaaagactttctggggccaccgcaaacccctagttctaccccggaggcacagaggatcagtagaggggaggctgtggatgaaggcagagctgggtggtacatccacggagccacctggtcttcaaaaatacctggcctgggaaatctctgtgcctgcggtaacaaaatagtggctcagggttcccagaaaccctatggagaaagcaatggggcgacgggcttgaaaaggcttacagaagtctctaccttctcaccagcacctccctcttccaagtgacacaagacaccaggtacctgctcaaggaaaacctggaactcagaaggggaaaggctaggcagcttgggtccgtgtcctgaatgttgctgaacgtagttatttttgcccctgctaattgctcagaagcagtggctgtgggtccttcagagacccctgagctcttaccacatagacgcttcaaggtttttcttaagctttatagactagtgcagttggatggacaggagcaaggctgaaggtgataatggggtggcaaggggcatttctccctcccagagcctctttggagactgtgagacagaaaaccagcggggttgggtttttagaaaggtgaaggcaccgggttccagtggcgcccaaggggacgctcagcaccggggcccagttcactgttagctgcaggctcccaagaggggcgcgtgcgaccgcagcacacattaggcgacccagagaccttctaggaggccagagataagcagacccgaccctaagcagatcaacagtcctgcaggactcaagtgtacgggaccccactaaacatgttgtcccagacgccccccaatccctggacgatcccgcccccggaacgctggaagagacaggcaagggtagtgggaggcgcccacaccagccgcccccgcccctcccgcgggtccctagacccctcccctgggccagaccccccaatccctgctctgcccgccgggcccgccccccggccgcccccgccccccgccccgggcgcgacccggccccagcgcccagccggggacctggcgccggccgccccgccccgcccccccccctcgcggccggtgcgcgccccccgcccctgccctccccctcccttcccacctccccacccaccccacaggcccgttaccctcccgcctgctcgggctcctgagcagccagcggccaccggctccagcagcggctcagaggggttcggcgcgcgcggcgagcacgacattccaccggacccgccgagccgcgtcgggatagccgctggcctcccgcaccccgacctccctcagcctccgcaccttcggcttgtccccccgcggcctccagtgggacggcgtgaccccgctcgggctctcagtgctcccggggccgcgcgccatgggcagcccccgctccgcgctgagctgcctgtgagtaccgcggtcgcccccgcgtccccgtcggccagcgcccgccgagccctctccgctcaccccgcgcctctttcctgcccgcttttgtctcccacaggctgttgcacttgctggttctctgcctccaagcccaggtaaggagcgctgcgcagaagcgggggccgggcgcggggaacccagctgacactctcgggcagggacacgaggaccgacccttcggccagcgcagcagggctggaaagaactttacaaatccagccccaaactaccccgaggagggatctaaggaacagagagacagtgtcctgcctaaagtcacacagcgagtgagtggagagactagaacccaagggtcttgagcccagcgactggccagttcgggtggatgggaaggctacctgtagccacacctggcctcctaggaaggcgggagctggagtcagcgggtgttccttgtcaagggtagttgggatgtagttgcagcgaatatcctcgccgctgctctctggggagacctgtggccggtttgggccaacgatcgtgttaacctaggccctttgcattctcaacatttgctccgtaaatttgtctttataaatgtcacgggtcgggtagcgttgcctcgctacttaaaagcaccctgctcctctaggaaggcccgggcggggggcctgcgctgggcagggagcccacttccctgctccgagctggccgggagccccagggtgtttcccaacaggtgggtccagactccctcattcccgggttcatccatccatcctgggctgggtctgcgcgacttccccgagggggttggtggcctgagccggcatgttgtggggatgcccccagtccccgctggctgcctggcgcggcgggaggcgggtacaagggcaatggggaccaactcggggcccctgggcggagtagcgttataatggcgtgctgtgtatttttcaatttcctaaaggtaactgttcagtcctcacctaattttacacagcatgtgagggagcagagcctggtgacggatcagctcagccgccgcctcatccggacctaccagctctacagccgcaccagcgggaagcacgtgcaggtcctggccaacaagcgcatcaacgccatggcagaagacggagaccccttcggtaaggtgcattcccggaccctggagaggagaggtagcttggacctcgccgccccttgccagccccagctgcatcagccagaaaggcctgcgggctctccacctgagaagggaaggagttaagacgaaaaggtgccttggggtcagctggagagaatagtggggaagggaccctggggaggacgaggccaacaggtgccctctcttccctgctccgcaaatgaatgaatccaggagtctcccttacaatcttcacacacctctacccggctgcaggtggaggcagagggttcagaggagaggcccaaatttaaggggagttcttgaaagaggatatgtcgccagggcccacaaaaggagagtgggaaaaagaaagtagagaaatcccccagttcgcccagtttgaaaaagggacagaactgctaactgatcagaagggtcaattgcacagggagactcggcctgcaagttagactccgggctccactgtggataccccaggggactgagtcggctggcggcttcccgcagggctgctgagtacagggagctactggggcaggggctgagaactgattgatttctacaacattcaatattcttgtcttgaaatggggccaatttccagactccttggatgtaccacaaggaagccaaaccctcagggtggctggtgttgtttttagagagtgggatattgtaagtttaaaaacctttaaataatgaccaacttaagcgagcatgaaaggagaaaggaaaactctattaaaatgtaataaaaaggtgaggcattttaagagctaagaagaaaaatggagaatgatataaaacagaaaaagaaccaggcgttttctttttcagatgtagagtttgaaaggagttgcaagtctgtaaatgttaaaaagagagagagagagaggctcaggattgttctctgcgaatctctggagagacccccgcgtctggcagagcgattaaaactattcttactttcaccttttttaacgtttcctgaatactttctcctcttctcgagccagtttgggggatcgagtatgtctcgctgcatttttttttcagcatcgacatagctgacttcccttcaaagctagaggaggagacataattttcctgggataaatctgtcactggggtggaagaataggttcgaaaatgttaagctttccaaaagcctgcttgggaaagtctctgtaaactacacggtcaggctcccctgatcgatccgaggagaccagagggggggactctttgggtgggggtgggggcagcctgcctggtggccgagctccccccgctgggctggcagagctggccttcaggccctttgtccctccaaattggctgcttgctgcccttctcggcttcccaacaagaaaaaggaaagaatgccgagctcctccagagtttactctactggagcaaatggcctagcatccttgggttttggggtgggaaggagaaactaggctggcagtgatgatcttcaggcattagcggggtcagatgcccacttactctcttcagacccagaggaggctctcaggattccttggtctctgcctgaagggcagaaatttgagtctggggctccaaaaagcccataaaagaggcattaaggcatatggactgaagagagcagaggagaggtcccaattgctgtgttaggaccccaaaaatgggcagaggtattcattctgcaatatgacacttggctgcaatccccagagcagggtcctataagccccctctagccggcatccttctatggccatgaagcaattgcttcttgctctacaaagcaggcatgagaggaatgaacagtttgcctggagaggtggtcaggaggagaggtatacagttgtacctcccagctgacttggggacagactgaggacttcagcttctgggttgcacttttgtgtctcagtgaaataggcggtcagaggcgaggcagtgaggacttcactgatggccctggtaccccttttacccctggtattggttatctatagagagagccacatgtcaagatagaattgctttctcaaggaggaaagagtctgggctttgtagtggggcaggcaggagatccagtctcttctgccctgtcatctaattcagctctctctctcttctggggaacagcctctaagagagcaattatataaagaggtggtcaggacccgcttctggggcgagttggctgtcctatgcgaacaggaagtagaggagggcacagcccaagcttataccacctttgaaagctctggccagtgcctgagaaaccctgctataagggaggcgaaggagagaagacgatgagttgttggagactgtgtgttggagctggactctgaagattgggaagcagggagagggatcagagtctggttccagaaaaggccgtgtgctaaagtcagcgcgtagggagaaacaccctcttcctcctcgtctctgattctcttattttaaattatatatgtggtgtgtgtgcgctagtatgtgcgtgcatgctcgtacaggtgcccacagagggtatttgatcccttagaaatggagtttcaggcagttgtgaaccaccctatgcaggtcctgaaaactgaacgctggtcctctctacaggagcagtatgctgagccatttctccaaccccgctctgtcacttcttgcagaacagggctgcctaaggggagaaggctggccggggctggtaattagaactgcctgggcagggacagagcaggatatttttttacctttagcttcatgataggaggtcaccactgttcccggatgtccttaatggtctgtggggtaggagctcacgatagtctaagttggaaagctattcagagatctctccaatagctatggaatctacacagcttaaattttacttggcaccttgaccttaaaaaaccaaaccaaatgcttctggcatgagaaggggtctaagggaacagagatttgatgcagccaaacatttctctgaaacttatcctgtaaactgtcatttgtctcagaatttttataagcccagaggtggagtctcaggtcctgaaaagagagtggtctttcttagggctatccaacccatccgcaaatgagctgggctgcagcctgtgctttctgctccttccccctggagcaactgtaccagggataggacacatccttggaccccactgaggtaaagctgtagaacatagaggccacagatgtactgactgtccatcccataacttccctgacagcgaagctcattgtggagaccgatacttttggaagcagagtccgagttcgcggcgcagagacaggtctctacatctgcatgaacaagaaggggaagctaattgccaaggtgagctccaggagggaagtgggccttgagaggtggtgtggactgcctgagcctctcttgtacactttaatcccaagaaggtgggtggagaggcacggtaccttggttaccgcagggcttgcccaatgattagatggaggaataagagaaagaaacaaccagagagagtaaaacctatgaagatgaaggctagggaaggggttgggggtggtgatggcaaattccatatatctttttaacaaatcgccaaattgctttgctattatgtccaattacatggtaccagcatttggaatgttcagtaagccgcaggcccagcccctcggcctagctctgaaatggccccattagtcacggctcctctcgagtctcgagcgcctcacttcctaggcttctgggcttgggcctcagagtgccttctaggcttcccctcccccgcagagggtgtctgtcctgggagctgatcctaaatccagagatgctggagggttgggggtcggggggcaggtggagaaactcccggagcccaggccagactggtgggcagtaggccagaacaggcaggctttgggcccctctgcttcgggcccagcccctccgtggagagccatgtgtcactgctgcccaggaggacaggaagttgccgggtgggctgtgggtttgtgagggattagagagcgggtgcccgggtagggggtggggccgggctcaggctcccctcgccatctgctggggtgcccacctgctgtctggggccgctggccctctgcctcacaaggagggaggctccataacacctcgtctgcccccctcacctctactcccaactacctgcagagcaacggcaaaggcaaggactgcgtattcacagagatcgtgctggagaacaactacacggcgctgcagaacgccaagtacgagggctggtacatggcctttacccgcaagggccggccccgcaagggctccaagacgcgccagcatcagcgcgaggtgcacttcatgaagcgcctgccgcggggccaccacaccaccgagcagagcctgcgcttcgagttcctcaactacccgcccttcacgcgcagcctgcgcggcagccagaggacttgggccccggagccccgataggcgctcgcccagctcctccccacccagccggccgaggaatccagcgggagctcggcggcacagcaaaggggaggggctggggagctgccttctagttgtgcatattgtttgctgttgggtttttttgttttttgttttttgtttttgttttttgttttttaaacaaaagagaggctctatttttgtattccactggctgtggtgtctgtcttcttagctctcaggaaaagcccactagtgacctaagactgggttcctctggggttccctggggtggagggctctctggtctgttctcctgaaatcccaggattggcagggtacctggccaggccaaccagggccactctgtacccccggcagggggagagagagagagagagagagagagagagagagagagagagagagagagatattaggcctaggtcagtcctttaggggagtgggtgtcagtgaaggtggctgtgtaccagttactattaaatgactgaatttaacttgcatattagaaatgtgtgctggagattgagtcctgccccttcccatggtgctgtcccaactacaggtccaaggccaccccccatctaaggacctgctttgccagctttctttattccaatgaaagggttttgtggggaagatgggtaggcagacagaaagattctgagctggccttgggtctcagatggggatcaccttgttctgctaacactttccaagcccaaggcttgaatgaagaacacactggagccctctgtgggtgacaggctgggatctcttttggctctgtaggtctaatccggatgggtaacaggacagagaccatagggctgattagaatctatagaatctaacttcaaaagctgaagagcaattgcccagtgtccaaaggtttgggggtgggtctaggctggttgacacggtgctgagtcaactttgccatgactatgaacagaaagtgccaggctcgtgtgctcctgaaaaactgaaggcactgttgtccttgaagaggccaacctgggggacctgggccttcaggagaaagagctaggcctatataggcaagagtggaagagaggcttatgggatgaataccatagccatacctgtgctcagagctggcccactcttcactgcaggccttccatgctggctgttcctgcagcccagctactaggacaatctggaaacttcttccttgtaggcctttttggcacctctcttggcatgggttgaggcagccaaaggcttcctagccatgggggcattccagagctgttctagcccaaggctcaggctcagcctttccaggttgatcaggattaccaaggctcagtggaaagcctgaagcaagaggctgggcatcctcaggccctgtctactcatcccagggcctctgggtagagtgtagctcttcaggtgcggggacacgggggacacggggttggggtctggggaaggggcttcagctagctgtcttccagattacccagtacccagtgccttgtcctctgctcccctccccctttaattaattctgggtgagcagcctggctttattgtgcgaggagctggggtctcactgtgggaaaagtcacaccttctgagcagcttctgatgccatgcaaatgaagagaccgtccaggaaacgctttcatctgcacggtcgcctgtccagcccccagcccagtaattacccacatgtcatttgtttgagagcaattcctggggaaagccacagggtgggagggagtggggggggggtgtgatggaatgtcaggctctttgcctgtgatcctggctacaaagtgaggcctggctgggccaaagctgtgctgggaacatccgagtcttcagaggtacctggaattggggtatggtcacatataggtaggagaggtgagcagaagagagggtcagacctgccttctacaaagggaagagatgccctacagggcagaggccagcgaggtgggcaggagggtgggaatctgcctgaggctttgggaaggagcacattcgagtaggcctccgggccagggacccatgggagccgagcagagagcagtagggccggagcacccagcaatttgtttatctttgagttgctgcctccacagagccctcactaatggggttttacagcccactcaagctgcaactggccaagaatcaatcattaccgtacttagtggtttgatagttaacagcctgaactgaagccaaactggttgttaactgtgataacaactgatttcaaggggttattgccggcccaatatgcttagccatttattttggggaaaacaagcagggagctgtggcaaggcccagaaaagggaggaggactgggcttctcctcagccaaaaggcagaccactctatccctgggtcagctagacaagctgcctcgggctctctcccttctgtccttaccaagtcctgcttggattcttctttcttgcttggccattttctatcaaatggtgtctggtggagcctggggctggcatcagcttcattgtgtggcctccaagccttgaactcctcctccaaagtgcctctcagacattgtgtctctagtgcgctctcgtgacgccctcacagggagaagcccagctcagtggtcaggcctctcctcagcaggttgggctagacccttgctcatcctgaccctgggatgcccagagccatgctaagtctgaatcaaaaacttgcatttcatttcaaagccaccaaagacccaacacaggtcttggctggaaggaatgaagaaatgagcgagggctctcttctcccacagctcctgtccacccaccctgctctctgtgacactgtgacactgcccaggcttgaacaccgctgtgcaaaggacctcgctctctccagatggataaacggtggctcagaagtcaaagctaaaatatttccaggtctaggctgcctcttgaggactgtaggtctcaccctgatactgttcattaattcaataaatatttactgagtgcctgactctgttctgggcagatgagacagagcaggaagtttttttaaaaaaccctgaaatccccattgttttctgctcagctgcttgagggaggcaggagggggcacaaccaacgggacagagcgtatcagacacagcgtcagagacagcaatgagtgtgaagggtgtcggctggcgtaaacagcgtgatcacagcgtgatcaaagaaggcctcactgagagcttcgtgtttgaacagacacctgttggggcgaggctctcagattggggggcaggaggcacccaggtagaggaacagctagctcaaaaactagaggggactagagagatcagtggggctggaacaaaggttaggggagacctccagagctggggccgaggagtgtgttcagggggctggaatagcaagttgataaccacatgatggcgaggaacccagcggagggcagatcatacaggggccactttggcttagccttgcggaggtgaggtggcaccccattgtgaggttacaacagcacagcgacgtgatgtgaaggcagggatgtgaagattgccctggctgctgtgtgttaagtagagagactgtggggggcaagggagacagttacaaagcgacagagagaagctaagtgattgataatagtggattgggagaggtgagaagcgattggaatttgctggttttttttttttgttttttgtttttttgtcttttttggggggggaggggcaggtagctactgcagggtctgcaggtgggtttggctttggtttgggtaggaagagaaggtggctagggatgcctggaactgatgagcaactgaaagtgcccaccagggagctgctgaggtggtttgcagagaaggttccaggtgagggctggtttacagggaggctccggagtttgagtttggacgtgtgacgtttagggagccttcttgcatctgaaattccagggtgaggtctcagtcttgtgctataataggagtgttgaacacacagctcagagccaggagacagaatggagtcccaaggctagggcatgcaggggactaaaggagtaaagaccccgtttggagtcttaagcctcagagtggaggggagggaacacagacaaagatggaggaagtgtggcctgtgggatagtaggaaccccaggagactgtacgcactgctgcagcagaatgagcgctggcagaacctggagtttaagggtccattagcttcttcttcccctacctaccaaacccagagccaggaagtctccaaaaccaagaaatgtttcatccggagcctcccggattcttcccacaaactgacttgtgcttcacccagtaggtcccactggcttcgcttccagaacattctcttgtccagtccatccaatagcttgtctgtggctactaccctgctccaagccacctctactttttcttttctcttctcttctcttcttttcttttcttttcttttcttttcttttcttttcttttcttttcttttctgaaagtgtctcaccatgtctggtgattcactatatagaccaagccagccttgaactcagagagagtcgcttgcctctcaagtgctgtgattaaagacatgtcaccaatatctggcctccactttatttctttattcatttagacaggacctctccctgatcctggggcttgccctttgagatggactagctggtcatctgtttctgtgaccccacctccatcctgagtgcctgccgggggtcatgggtgtgcacccctgtagctggcttttacatgagcgctggggaacccagctttactcactgatagcttccccaggcctctgtcctccattctcacacagcagcaatcttggcacacagctgccttctctatccctaccagctcagtcactggaattttcaaaccccagatgggattgtgttagtcccaccaaacccaccctgagattctaacctggggcccatggcctacagtctcccgtgcattctggccttgaccggtctgtctcatcctgcatcctaagccacctttgtcatcgctcactgcattctgtccctgcctcttcagtctcttccggcttctcacacaagctaagtgggtgtttgcctgtctccgtgcctgctgccctccctgctgggaacgcttgtcctacagggtcatgagatgggtgggtgcagtaaagaactctctgatttctttgttcccttgtgcagtgctgaggcctcacatatgctgggcaagtcctctttctgctttttagttcataccttagttgttttgggttttttggaaatgggagtttacatacggtggcgtgcacatggaagtcacaggacaactattgggaaaaaaaagttttattaagatgcctaggctggccttgaccttgggtttgaaatcttgcctcagctcccaagtagtgaggtttacaatcctcctagtttgctcctccgttgctgtgataaacacggactagaagcagcttggattggaaggggcatttgtttggcttacggactccaatccatcattgagggaagtcaacgcaagggcttaagtcagtaacctggagacagaaactgaagccaagacccaagaggagtgctgctcactggcttgctccccgaggcttgctcagtttgcttctttatacaactccagaccacctgcataagggcggcactgcccacagtgagctgggactttcacatcaatcaatcgccaatcaagaaaattcccctcagacaggcagacaagggcagtgtgatggagaactatgccttacccttcttcccaggtgacttgcgtttctgtcaagtcgatgaaagctagccagcaacaggcctggcaccatgaaggtctgtcctattttctatgttattctccccactcactggtattttcctggtttctgtttcttagattctgctctgtctagctgtaccttcccaaagagcgagaaccttggtgtaacttgctcattgcctaagacagcactgctgaatgctgaccacctagctcatctgagctatgctaccttcgtacttatttatttacttacttatatatttgagacaagattgggctgacagaattcacaatgtagtccaggctagccttgaactgttgacaatcttcctacacgagcttactgaatgttgggattataggtgtgagccgaggtacatagttcacgcctctactgtttacaggagaccacaaacccattttttgaaggcacggtaaatgttccctaagcttggacaaatggagatcaaagcaggacctattggactggaaacctcagaacccctccaaattctgcttccttggttgcattgggtttccatagcaaccaaggggcttcagtaaagatggtgagtggggaattaaaagacagagagagcagagaagagaggaggagtaagtggtggggagacagatggggagctggcaggaactccggggggatccccaagtcccatgttattctggaaggttgtgccaagaaggatctgttggttgctctccctcccatctgggtctcgctgcaccctaagaagtgactgtccatctgggcaggcccagagctgatcgcttgtgagccccctccctctgcttggcagacactgagcgaggcctgggctctatccctcagcaaaaaacacgaggaagccctgggctgattcagggaacacttgtttgcccttccttgcttggctgtcggtggaaggagaaaggactgtccaggcactgtcccctgctgaacatagtcctttgccctgacatttggggatcgtggcctagctcccagtggttaaagatcgtatggctcgagtgtaggacctgactggaagtactcagaacaagagcccaggcctgggtgctgctctgagatatgcaggagaagcctgaagaaagcccttctggagtggcaacctgttcctccctctgggaaatacctgagcctgaagcctgcaagggatcctgggaggacccatgacatctgccagcagcctggacaccttggtcctgagacccaggacaactgtgtggagaacaggtcagtgaccatcaaattacatctgtccctctgcccgaaggcacatattatggaagacctcaggggaatgtctgggacctggactcaagacagagtggtcccctaaatgtcatttgtccctaaatacctccactgtcatggatcccatgttatgtccagtgtctgatttaataatttcatttttttccttccttccttccttccttccttccttccttccttccttttttctttctttctttctttctttctttctttctttctttctttcttcctttcctttctctttctttctttctttctttctttctttctttctttctttctttctttctttctttcttttagaaatgatctcactatgtagccctaactggcctagaactctttatgtataccactggcctcaaacccacagagatttacctgcctctgtttcctggctgctgggtttaaatgtgtgccctttatctatatctatctgtctatctgtctatctatctatctatctatctatctatctatctatctatctatttatctatctactgtctatttatcatttatctatctatctcactctttttcttcctttccagatctggaatggatcacttgatcttgtgtatgctggacaaaggcttcagatccaaccatttcaatttgacaaacaccatcacatctcacgacatcgtcctccacaaagaaatcctgcgttccatcctaacaaatacctgtgctatactgcactgttccgcttgcctcctgccctgcctcctttggtttcttcgacagccttccctggagtcactgccttctacacagtgcctaagagcaagcccatgaaacattcatggtgggtaatccactgtggaggacctactgatggctgtcctgatagaacaggcaggtcagcggaggctgggcttgggctcaggttccagccacttccctgaaactggtcctgattctcccaagggaaggctggaggttcagatcctgagctgccagcagatgttcctgtgacgggatgcgatgtagcagctcagggagggagagtggcttcaaggttacccataagtgaggtgcggtttgttagttgagggtctaagagccaggagacaaaaatgagccaaatgactcaagagctaaaaagggcctgggtctgtgctgagtgagaggagggggacagagcctaagtttgtggtatctgaaatttcttttcttttcttttcttttttttttttgtttttgtttttttttttttttttgagacagggtttttctgtgtagccttggctgtcctggaattcactctgtagaccaggctggccttgaactcagaaatctgtctgcctctgcctcccaagtgctgggattaaaggcgtgcaccaccacacccggctgtttcaaccttcctaatgctgcaaccctttacagttcctcgtgctgtggtgaccaccagccataaaattattttgttgctcctgtagctgtgattttgctagtgttatggattgtaatgtaaatatctgatatgcagaatatttgatatatgacccctatgaaaaagtcgtttgaccgccaaaggccttgcaaaccaaaggttgagaacagctggcccgagagataggcctgcgagaccacgggatggaactatcctggatccgattagaatggtcagcatcaacgtttgtgtgagtaggggagtccagcgggtgctttagaatgtcactctttggaccagtggcttctgtgggcagggactctgtgggaggagctgggccacctgagtaagggctctgaggtcaggcgtgcagattgacaccatcactggtaccgtaagaagatgcactgggcctctatggaggctgctttcttgggaaacagtttagtagcccgagggcctgaggtcacccaacagctggcaaagatcaagggcaagtttctatgtgcccatcagatgcccagcctttctctcagccttgcatttactcaagcaggtgtggctgcctaaggcctggaccctcagcagaagcaagaggtgcagatgcactgattgtctgcaggggagaagtttttcctgcttgttcttaaggggctgggatgtaaactcgtacatctcgctcctctgagctccctccaactctccaaaaagcacaaagccaagatgaggaggttcagtctgagctgcctggagtctgaaaaaaatagaggagagaaagatcaaggacagaaatctggcatccagggcttcttgtgtccctaaaggcaaaagctcaccttttcctttcctgagtgccttgagttaacatggcatggtcaggcaccagaaatgcagagtttggaagccacgctgagcagaatagagagatctcaacgcctgctcccgtctggcacgtgcagtcaggcaatggtgatgggcgcttgaggttgagacaggaaggggaggggctgggtgaggaaggtgagctggggaggaaggtgctcaggggaacacagtagaaggaagccccgggttggcttcgctggaggcagccaatcccagctcagctcaagttcagttctgctctcactggtggaaggaatggggtctgcgaggcaaggtctccactgggctcccaaactagcaaacctgtacttgtcacgcgacatggtccgggtagctcctactggggcacctggtaccctgctcatctgaatctccaaaggggtcacagagaagacaagagctaacagtgagcgaggagtctcagggacgttcgtcttttcctccttccttccttttaacatttttggtttggtttgtgaagtcagggtgcactccccgtgcaactccccatgtgagccaagatggcctcaaatttgagaccctctacctcagttgcttgcggttacacatgtgtgctaccaggcgttgacaactttcatcttttctgtaccttagttgtctcgtcgtatgtcagtcagtggagcactgcctactatgtgtgcagctcaggcctcagttcccagcatgcacctgggtaaggtgcacacagctatcaatcccacctcctgggaggcagaggaggggaaagaaaaagttatggtt

SEQ ID NO: 988 - DNA, 1078 bp, Mus musculus
ccagcagcggctcagaggggttcggcgcgcgcggcgagcacgacattccaccggacccgccgagccgcgtcgggatagccgctggcctcccgcaccccgacctccctcagcctccgcaccttcggcttgtccccccgcggcctccagtgggacggcgtgaccccgctcgggctctcagtgctcccggggccgcgcgccatgggcagcccccgctccgcgctgagctgcctgctgttgcacttgctggttctctgcctccaagcccaggaaggcccgggcggggggcctgcgctgggcagggagcccacttccctgctccgagctggccgggagccccagggtgtttcccaacagcatgtgagggagcagagcctggtgacggatcagctcagccgccgcctcatccggacctaccagctctacagccgcaccagcgggaagcacgtgcaggtcctggccaacaagcgcatcaacgccatggcagaagacggagaccccttcgcgaagctcattgtggagaccgatacttttggaagcagagtccgagttcgcggcgcagagacaggtctctacatctgcatgaacaagaaggggaagctaattgccaagagcaacggcaaaggcaaggactgcgtattcacagagatcgtgctggagaacaactacacggcgctgcagaacgccaagtacgagggctggtacatggcctttacccgcaagggccggccccgcaagggctccaagacgcgccagcatcagcgcgaggtgcacttcatgaagcgcctgccgcggggccaccacaccaccgagcagagcctgcgcttcgagttcctcaactacccgcccttcacgcgcagcctgcgcggcagccagaggacttgggccccggagccccgataggcgctcgcccagctcctccccacccagccggccgaggaatccagcgggagctcggcggcacagcaaaggggaggggctggggagctgccttctagttgtgcatattgtttgctgttgggtttttttgttttttgttttttgtttttgttttttgttttttaaacaaaagagaggctct

SEQ ID NO: 989 - protein, 322 aa, Mus musculus
SSGSEGFGREHDIPPDPPSRVGIAAGLPHPDLPQPPHLRLVPPRPPVGRRDPARALSAPGAARHGQPPLRAELPAVAGSLPPSPGRPGRGACAGQGAHFPAPSWPGAPGCFPTACEGAEPGDGSAQPPPHPDLPALQPHQREARAGPGQQAHQRHGRRRRPLREAHCGDRYFWKQSPSSRRRDRSLHLHEQEGEANCQEQRQRQGLRIHRDRAGEQLHGAAERQVRGLVHGPQGPAPQGLQDAPASRALHEAPAAGPPHHRAEPALRVPQLPALHAQPARQPEDLGPGAPIGARPAPPHPAGRGIQRELGGTAKGRGWGAAF

SEQ ID NO: 990 - DNA, 25946 bp, Homo sapiens
tattgagtgaaatgcctctcagtcttaggggacatggcagagatgaaagaaagaaagagtgggtttcagaagtgtcagggtggagtgattccaagtgggatggttgtggcattagtttaagctgaataaataatttcaatttggggcagttattctgctttttgtaaagccgtggccaattgtctcctgtaatgactgttggttcaggcatgttgtactttgtagggacaaatgtgcatttgtttgtggcaaaagcctacaattgacaaacttgtaaatttctttgtatataaactagctgtaacctgactatcctttgtgtttactgtttttgtaaatttttttcctctataaatgaaagggtgttggttcagaatggcactttgaataatgtaaaccagtgaaaagtggattttctttacttttgtctttgggtttggggttgtttttgttctttttgaagttttattatttttaaagtgcctcccacctaggcgtaggccatgaccatttggggtacgagagcctaattttgtaggacttaatctgttgaaaagtgcagttacttctggaaattaacctcaatattaggtcagcatgtgaaatgttggatttgacatgtcaggtagggttcagggactgattggtcccatttgccctcaggtcagttgtttaatctcaagacctgttactactgattttattaaatcagagtctttaattcttgcatgtttgtatctaatttctgaacgaatgagcacactttaaccagttatttacagttacctttttcctttaaccggattgtgaaagcttcatgtattttaatttagattctgtgtttttaagggttctgagcatgaagctggcagatagtcggcaggactcattttttcatcatggctggctgatttctccatagattgataacagtattttgttatcttgcttctctgtagttttgcatcagctgtttaactttgagctgagtgaggggagaggggtaaagagaaagaaacttaagttttctttcacagaactccaccattgtgggctttgagagagccctaaagcattgtacctagtggtacctagtgacttccaaccaaagcctttgagtatgcactaaataggtgagaagaaaggagagaaggtttttaggttagaaacctttaaccgatagaaggatatggtatgttgtaaagctggaaccaagtttgcatttttgagggcttgagatgaagggaagactcttaccagatagtaagacagctgagttttcctcagttttctcgtcttaacactagtggacaattctagcattttgtttggaggatttcagagttaacctcatggaattcaggattttttagcaagtttgcttttggttttatcttggcttttagtaatcatgttggctggtctggtcacaggtgactgtgaaacagatgccctggtcttgctttcatcactctaggatcatgaagtgctatgctatttcctggttatgaatattaaggttggaattacatttttattgattgtttggatcagagctcagttcctgtagaaaacgaactgtaaaagaccatgcaagaggcaaaataaaacttgaagtgaatgcttgtcgtgttgtattgtgtgaatctatttcctgtctgccccctcccttttctcctctttcatgcctcacctacaagcaggtattctctcctctccacagctgttccaagttagagattggatcttgaaggcagccctcccctacctccatcaccagtaagacttccagattttcattaagacaagagctaagaaaagtagactagtttttagccaagccaccccaccctcttgccacagttataacctggatgtgaaatagggcctctagtttgagttttgccatctattaggatagaaagcacacagtttgcctgattcttaaaaggcgaaagatggcgcgagtagcataaactgacaaaataatccacggcgcaaagatactcctggatgatttggaattaaaagctcaaaaagcgtgggtgggccaggaacagccaacacacatgagctaactagtcctctgctagcaagtgccagcagctaagtctcagtgaaggcatagcaagttgcggggtctttagagcaggaagaattaagagaggcttagccgagaggacagacaggacagacgtgttgggatggaaattcctaaggctcctcggctctcttgaggcaaagacaatctgagtgcatttcctttgcttgtagcagaaaagcactgccctgaaccccacctttgctgggaggagtaagaagggtttacatttttatatctataactcctttaacgaaagcttaccctgggttggaagagtgggagacactcttccgacacagagcgaggagcttggggaagtggacaccctcatggtcgtggaaatgagcaaggatgttaacataaaccccaaatccattcttctgtgatgttacttcctttctcttcggtcttgataaaatatgagcagaagctgcgggctccgggtagggctgcggggtctcggcgccttttcttttccaggactgtgcgtctcctttaatgggcggggccggaactggccgagggtccccggctttgtgcgtgtcgggggcggagtttgaagaaggctcttacagcatggccgccggtactgcagctgccttagcgtttttgagtcaggagagccgaacgcgggccgggggtgtcgggggcctacgggtcccggccccggtcactatggacagttttttcttcggtattagtgaagggagaggctgagggtggtactggggcggtaagaggtagggatgtgaggcgggaatgcggagggtttcaaggcgtgggtgtgggcggagggctgcttcgctgttcccgcaggagagggggcctcgcacgcacagccaaagggggtggcgagatccctgccccagatgtgttgggcggggcccacggcagagcgtcccaggtgttctgagagaagagacggaggtggacgtgtaaatgacccgtccgcccaaggttacacgtgacggcgggttggtgacatcccccgctgcccagccccgtacacacgctcaggcatactcactgttatttctaccaggctgtgagctctccggccacacccgctccttcacctttaaggtagaggaagaggatgatgcggagcacgtgctggcactaaccatggtgaggggcaggggagtggggttttaatgaataagcccaggcaggcaatataggtctctacccaacctccggatcccctttacttggagacacatcctcagcctaaccccccggcatgggcggctcccctggccaggtgaaccgggacctctgaggctgggcaggtgctagggtagatgcctttagttgtggtgtcaaccctcacttgaggagaccctgaggccctgtgtaccgttcccagctctgcctcaccgagggagccaaagacgagtgtaatgtggtagaagttgtggcccggaaccatgaccatcaggagatcgcagtccctgtggccaacctcaagctgtcctgccaacccatggtgagttccccagctctgccttggtggtggtggtggtggtggtgaggggattgaggacgttagcactcattacagtgtggggtgggctaggagtgggccaggccttcatccttgtcttcctcccagctcagtctggatgacttccagctccaaccacctgtaaccttccgcctgaagtcgggctctggccctgtgcggatcactgggcggcaccagattggtgagaagaggggagggccctctcctttgcttccagtggactctcccatcaggcttcccccactccgcactcctgccccatcccaccctcatctcccagtgcagccctgtacaggtctgtgtgccctccacgctgtgccctgtgcatgacatgccctctcctttccgtctactcaagcctacctcctccatggaacatggcccaacttctccagctccaataatgaagactcctttggctctttgtgacccagtttagggtctgaggttcttcccacctagcccataagcactgggaggtcatggtccctgtaagcctaacaccacggcgtgaagaaatggcatgcggtgtgaaacggtctggtcttaacaccccatccttctactgcttgtgtgtccaccagttacgatgagcaatgatgtttctgaggaggagagcgaggaagaggaagaggacagtgatgaggaagaagttgagctgtgccccatccttcctgccaaaaagcaggggggcaggccctagccctcctaggtgagttgcggggagaagtgcctagcaggctctgggaaggggcaggagaagcaggtgagggcctaaatgctgattccttgtttcctcttttcaggtcagctccatgtgccatgcaccgccatgcaccctgttccctgacaagtttcaacaattgtaaatatttcttccttgaagaggagagcttgggtgggggttgggtgggagggacttgggtctttggtgctaggagagggcctgtgctccacacagccgtggttttctgattttcaccatgcccggggcctcccttcccacctgcctgtgagaattggaggttagtgcctgaagctcagagctacacatttttaatagtttttacatttttggataaaggttgaaataaagtggtgtggagtttttgcagctcttgtgtggcttcttcctgtgctgggtgatgtttccctagggaccgccaggtggcactgtggcagcacccagcgtggccctgggcctgggggagggtggagaactgtgggatcctctaccctcatggccctgggctaggacctggggcctgggccccagttgccttgctggaaggggacctcccaacactcagcccattcccagtctctgcaggtgggagagggtcatcgcaggaggttatcagcatccaaacaaggggtctgggcctctgtcagcactcggctgatgggcaggggggcagataagcgagcttaggcagcctgaggaatgcgcgtccctagccccacgagggtctctggcccagagagggcctgtgagggcagggcgggaccaggcttcgctcctcctttgagccttgcaggctgtctctgagcagggctgggcccttagagaaacctgactccgggggccagatggaggggactggccagattgggtgacagggaaaccagaatccgggtggcctggcatatgggggcagaaaggggccccagggaatttgcctcctggactaagggattcttgtcccccacacaccgtggggtctgggggtctttggtgcctggaatcaggtagttctggcacttggctgcctttgtgccaggaagaactgacacacctggtttgaggatgagtgtatgtgaccagctctggggtcagcagttcagcagctgtgttggttgtggggggagggttgtcaatgcccacaaacaaacaaacaaacaaaacattgcctccccagacaacctggggccagacaggctgaggatagacagagaacagggcctgatgggggtcaggccaactcccactcccagcctctagtcaagggggaggggccccgggatatcgcgggctggtggttctggggcaggtgaggtcagctttgaagaccttgcgtccgcagtaccgacccgcacgctcttcagcgcatccctagtgaaggaggttctcccccagcccgtggtgaggaactaggggtccagtttccaacctccctcttcctcaagttgaggacaaagggagatgacgcccgtctgtgttgcggtgatctgggtcgcaggcgcctttctccgatccaggagggcgctgctaaaaatgcttccctggggagcccggcggaggggcggcctggctgggaaccatgggtctcgctgcggagcgcggtcggcagggagagggaagtcggggctggcgccctctggcgggcgaggttgaagccgctcgtggtcgtaccgcttccctggcctctagaggctccgggcgggcgccgtggggccggggcctccgagtcccgccactgctctgggcggccgaatcttgggcggaaggcgggggaatgccactgaggcttgcatgcatgcgtgcatacgttcattcattcattcgaacgacttgagttggagtggggaagtctggctgtggccctcactcctctttcccttcctcttcttggccccagcctccaaagtcctcggcacgtgcttggcaggaggagcgggagactggctgagtcctctctcctgggaggcctccctagctgacccatctaccccctgcgcggctccgccccaatatttaccccacccaccccccgcgatgccactgatcgctccttgcatttctcgccggttttccgggtaggtctcccggtgggcgcgggcctgcgccgagcacgctcctgcccgcagtgggggcccaatccacatcagcctctcggcccaagagtttctcggccggttggggcgccccgcggacacagctgggcaaggtttattcctctctcctcgccccagcctctcctcgagccctcttctttgcccttcagcgcacagtaggagcgctgccggctcactgtggcctcagacccctgggggatgaaggcatacgccggggtttgccgactgctggaggaagggcaggcttctatttgggggccgagggagacgactcccagacagtggccgaagtgcttaacgtagtctcggcgatttgcatttgaacggtcggcagtgagtccgcggcgctttgaacgcccggcgcaggaagcgcgcgtcggagcgagctgcggtctccggcgggtgtggattggaggggccgggggatgggctgggatcgaggggtgcgtttggaaataggctgaagtagtgtgtctgggtgcaggcgagggcgtgtctgcggagatgggccgtttgtgttggcgaggagtgtgtgtttgtgtttgcaggcgagggagtttgtgtctgtgcgtgtgtgtgtttgtgtttgcggagtgtgggggcggccaggaaaggtggccgggctgtcactcagcgatcaggttgacaggcgctccctcatctgggccagggagctctgattgcagattcgaggaaacaaaatagcaattgtaattaccgggctttgataagataaaggagggagggagctggccgggaggcgggcgagccagcaagggagggagcggcctgcgggggcccggcgggacatttgcatctgtcagtcacggggcgtgccagggcagagccaggtgcttgctcccggggtgtccccatctgctcctctcccccagagaaacggacttttggggagatgagaatttcaacgaactaggtgagggtccgcttctcaggagggtctccaaatccaaatgtaaaggaatcctggtccagcacaggctccctggcagaggctgggacaggactgaaacttgacctcggacccttcagatcccaggacgcccatcttctctggggcagaggaagaagggtggctgaagaccattgagggtcaacccagggccctcagaatcttctgggggttccacagctggagctgaatgctggtctcagccaggggctctgcccctacccccattccagggaggggcaggtacccagagtggctctggctgtgaccccaggaccatgcaaacactgttggatgggcgggtcaccctcacccctgcctggggcctactccctgctctgcttatctcactgatgttcagagagtccatggtgggagaaagcccatttcttacaggaagtgcctgctctccatctctccattcaatcatttgttcatcgacatacgcaactaaacatgcttgagggcctactgtgtacaaggatgagggtaagaccacaagcaaacagacataacctttgcccacttgaagcagtgcagagagggaaacagacactcaatgaattgtgactcaggccttacacagaacacagggaaggcaagggctggcctgggctgtggccacttgtgtccacctgacttgtctccgcctgatggacccacctccccatgggctttagaggagacagtgcctgccaagcctgtggcagatacaagtgctcactaactggtggtgttcctggtgataatctgttgggaggaggtgaaggcaggtcttcctggggaagttgcaaataggctgaagtctacaggctcagccacttcccccatcattcattcattcattcattcaacgaactcttaattgcagaacagctctgcccagccttgtgccacgagctgtgatttctgagctcataagacatggtccttgtgggcaaggtctgtgtgggcaagagcccactgaacagactcctggaggaggatggcaagtgtgctctggaagtctacttctctgaggagggataagatcttggaacgcaccctctaactgttttcccatctctccattgctcagtgtttgcatttatggctgggagttggaaagatggggcacagggaaaggtgggacacagagcagggagggaggcagggcctggctgtgctgctggactagggctgccgctaattttggcctaatggcttcctgggaccacaccaaaccctccagccctacccccaggggaatggagggtcactggggaaggggaggttgtaagtgaagacagcagtctggtagggcatcacctgctcctcacaaggcacctgtcccagagcatctctgtccacccaggctgctcccacagaagcagcatgggggctcagggtttccagaaacctcaggggggaagccacaaggtggggggctaggaaaggcttagacaagtgcctaccttctcctatgccccaagcccagctgaccagcccctgcctagaatacagtaggtgtgtaaatacctgtgaaatgaaaaacgagtggggctttgagggggaaagggctgggtggcctggatggaagtcccttcccccagtaaaagctactgagagtttttttgcccctgctgcctgctgaggtacggggacagtgggtcctgccagggacctccggactctctcttccacacaggtggctcggggtgctcctcaagcttcaggctagtgtgtgtgtgtgtgtgtgtgtgtgtgtgtgtgtgtgtggtgaggggcacaggggaaggggtgatagtgataatgggatggggggagggggaggcatttctggctcccagggcctcctcgggagagtgaaggagactggagagaccgacaggacggggcacgcggccgaaacaggggagcggggtccgggtggcaccggcacgcactgcgcgagggccgggtgcgcagccattcgctgcatggttagcggccgctcccaggggcccggcgggacacacagtaggtggctcggagaccactgcgtagccggcggcggaagcggctgggcccggaggcggagacccagacccgccagactcgggcgctccaggcggtcggggaagcccaggctcggggtctcccggcccgcagagtttgcagccctaggcgcccccatccccgcgcgtccgggcccggggagcgcgcgaggggacaggccggggatagggggaggcgcccagaccggccgcccccgcccctcccgcggtccccagacccctcccctagcccagacccttcaatcccgaacccgtcggccgcccctccccggccgccccgcccccgccccgggctgcatccaggccccagttcccagccgggggctgcgggctcccgccgcccgccccgcgctcccacctcgcgcccggtgcggcgccccccgcccccacccctccccgccctcccacctccccacccaccccgccagcccgtgaccctcccgcccgctccggctcccgagcagccagcggccaccggctccggcagcggcgcacagcgattcggtgcggcgcggcgagcacgacgttccacgggacccgcggagccgcgtcgtgatcgccgccggcctcccgcacccgcaccctctccgctcgcgccctgctcagcgcgtcctcccgcggcggcccgcgggacggcgtgacccgccgggctctcggtgccccggggccgcgcgccatgggcagcccccgctccgcgctgagctgcctgtgagtaccgcgccgccctgccccgccacccgccccccgcgcccctcgcctcacccgcgcctctctctcccgcccgcttttgtctcccacaggctgttgcacttgctggtcctctgcctccaagcccaggtgaggaggggtgcgcggaggcgggggccgggcgcgccggtgtgagacccgggtgggcagcgccggtcgggggcaccgggactgactctgcggccggcgcgggagggctgagggcaccttagaaacccagccccgagccaccccgaggagggagctgaggcacagagaggtagcacccctcctgaggtcacacagcgagtgagtggccaggatagaaacgaaggtctcggagcccagcactgtcccccatgcatcctcgccggctgggggcatagggaacacccagccgccgaggaagggggcagccgcggccaggggatggatgttcgatgccaggggaagccgggtgactgcagcagagaccctctcagcgcccctcgggggaggcttgtggccgatttggcccaatgatcgggtgcccaggttccctgcactctcaacatttgctccgtaaatttgtctttataaatgtcaggggtcggggagggctgcctccctacttaaaagcgccctgctcctctaggaaggcccgggcaggggccctgcgctgggcagggagctcgcttccctgttccgggctggccgggagccccagggtgtctcccaacaggtgggtccagcttctccctggggctcgttcatcctgggctgggtctgcccgacttgcgtgggtgggggatggtggcctgggctggcatgttgggggaacccccagcacctgctggcggcttggggcagtgagggggacgcagggtgatggggccactcgggcccctgggcggagtagcattataatggtgtattgtgtatttttcaatttcctaaaggtaactgttcagtcctcacctaattttacacagcatgtgagggagcagagcctggtgacggatcagctcagccgccgcctcatccggacctaccaactctacagccgcaccagcgggaagcacgtgcaggtcctggccaacaagcgcatcaacgccatggcagaggacggcgaccccttcggtaaggcgcgctgaaggtagcttgtgggatgcgcggcgcctggaccaccagtcccaactgcactggccgggggcctgcagggtccccagctcagaagggaaggagttaaggcagaaaggtgtcttgagggtcagctggggaagagagggctagggaaggggcctcggggagtacttggccacaggtgcccccttccctgcccagcaaatgaatgaatctaggaatctccctttacacctccccccttcatacactcctccccagctgcaggtggaggcagggggttcagggggagggggcctaggtttaaggcaagcgcttgaaagaggatatgtcgccagggcccacaaaaggagagtgggaaagagaagggagagaaatcccctcaactctcccagttggaaaaggaggttgctgggaacccttaaatactttaatcggatgggtcaatttacacgtggaaactgggcttggaagggggctctccctgctccattccctggggaacccaggcggctggggcagggctcccggctccctgtggggtggcaagtgcggagagctactgccggcagagaggctgaggactgattgatttctaaaacattcaatattcctgccttgaaacggggccaatttccagagtcctggatgtaccaagagaaaagcaagccctctgggcggctggtgttgtttttagagagcgattattgtgagtttaaaaacctttaaataatgaccacgttaaacaagcatgaaaggagaggggaagactctattaaaatgtaataaaaaggtgaggcattttaagagctaagaagaaaaatgaagaatgatataaaacagaaaaagaacgagctttttttcagatgtggagtttgaaaggagttgcaagtctgtaaatgttaaaaaagaggttcaagattgttctctctgaatctctggagagacccctgcgtctggcagagcgattaaaactcttcttactttcaccttttttaacatttcctgaatactttctcctcttcttgagccagtttgggggatcgagtatgtctcgctgcattttttctgcatcgacgtagctgacttcccttcaaagctggaggagacataattttcctgggataaatctgtcactggggtggaagaataggtttgaaaatgttaagctttccaaaagcccggtcgggagagctgccgtaaactgcggccccagctccccagatcggagcagattcaaccgacatgggagagagcgggctttctggggtgggggtgggggcggcctgcctggtggccgagctcccctactgggctggcagagcaggcctaccatccctttgtccctccaaattagctgcttgctgcccttctcagcttctaaggagaggagacgaatgcctggctcttccagggtttgctctgtcagagcaaatggcccagcatccttggatttcggggagggaagcagaagtcaagctggtgtgggggaattcatcttcagacatcagaggaagcctgatgtccacttctctccgtggccatataagaggtttcccgccttccctagtccctgccccacagcaggataggagctggaggccctaagaacagaggctcagggtgttcagccaggacaggagtagtccggggagaatagcagagaggtctcaatggcttctttaccggccccaggaagatgcagaggcacctacttcatccctgcctgccgcatctggccagaatccccagagtggcatcctctcactcctccagtcagcatccttcctggcccttaaaaatagctgcctcttgctgtggaaggcagagcgggagagggatgagcagactggctaggtccaggaggaggtgggcaggcagggaggtgacagctgcatttccctgctgacttggggccaaaccgggggcttggccactggtcccagcactgagcctgtgtgaagcggggaacattacaagctgagcagtgatgactgacttgctgacctcgatgccccaaacccctgccatgggtttcagggacagaggaggtgccatatgtcaatgcaggctaagtccaagaactgctttctcagggaggggagaggctgggctctgcggcagggacggcaggagagccagcgccttctgtcccttcctaaacagtgaagtcaccctcactactttcttgaggacagcctataagagatgattgcacagagaggtgaacaggacaggcttctgtggcaagttggctgtctaaggggaggggaatgggaaaggaggcatagaattcagccctgcctcctggcctccagtctaagaggccagcaggcaggattctccctcctcctcacccacagaagctatttggtcactgggctgagaagcccagctgtgatgaggctgaaagagaaaagacaattgagttgttgatttctagacactgggctggggaccctggtgactgggaagccacagggaagaggcaggatcctcctggcaggtgtctgaggttctgggaaagcagcctgctttgggctgtgtgtttagggagagctgtccccatccctagcaccttctcagcagagcagagcctggtgatgttgaggggctgggggtggccaaagctgtgagttagaacccaaagtggcagaaacaggagacaatgctttcatctttggccttgggactggaggtcaccccttcacccaagtgtttgtaatgacctgtgagacacgcacacataatatttggagttggaaggatcctcggagatcttttgattagctatggaactctgattcaattaaattttacttagatcctcaatctaagagacatcactgtctggtttaaaaagagggtggaaggaatggcacttcagccttttcaatttgatagtcccaagacctctcttgagaacccagtttgaaaaccataatcccgtccactgccctctgtaaacccaggggtggggcccgaggtccagaaaagccctttctctgggttgcacagcatgttagtagctgggctggagctggagtccatgttttgggttcctggtctttggagcagttgctgctgggctgtgacaagtgtgtgggccagctggggtcagggatctgccaatagccatcctgctaccttctctgacagcaaagctcatcgtggagacggacacctttggaagcagagttcgagtccgaggagccgagacgggcctctacatctgcatgaacaagaaggggaagctgatcgccaaggtgaggccccagcaggcaggtggggtccgcgggacctagggagtggcttgggctggctggactcctccaagacagtcctgggctctgatcccaacaaggtaggcagaaggccacagggccatcttggggttacctcacgattgggtgcaggagtgagggagaaggaagctgtttgagagatgaaaactataaaaggcgaaggaggaagaatgaaggctagggaaggggctggggggtggtggttggtaaattccatatatctttttaacaaatcgccaaattgctttgctattatgtccaattacatggtaccagcatttggaatgttcagtaagccgcaggcccagcccctcggccgagctctgaaatggctccattagtcacggctcctctccagcctcgagctccccacttcctgggcttctggggctggggtcttagcatcttctcccaggcctcccctcccccatagggtggctgccctggggccagggaaccgaagtcctgggggggtgagaggggcaggtggggagacgggtggccagactggtgggcaggaggccagagcaggccaggctctgggcccctctctctgtctttctgcgttggggcccagcccctccgtagacaaccatgtgtcactgctgcctgggaggacaggaagttgccgggtgggctgcgagttgtgagggattagagagcgggtgcccaggcagggggtggggctgcggctcctgcccacctcgccatctgctggggtgcccacctgctgtctggggccgctcgccctctgcctctgctgggggggctctgtaacgtggtgtctggctcccctacctgcagagcaacggcaaaggcaaggactgcgtcttcacggagattgtgctggagaacaactacacagcgctgcagaatgccaagtacgagggctggtacatggccttcacccgcaagggccggccccgcaagggctccaagacgcggcagcaccagcgtgaggtccacttcatgaagcggctgccccggggccaccacaccaccgagcagagcctgcgcttcgagttcctcaactacccgcccttcacgcgcagcctgcgcggcagccagaggacttgggcccccgagccccgataggtgctgcctggccctccccacaatgccagaccgcagagaggctcatcctgtagggcacccaaaactcaagcaagatgagctgtgcgctgctctgcaggctggggaggtgctgggggagccctgggttccggttgttgatattgtttgctgttgggtttttgctgtttttttttttttttttttttttaaaacaaaagagaggctctatttttgtattccacttggctgtggtgtctgtcttcttaactctcagaaagctccattagtggcctagactgggattccggctgggggtttgcgggggtggggggctttctctagcctgtgctgctgaggccccagtacctccagggccagttggctgggcagccagggactccactgcacccccaggtggggcagggaggaaaggactgtgacatagggcagtcctcttagaagtgggtatcagactggtggctattaaatgattgaaatatttatttaacttgcatattaaaaatgtgtgctggagagtgagtcctgccggggtcagcccctccctccaaccttgccccagctggtgggcggctgggagacgcagatgaccaggtgccagctctgaccacagcctccctccagcctaaagacacctgcctgtcaaccatccccatcactgtcacttgaggggttttcctgcaaggacagaagcagggaaaggggcaagaagaggctcttagctagtccttggagctctcagatgtgtacctcctagcactttacagaggtcattgctaacacttccccaggccacctcagggccagaaataatggatgtgctagggctagagctgtaatcatggatttaatcctcttaaaaagtgcttctctgagtgcctaggtccatgtgggagacaggttggagattccagaacttgctctttctgagactcaggctccagaaaatgaaagaaaagagcagctgccagggtccaaggtgggggcatattggagggggaccaccaagactggtgttgacaatggtgatgtgggacaagtgttaaccttgggtgatatggtgagatagctgtgggcagaaagcactgagctgaggtgcggtgaggagcctggggaactgtcttccaggaagaggctgcccacctcggaggatgggcctggcgggagaggagctgggcaccggatggcaccagaagggaagctcataggcctagcgcagaactaaaggcagtcatagccttggggagaagcaggaggccgtatgtggagggagggagggctgctgtgggagtggtggagcaggtcatggtgtgggcagagaagggaatgggcaagggtgcaggtgtgtgtttgcgtgtggactggtgagactggtgtcctgccacaccgagggagagcccaggccccacggcagtttcctgagtgcagagctggcccaggcttcatcgctgaggcctcccattagggctgctcctgcttccttccttgtggatgccctgggctggtcccacagcccagctactgagccagtctagaaacctcgctcctctaggactctgtccattggcatctcctggggtagggagcaacccaaggcttcctcccacagtttcaggcccaagtcccaggtttagcccaccccggcagatcaggaatttcgaggcttagtgggaagcccggcagtaaaggctggcctgtccagccacctctcgtggcctgccacaggcggtgaggggctctggagagagtgggtttctgctggtgcgtagacactggatgtagcgaaggggccctagatgtctctcttccagttcccccagctcttagcgcctcctcctctgctcccttccccctttaattaattctgggtaagcagcctggctttattgtgcaaggagctggggtctcactgtgggaaaagtcacaccttctgagcagcttctgatgccatgcaaatgaagggaccgtccaggaaacgctttcatctgcacggtctcctgtccagcccctagcccagtaattacccacatttcatttgtttgagagcaattcctgggggaaggcactgagtaggagggagtctggggcagggggtggaatgtcaggctctctgcctgtgatcctggccacaacgtggggccaggctgggccgaggctggtcactggctaaagctaatcctcatgcccccaggttggggaggcctgagtcctccagggtggtggcaatgggattgtgccatgtttacatcttggaagaagaagggagctctccagagagccagacctgccttctagaaagagacacctgaatagggaaaggtgaggtggagggggacagaagggtgggacctggtccttgaggttgcctgcagctttgggaagaggttgactcccagtaggaccccaggccagggacccatgggagctgcgcccagagcactggggctaggccaggctagagcacccatcaacttgtttatctttgagccgctgcctccacagagccctcactaacggggttttacagcccactcaagctgcaactggccaagaatcaatcattaccggcacttagtggtttgatagttaacagcctgaactgaagccaaactggttgttaactgtgataacaactgatttcaaggggttattgccggcccaatatgctcagcccatttatttcggggaaaacaagcagggagctgttgcaaggcccagaaaatggaggaggactgggcttctctcagccaaaaggccccctgccactccgtcccagagttggtgctggctgcgagggcctaggggcgggctgagggctgcttcaaggcttgaccgtgcacacccactgagggcctgcgtgtgagcccagccgacccacacactaggccctctccagccttccctctccccagtcctcacttcaattctcctcctgcctcctccccatgacgccccagaaggacggtctccatgaggaggaacccaggcccagtggccaggcgtctacttgtgcccactcagcagctggggctgcaccctctggctcattccttcctcacctagggctctcagagtcctgccaagtacaaaccagaaatgcctttcctttcaaagccagcaaagagtccacttgggtcttgactagaaagaatgagcaagagttctctctttccacagcaccaggtcccgcctctacccctcccttcctccctcagccaaatggaagcaggtgaggccagggtcaagcatcattctagaatgttgctgctacaaagggcctcaggagttccccaccctccacagatgacaactgcagcccagacgacccatggctagggtaaagctggtgctgtcctagaaattgggtctcccctcccagatccaggctgcctcctgcaggctgcaggtctttccctaattccattcattcattcagtaaatgttgactgagtgcctatgatgtgccaggctctgtcctgggtgaggggacagagcagaaaataagacacaaaaatgcctgttactctggagcccatattctagtgggggaggacacatcagtcagtgacaaccgccacatagaccaacccagattcaaaaaacaccttcttggattcttccgtttctagactctgacatccagccatctcaatattccagagaagaggatgagtgtgaagggtggtggcgattttaaacaaggtgatcaggaagaccttgtggataacttcgggtctgagcacactccatcagggtaagacattcccatacctgggggaggacgatccaggtggagggagcagccactgcaaaggcacactgcattagggggacaggaaggaggccaccacggccgcggcacagctaagggaggatctagggggtgtgcagttgggggttgggggtagtagagaatgacagaaactgaggtgaggtcacagagacagaaggggtgcagagaccttttggcaaagggcagatcctgtggggccattgaaaagacttaagcttgactctggatgagaccgcaaaccactgaggaattttttttttttttttaaacagagtccccctctgtcacccgggctggagtggaatggtgcgatctcggctcactgcaacctctgcctcctgggttcacgcgattctcttgcctcagcctcccaagtagctgggattacaggcatgggattacacacatagctaatttcactgagggttttcaacagtagagtgacatgatctgaattaagttttcccaaggttgctttggctgctgtgttgagactagaaggtagcagggcaagggagaccagttatgaggttaccgcaataatcaggtgagagatagtagtgaatggaagatggtcaggagagagtggggttttggacatttttcgcaagtagagatggcaggatttgctgatggatttggatgtggcttgtgcggaaagagaggagtctaggagtttccatggtttccggcttgagcaacgaaaaagatggaggtgtcattcactgagatgggggagattccaggatgggcagatttggaggggaagggtaggagtttggttttgcacatgttacatctgagctgactacatacgtattcaagaggagatgagtaggcagttgtgtgtgagtctggaattcaggggagaagtctagtgtgaagatagcaatccgggagtgttcagcacacagatgattttcaaagccaggagacaggatggattccttagggagtgagcagagatggagaagaggagccggccaagcctcagtgtgctccaaaaatttagaggacaggtgaagagggagaactggtaaagaagactgagactgtgtggcccacgaggtaggcagggggaaaagcagagagtgctgtggcctgatgacctaggggaaggacagaaggattctgagtccggagctttacctggggctagggaaaagtttcatgtcatcctgcctccctactccttaccccccactcaaccccagggctgagaggaggtggccaaaaaacggggctggtttaacctgggagcatcacccttgcctctcatcagcagttcctgctggcttgccctccagaacatctctccagtccaatccatccaccacccaccctatctacctatctactgctaccaccctgctccaagccatcatcagttcttgtctggtttatggcagtacccacccccaacctcaattgctcttcctggttcctgtcttatccccctacaatccattctgcactcagaagccagaattttcaagacgcaaatctgattgtgttactcccaccatacctacacttgaattcaaactcattttcaggccagcacaagcctctgcatgctctgcctgtggaactccactccttcccgccctccctcttgcctgctgctccctggacacacttcctccagcttctctaacaagcccagggagcctcagagcctttgcacttgctgttcttgccacttggaatgtctttcctccaaatcactggctggccgactgcgtgatgtgggtctctccgctctcactgtctgcctttttttgaggggcggggggatggaatcttgctttgtcgcccaggttggagtgcagtgacatgatcttggctcactgcaacctccgcctcccgggttcaagcgtttctcgtgcctcagcctcctgagtagctaggactacaggcaggcgccaccccacccggctaatttttttttgtacttttattagagacagaagttcaccatgttggtcaggctggtctcaaattccagacttcaaatgatctgcccgcctcagcctcccaaagtgctgggactacaggcaggcgccaccatacccggctaattttttgggttttttttgtacttttattagagacagaatctcaccatgttggtcaggctggtctcgaattccagatcgcaaatgatccgcccgcctcagcctcccaaagtgctgggactacaggcaggtgccaccacgtttggctaattttttttttttttgtatttttagtagagatgaggtttcaccatattggccaggctggtctcaaactcctgacctcaggtgatccacctgcctcggcctcccaaagtgctgggattacaggcgtgagccactgtgcccggcctgtgctttattttctacgttacacttatcactgtctgatcttatcctgtttttttatttacttgcttttggtctactctacccttacctcccaggagagcaggaactttgtttgaatcgctcattgatgaaagcccagtgcctataatggtgcccagcacatggtgggtgttcagcaagcatttgtgcaagcaatccacatagagcaggttctgaggcagctgcggagaaggcaggctgggagtcctctgtatccaggccatgggtcaggcgttaggaaatgtctgaagggcagggagacctgaggatggtcctgggatgggtgacttctcttcgcccatccgacatgcactgcttactgaaaaaggtccaaggctgtctggcacaggccccccatcattttctcaagctgcaacaaatgtctccaaaacctggacaggcagacatctaggcagggcctattggtctggacatctcagaacctccccaaattctgctttcttcatcgccatcaggtttccgtagcaaccagaggacttcacaggagagagtgaaggggaattaagagccagagagagcagaggagagaggaggagtaagtggtagcaagacagatggggagctggcaggaactccagggggatccccaagtcccatgttgccgtggagggttgtgccaataggtccctttggttgcccccttccccatctggatctcttgctgaccctcaagaagtaactgtccatctgggcaggccccagagctgacccctcatgcaaaacccaccccctccctgctggcaggccctgagcgaggctccggctccctctgcggtctagctccctccctagcccctctcttggcaatagtggaactggctgcagcccctgggtgggtttggggagcgtttcctgccattccttccctggccgtgtatggagcagtgggtactgggggaggacagtcagcattctgccctgctgaccaaggtccccaccattggcatttggagatatggccaggtcccccagtcatgaagactcagatgggctgtaggtaagggcctggctggaggtgctcagaacaagggcccaggcctgggcatggcattcagggagcacagagaagcctgaatagagctctggccagtgtgctgcctcgcattcccttgaccccataggtccggaagatgcctggcttgggacccgagagtggcagaatagcaaagcctgcagcagccacagcactgtggtcctgagacccaggccaacttcctagaggactggtcggtgacttcagagggtaggggtggcctgggccaacacccaattccagctgtccctctgcccccatacatgcagccccccgaaaacccagattccaaaaccaccttcttggactcttccctgtttctagcttctgacattcaatcatctcaatatgacaaatatcaccaagtcctgcagaatatttcttcacaaagaactgccccctgtcccatcataaagacacctgggccaccccatgctcttccaacccatctccctgcccagtctctccctgggctttttctataccctccccctcccgccctctgcaaggagcccttggtaatgaagagcaaactcataaaacattcatcctgggtaatacaccatgtaggagctgcctgatctcagttctgatagaacaggccaggtcagcaggacgctggggcttaggcttctgagggtttgggctgacttctctaccttgggctcaagttccagccacttcccttaaggcaggtcttatcttccctggggtgctgggggtgggggctcctgagctgagtggcagagggggttcctgagaagggatgagagcagcccagggagggagggtggctgctaggggtgtccttaaatgaggtgtgatgggtagatggggctctgggaaaaagagcttgacgacaaggtgagccgagtgaccaaatggctaaagccacagctttgtgctgagtgtggggggcggtcagagcctaagcaggtggtgtttaaagttgctattttggcctgggcaaccctggtatgagtgtgtacgagtgtgtgagggatgagagagtctggtatcggtggcaggccctgtgcaagaacccggccccaggaagcaggcccccatctgggcactttcatcagaccagcggggtaggtagacagagggaatggaaagcaaaggggattttccttgttttcactcccccccacccctggcatttgctctgacactgctgtggcatcctccaggcctcagcagagtcagagaaggaagtcagaggaatggccacagggacagccagaaatcagaagtggcttggtgtgagggtgaggggcaagggctttggagtccagcagccctgagcttgaaccctggctctgtcactgcctggtcatttaatcggggcaagtcagctcacctctcccagcccccacttcctcacctgcacaacagggaatcactccaccataggagttgccaggactgagttaaaatgagtgtgtcgagtgtccagcgggtaccttaacaatgcttcctaacagtgatggtggctactgccgggaaggaatctgggagacggggtgggccacctgagccaagtccctgggagcccaggtttgcacagtggcatcatcagagagccaccgaggagcagagtctgtaaggaggctgcttccctggggaaacagctctggcagccgagggcctaaggcagccaggaggctgggaaagaggctgggcaaggtccctcatgcacaccgagactggctggcctctccccatcccttccactcatccaagcaggtgtggctgccaaaggccccggcccctgaaggcctgggagaactgagatggacggatgatgtggtggctgcaaggggatggtttccctgcttatcccgggggccagtgtgcacgttcttgcctctctgtccctcaggcctggctttgcctcccacccctctcactccaaataagcccaggcaaattggcgaaaagtcaagcctgagttgctggagttgggaaaaacagaacaagagagaagcactgagaacacagctgacattcaaggctctgacctttcctctagccaaatgcgaaggctttcctttccctagtgccttgcgttgattcacgaagggtttactgagcacttcctacatgccaggcagtagagtgttgggaagcaatggtgcacaggttggatagatccctgactcctaaggcctcccatgtagcagatggccatggttagacaggccttcctgatgaggagtggggaaggctgagacaggaagagcagggtttgtgtgaagacgctggggtttaggggatgggggcaggaatgctgagtgtgctggccatggctggtttttaggcagctgaaaactggtggaagacaggaccctgggctggttctgctggagttcagctccacttggctcagtcccagttgaattccatgcacactgagtattgaattactggagagagcagggtggatgtggcaaggtccctgccttcaggctggcccatgtattgggcttcccagagtagtgaacctgagtctactacacaacatggcgcaggtaacacgtgggttagcaccaggcactgtgcttgcgtggctcacaagcgccttcacagagaagacagacgagaatggaattgctgtaggatcctccgggaaacttgtcttttctgaaccttaatttcctcatctggaaagtaaaaggtttgaattagattatttgcttaaaaattttttttagcaacagaaacttttttcctgagcaaaacctgtatggaagcctgttttataaaatagacttaaacaatatttgctttggatgcctcagggattggggtcccttcagcttcttgtgcctggtatctcaactgcagcaggtggtaaaggagatgaagggtctgaacccttcagaactctcttgggcatccaggagaggatgatagccaggacctaccagagaagagatgggtgggctc

SEQ ID NO: 991 - DNA, 1076 bp, Homo sapiens
gcggcgcggcgagcacgacgttccacgggacccgcggagccgcgtcgtgatcgccgccggcctcccgcacccgcaccctctccgctcgcgccctgctcagcgcgtcctcccgcggcggcccgcgggacggcgtgacccgccgggctctcggtgccccggggccgcgcgccatgggcagcccccgctccgcgctgagctgcctgctgttgcacttgctggtcctctgcctccaagcccaggaaggcccgggcaggggccctgcgctgggcagggagctcgcttccctgttccgggctggccgggagccccagggtgtctcccaacagcatgtgagggagcagagcctggtgacggatcagctcagccgccgcctcatccggacctaccaactctacagccgcaccagcgggaagcacgtgcaggtcctggccaacaagcgcatcaacgccatggcagaggacggcgaccccttcgcaaagctcatcgtggagacggacacctttggaagcagagttcgagtccgaggagccgagacgggcctctacatctgcatgaacaagaaggggaagctgatcgccaagagcaacggcaaaggcaaggactgcgtcttcacggagattgtgctggagaacaactacacagcgctgcagaatgccaagtacgagggctggtacatggccttcacccgcaagggccggccccgcaagggctccaagacgcggcagcaccagcgtgaggtccacttcatgaagcggctgccccggggccaccacaccaccgagcagagcctgcgcttcgagttcctcaactacccgcccttcacgcgcagcctgcgcggcagccagaggacttgggcccccgagccccgataggtgctgcctggccctccccacaatgccagaccgcagagaggctcatcctgtagggcacccaaaactcaagcaagatgagctgtgcgctgctctgcaggctggggaggtgctgggggagccctgggttccggttgttgatattgtttgctgttgggtttttgctgtttttttttttttttttttttttaaaacaaaagagaggct

SEQ ID NO: 992 - protein, 229 aa, Homo sapiens
MGSPRSALSCLLLHLLVLCLQAQEGPGRGPALGRELASLFRAGREPQGVSQQHVREQSLVTDQLSRRLIRTYQKRTSGKHVQVLANKRINAMAEDGDPFAKLIVETDTFGSRVRVRGAETGICMNKKGKLIAKSNGKGKDCVFTEIVLENNYTALQNAKYEGWYMAFTRKGRPRKGSKTRQHQREVHFMKRLPRGHHTTEQSLRFEFLNYPPFTRSLRGSQRTWAPEPR

SEQ ID NO: 993 - DNA, 989 bp, Homo sapiens
gcggcgcggcgagcacgacgttccacgggacccgcggagccgcgtcgtgatcgccgccggcctcccgcacccgcaccctctccgctcgcgccctgctcagcgcgtcctcccgcggcggcccgcgggacggcgtgacccgccgggctctcggtgccccggggccgcgcgccatgggcagcccccgctccgcgctgagctgcctgctgttgcacttgctggtcctctgcctccaagcccagcatgtgagggagcagagcctggtgacggatcagctcagccgccgcctcatccggacctaccaactctacagccgcaccagcgggaagcacgtgcaggtcctggccaacaagcgcatcaacgccatggcagaggacggcgaccccttcgcaaagctcatcgtggagacggacacctttggaagcagagttcgagtccgaggagccgagacgggcctctacatctgcatgaacaagaaggggaagctgatcgccaagagcaacggcaaaggcaaggactgcgtcttcacggagattgtgctggagaacaactacacagcgctgcagaatgccaagtacgagggctggtacatggccttcacccgcaagggccggccccgcaagggctccaagacgcggcagcaccagcgtgaggtccacttcatgaagcggctgccccggggccaccacaccaccgagcagagcctgcgcttcgagttcctcaactacccgcccttcacgcgcagcctgcgcggcagccagaggacttgggcccccgagccccgataggtgctgcctggccctccccacaatgccagaccgcagagaggctcatcctgtagggcacccaaaactcaagcaagatgagctgtgcgctgctctgcaggctggggaggtgctgggggagccctgggttccggttgttgatattgtttgctgttgggtttttgctgtttttttttttttttttttttttaaaacaaaagagaggct

SEQ ID NO: 994 - protein, 200 aa, Homo sapiens
MGSPRSALSCLLLHLLVLCLQAQHVREQSLVTDQLSRRLIRTYQKRTSGKHVQVLANKRINAMAEDGDPFAKLIVETDTFGSRVRVRGAETGICMNKKGKLIAKSNGKGKDCVFTEIVLENNYTALQNAKYEGWYMAFTRKGRPRKGSKTRQHQREVHFMKRLPRGHHTTEQSLRFEFLNYPPFTRSLRGSQRTWAPEPR

SEQ ID NO: 995 - DNA, 1022 bp, Homo sapiens
gcggcgcggcgagcacgacgttccacgggacccgcggagccgcgtcgtgatcgccgccggcctcccgcacccgcaccctctccgctcgcgccctgctcagcgcgtcctcccgcggcggcccgcgggacggcgtgacccgccgggctctcggtgccccggggccgcgcgccatgggcagcccccgctccgcgctgagctgcctgctgttgcacttgctggtcctctgcctccaagcccaggtaactgttcagtcctcacctaattttacacagcatgtgagggagcagagcctggtgacggatcagctcagccgccgcctcatccggacctaccaactctacagccgcaccagcgggaagcacgtgcaggtcctggccaacaagcgcatcaacgccatggcagaggacggcgaccccttcgcaaagctcatcgtggagacggacacctttggaagcagagttcgagtccgaggagccgagacgggcctctacatctgcatgaacaagaaggggaagctgatcgccaagagcaacggcaaaggcaaggactgcgtcttcacggagattgtgctggagaacaactacacagcgctgcagaatgccaagtacgagggctggtacatggccttcacccgcaagggccggccccgcaagggctccaagacgcggcagcaccagcgtgaggtccacttcatgaagcggctgccccggggccaccacaccaccgagcagagcctgcgcttcgagttcctcaactacccgcccttcacgcgcagcctgcgcggcagccagaggacttgggcccccgagccccgataggtgctgcctggccctccccacaatgccagaccgcagagaggctcatcctgtagggcacccaaaactcaagcaagatgagctgtgcgctgctctgcaggctggggaggtgctgggggagccctgggttccggttgttgatattgtttgctgttgggtttttgctgtttttttttttttttttttttttaaaacaaaagagaggct

SEQ ID NO: 996 - protein, 211 aa, Homo sapiens
MGSPRSALSCLLLHLLVLCLQAQVTVQSSPNFTQHVREQSLVTDQLSRRLIRTYQKRTSGKHVQVLANKRINAMAEDGDPFAKLIVETDTFGSRVRVRGAETGICMNKKGKLIAKSNGKGKDCVFTEIVLENNYTALQNAKYEGWYMAFTRKGRPRKGSKTRQHQREVHFMKRLPRGHHTTEQSLRFEFLNYPPFTRSLRGSQRTWAPEPR

SEQ ID NO: 997 - DNA, 1109 bp, Homo sapiens
gcggcgcggcgagcacgacgttccacgggacccgcggagccgcgtcgtgatcgccgccggcctcccgcacccgcaccctctccgctcgcgccctgctcagcgcgtcctcccgcggcggcccgcgggacggcgtgacccgccgggctctcggtgccccggggccgcgcgccatgggcagcccccgctccgcgctgagctgcctgctgttgcacttgctggtcctctgcctccaagcccaggaaggcccgggcaggggccctgcgctgggcagggagctcgcttccctgttccgggctggccgggagccccagggtgtctcccaacaggtaactgttcagtcctcacctaattttacacagcatgtgagggagcagagcctggtgacggatcagctcagccgccgcctcatccggacctaccaactctacagccgcaccagcgggaagcacgtgcaggtcctggccaacaagcgcatcaacgccatggcagaggacggcgaccccttcgcaaagctcatcgtggagacggacacctttggaagcagagttcgagtccgaggagccgagacgggcctctacatctgcatgaacaagaaggggaagctgatcgccaagagcaacggcaaaggcaaggactgcgtcttcacggagattgtgctggagaacaactacacagcgctgcagaatgccaagtacgagggctggtacatggccttcacccgcaagggccggccccgcaagggctccaagacgcggcagcaccagcgtgaggtccacttcatgaagcggctgccccggggccaccacaccaccgagcagagcctgcgcttcgagttcctcaactacccgcccttcacgcgcagcctgcgcggcagccagaggacttgggcccccgagccccgataggtgctgcctggccctccccacaatgccagaccgcagagaggctcatcctgtagggcacccaaaactcaagcaagatgagctgtgcgctgctctgcaggctggggaggtgctgggggagccctgggttccggttgttgatattgtttgctgttgggtttttgctgtttttttttttttttttttttttaaaacaaaagagaggct

SEQ ID NO: 998 - protein, 240 aa, Homo sapiens
MGSPRSALSCLLLHLLVLCLQAQEGPGRGPALGRELASLFRAGREPQGVSQQVTVQSSPNFTQHVREQSLVTDQLSRRLIRTYQKRTSGKHVQVLANKRINAMAEDGDPFAKLIVETDTFGSRVRVRGAETGICMNKKGKLIAKSNGKGKDCVFTEIVLENNYTALQNAKYEGWYMAFTRKGRPRKGSKTRQHQREVHFMKRLPRGHHTTEQSLRFEFLNYPPFTRSLRGSQRTWAPEPR

SEQ ID NO: 999 - DNA, 24281 bp, Mus musculus
  misc_feature (1)...(24281): n = A,T,C or G
ttcaccggtaatgaatcaaatcctcctggggcagggctggcagcctgggggtgaattggaggctgaggaagagcctctgtggacccagtctaccaaggatcttgggtcctggctgttgagtcctggtatacacaggagagtgcacactatagtttccatgttgggagggtgggcaggacacctatctcccatggatgagtacctctacacagttggcacagtgcggtgggtcagttagtaaagtgcttgctgcacaagcatgagaatctgagttcaaaccccaagtatagatctctacatccaggcaaggccgagcatccctgaggaggcagaaactggaggatctccatgcctctctagtcaactgacataactgaatctttgagctccaaattcagtgagagactctagctctccagtgacaagtaattgggaaggagactatatgttgacttctggcctccacatgtgtaagcatacaacatgcataagtacctaagcacacatgcacacacatgggcatccatactcagagagaggaagacagaatgacccattcttaggcagttcagcgcttgttttcctcatctgtactgtagggatgctctacttcagtggggacacagtgtttgccttcacagcacacaatgagcttttagatagcatggaccttgccaaccctaggcccctgacaaccacctagtcatagggattctagctatcgagagttgaagtcaggcaggtcacactgggcagatgcaggtgctgagtgggctcttagcaagctgtcctggaggcaggaagaaagaaagggcagggtgtctggaggaagctcatgcaagaggctcatagagagaaagacggtccctatccagggcatcctcccaggtgaactttgcctgctcctgcctggcactcagggcctggggaaaaacaaatgtaccctcaccaaacagggatgcctctgatttggtggctttctggtaaggtccccatcccaggagcttgtgacagtctcatgccaggacagagagagcttatataggtctgagtattataagaaggtatctgagtatattatattggtatctgagtataccaataccttccttcctcagctgcatgagggaatctggggagccccaaagacagacagcttaacccacagctcctgggcaggcacaacgtgagtgggcagaagtctccataacagatcccatttgtcagcagtgggagcttgtcttgataaggttaattgaggtggtgtcctggttagtttttattatcaacttgacacaatctgaagtcagctggggagagagcacctcagtagaaggtttgcttccatcggtttggccatgtctgtgagggtctgtcctaattagtgattgaggtgggaggcccactgtagggggtaggtgtgcccaggctttgtaaaaaagcccagctgaaggtggggtggtgactgcacatgcttttaatcccagcacttgggaggcagaggcagtcggatttctgagttggagagcagcctggtcgacagagtgagtttcagaacagccaaagtacacatctggagaagacagacagacagatagacagacagaaggcaggtgagaatgaccctgacaataaacagcatttctccagtctctgcttccaggtttcagtcctgacctccctcgcggatgtactgttacctggaagtctcagcagaaataattcttcccacaagctgcttttggctgtatttaccatagcagcagaaaagacactgatcaatgaaaagatgggcttgtgagcggagaaggtccccatatgtggacatgaaaagaaataggagataccaaatcaaggggggcagcctcaccccagctggnnnnnnnnnnnnnnnnnnnnggaagataggcctagggtcacatggaaggccctgctggcttcagcaggtggccttgggacttgttcagtacagaatctcacctaaggtcctttaacaggccttcagagatgtcatccttgcaatacctgtggtctctcaatggagtactcacttttctcacctctgtaaggaaggaagggagctctacttggctcatagtctgagggcacagtccattgtggtttcaagcgattgaaggagctgatcacatcttgtccacagtcaggaagcagaaagatgaacgttgactctcagctctccttctccctttagttctatggaggtctccagcccatgaaacggttccagcccacattcagggtctttctccctcagttaacctttctggaaactccctcacagacttacgtagaagtgagtctcccaggctactccaaaccctgaccagatgacagtgaagatggaccagctggctcacttagggatatggtcagctcagctggagctggagagtctctcaagaacctcaactctgggctttaaagtccagctcaaatgaagacaggtcagctctgtctgggctctgtggaactcagtacaaacactctgagagccttaggtaagggctagctccaccaccaggttactgacaacctgtgggtggttataggagcgagaggagggctagagaggggagtgtgctctttccttgatttaagaaggtcaagtttacaaaaggccctatgtaggtaaattctggaaggcaaacaaatgcatgacagtagtgacaggcactgatagctgctggggtcaggagagaaggggtggggttaacagattgagaggtggagagaggattaaacaagtctctcataggggctgtatctatgcccagttggtgcagtacatggccaggtcctgggttggatcctcaacactgcatcactgtggggcatgattgtgcctttaatatcagcagcagaggcaggggaataagaagttcaaggtgggtcatccttagctacacagtgaagccaccctaggctcatgaaatcttgcctcaaaaacagaaacaaaagaaagaaagaaaggaagaaaggaaggtaggaaggaaggaaggaaggaaggaaggaaggaagaaagaaagaaagaaagaaagaaagaaagaaagaaagaaagagagagagagagaggaagaaggaaagaaagagaaggaaagaaagaaagagagaaagaaagaaaggaaggaaggaaggaaggaaggaaggaagaaaggaaggaagagggcaggcagaggcaggcgaatttctgagttcaaggccagccaggtccacaaagtgagttccaggaaagccagggctatacagagaaaccctgtctcaaaaaaaaaaaaaaaaaaaaaaaaaaaaaaaaaaaaaaaacaaaaaacaaaaaagaaagaaagaaaagaaaagaaaaaagaaagaagaaaggaaggaagagagaaagaaaggaagaaggagagagagaatattataaatgggccagtggtgtcggctgcagattgctgaacagttgggactatctatgcagcaacatgaacagcatgtgcaagataccttacacctcagcaaagttgctgtctgtatagaaaataaatatgcttgtctgtatggaagacactgcttgaggggtgcattgtccatgggtgcccgagtgtccccatccctggggctgagcacccagcaggtgggtattaagctataaaacttgggctttctcaaggtttggaaaaggctgagttgaaagtcaaaagctatcagcaaaatgcttctgggaacacaagggtgggggcccatcctaacagaggccacaagcgcctggcacaatgcagctaacattgacatctcagagaacataatcctgggaacagtggaacagagaccaggccctatagcccagcccttctcttctgctttttctgcaactccacgttggagctatgtctcccaggatttcctatgaatcactcacaaatgagaggagagaacggaaaggcctgtgatctggcagggatgcttgggcagacagtcatcggccctaatgtcccagtaggacaggcaagggaagggttaaaggccactgcagggggcctgtgggggtgacatcagccaatttgtagaggtcaggaggccactcctcctcccaggtgagatcaaatgctgtagggacaaagggacaaaagggaaggagattgacagggatgctctgggggactgcaccccaagggaacaccccacccccaccctgagaacaagtatggcatggggtcaaaggtcaggttgtttggcttggattatggctttcctttttacctggagagcaaagcaaggcttggaggcttccattcagacctagacctgctggggaaagaagctttgtgagttccagggctagggctagaagcagggtggcagctgccattgtgacccccagaaaggccacagatacctctgaggcaccgcagttgcctccagcctaaggacctcttgagctcagcccattgccacagaatccagggctcaaaggatttgagatttgacagagaacaatgtcagccaattagctaccttgtgcatggagcagccatgtcccgggtggccccaggttccctctggaagtcaagtgcagctttgcttatttgtttaagccatccaccatccagttattagatctgaattcatcttttagggtcagctttgttgtagatttaggatgtggccccagggcaaggtactctgagaaacccttaccccatcccagacgtggtcttctatcatgtccagctggggaagggagaagtgtgtgtgtgtgtgtgtgtctctgtctgtctgtctgtctgtctgtgcgcactttggaacccagagtcttgattctctctgggactgggattgtgaacagtttgcgagccaaccaatatcaaccctagaaacctaacttggatctttggggagaagtgtgcatgctcttcccttccaagccacctctccagcccaaacttcacattgttctaagactgggtctcttactcctatttcccccacccaccacccaccacccacccccgcagccaccgccacagttctggagttctggagatcagctttgatgtacggctgctgagaattgaacttgggtcttcagacttgtgccacgagcacttacttactgagccatccatctccccaggccccggaagagctgctcttgtttgtactagatcatttgcttagaaaaatctccatgaagaccccaggctcagtttctgctcccaggagaaagtcctgctctctagtctgccctgagggccaaacacgggactcttggtgcacctcgtccagttttgtgcagtgctttagcagggccagagagcccatctagtggccagggcagaaccctgtccctggctgcatctggtcttcagctcaggaatgtgagattgtcttgttagtttttgaagtaacaacagttcctgcctagctccaagagtggcgctccctcccactttttgttctgtttcaggtttttttccctgagttgtttgtttgtttggtttggttttggtgttttgttttattttgttggctttttggtttggggggtttatttttggttgggggggttgtttgtttgtttttgtggttttgagatggggtctcaaatgtagcctggctgtttcactctatagatctgatgaactagatgaccttgaactcctggctagtcacctgcctcagctttctgagttctgggattaaaggtgtgtgtcaccacacctagcaggctccacctttttcttacaccctgaccctggagtccatgctccttgtcttgattttcttccagatcctatgaatccactctgtgtgttaacaccaaggaccacagcccattggccagactctcccaaggcttctccgtcgttacagtttaccacagttctgaggcctgtcttttttttttttctttcctgtgtgaggacagactcccttcctccatgtagccttagcttacctagaagttgcaatatagtccaggctcgcctcaaactcacagagatatctgtctacatcccaagtgctaggagtagaggcctgtgctaccacgaccatttccattaacaggtaaggacactgaggcctgaagggttcgtaggcccactaccacttgagattcccatgttgcagaatctcgactgggtttgtgtccaagttcagctggccctcagaatttcactaaggtaggctctcaacagggtggacatctgtatgcaagagtttctgcagctgtggtcctggctgacattggcctgttcctcagttggcatccacacactctcttggcccagggtcttcctctgggccctatccatgggcccttctccgcaccctccagttggaaagagctcttccccttactccaggccccagccttggtgttgctgggcttgcatgctcttgttttacaaccctagcctgcttccttcagccctctcttacccagagaggttttcctgcacttctaaccacctgccttcttggccttggaagcccttgctcccaccctctctcaggctgtgaatggacaggttgcttcagatgctgccctgccctcccctcctcacacggagggtgcctgagtgtgtgcatcctgggcaagcactgggcctccattgtagtctccctggcctgagctgagcctccaccttcccccttccatacagagcagagcctagtacagtgtggagggggtggaggggcataatatggtaatggagaccctgttaattgcttccaaatggccaattgcagccgtttgactaattggtctcttccagctccacctccctgcctggacacctccagacctggccaaagcctgcttaacactgctcccagggcctctgctccggaagttccctcctctgatctctggttcttgggcccacctccagcctttacacctacagagaaactcaggagaggagaggcaagggagagcaccctgtgatatccctgacttgtggccccaaactcattcttgactccaccaccaaaagcaggggaaagagacccattatgcttgctgggtgctgacctggggccactgtacctctgaaatcctaaaagcagcccaaaccaagctcagagaggtgagctaactggctcagcagcacacagatggggggtgggggtgagggccagtctactggagtcacctgtcatctggaggcatctgccctttgtcctcagtaggctaggactgacttaagcatccttcatttgagtccctgggcctttgcctctggtactgcatgggtgctactctaaagcccaggctccagttcagtggagcctttcctgcttgttgtggggaccagccagacaccctccacaggtgcagtggtgcaacatgggagatgaggaaggaccacaccagggtgcaggtggactttttcagccagcctaggaccatgaatggcaatggtgtgtcttcatacacagtacaggtaggttctaagtcccatccacacccacatgaggtagagtgaactctccccaagttcaacggctacatcctgtgggctcttcatcccacatgttccagtagctctgagtagggaagaatgtccctgtccctatggaacttgagcctacatgtgcccaagaacagtaggcgctgctagatagtgactgtatctcttccccaacatgcttgagaaaccttggggtgggttctgccccagatgtagaaatggcagtttgggcaacaggtcagaaggagggtctcattgcccaccctcacagtggcatacttcctccaacaaggccacagctcctaatagtgcttttccctgtggcaagcatattcaaaccaccacagtgcgtgtgttttaaaatttatttttatgtgtacggataccttttgcctgcatgtaggtgtttataccagatatgtgcctggtgtctccctaggccagaagatagtgtcagatctcctagaacaggagctacagacatttgagagccaccatgtgggtcctgggaactgaacccatgtcctctacaagaacagccagtgcttttaaccaatgggccatctctccagtccctttcttagatttgtttgtttttaagacaggatctcaaggccgaggccagcttcagatctactttgtagccttgaccccaggattctgcttccacatctccagggctgacatgcagcaggcctgttctagcacacctggcttctgcacttctcttggccaggcacaggaaggtaactggatccagatgccctctggattcatttgtgatatcttaggagcttaggttggtcttcgagacacagggctgtcccctgtaaagcaggttccatcagtgactccagggttttagcagttcagtggcgtagttttcagactgcttaagatttctcaggggctaggcgtggggcagagaccctgcagaccctggctagaacagaggccctgggagacagttgagggtgctcagctgtggaggacatgtgcattcagcatgctgaagagggcctgctaccctaaatgaggttctcagggtggaaaatgtcccagtgtgtgctagtaatagcttctgtatcgtggaggtccccccaccccaacacttctcaggatctcacatcaacaagggcttcccgccagactcctcccaagagctcaggatcaacttaggaaccaatgttgtgacccatgccacagggtcctgaggcatgcctgagggtagttgctggccaggggaccgttggaagcacaggatgtggggtgggaccttttctgataccccaggaagtccttcttctttgaggcccttggcagataaggaactgaggtcaagagctcagggtccagggagctattccctgaacctggactccccctcagcctgccaggtgggcatgcgggcgccattgtgggatcttctttcccttcggttctgttgccctctgtatctccacattcctccccctctccactgctctcctccttctttctcttcagccaaatctgtcatctgcctcacccacctttatttctgtctctgcctagatttcctgggctctaaggctctgtgactctattgtctctgctcctatctgtgcagtcccctctctggaccaccgctgggacagaccactcccacttaaggtgtgcaaacttcctgtgctaccttctggtcagttaggtagcttcgagcttagagtccctgggccgttgggccacaagactggacgcctgaggaccgctctgcggtgtgagaagcgacctgcacgaacccaaccccgggctccccacgcaccgccctccgcaattgctctggattaggcgccgcctttcatgagcgtttgtcagctagacttccccgcaagttgtttgcgcagacatcagtcatccacagtcccattgtgcacccaggattgatgtaaggcgggagggggtgacagggcctgggggcggttgcctttaggcctcgctctataattttccgaggcataattggtctgggggcgggggcggggcggggacctttcagaggcgggagggggctcagggcgcacggcggaggagcggcggcccgacggctctggcccgggagctgtgcgcaggcgacgcccggcctgagtcccgcgcccccgccagggaccacggccgccttttgttgtcaagcgccctttcttcagaactgtgttcggcaaagaaacacgacccccattcctgggtgaaaattcaaagtcttctttctccatctccctctcctctttcttgtcttctctccactatctcttcccctctcctgctccacccgtccttatctccatctccacctctctccacctctccctgtctcccctcctcttcctccctcccctgtctcccacctcttcccggtccccctctccctcccttcctctcctagccacagtcgagccggcctggcgcgcgggcgtgtgctcccagcgccgcgccttcgtgagacccgcgctggcgcagcagccgctgcgggcgggcgcgatgccgggatgggcctgatctggcttctgctgctcagcttgctggaacccagctggccaactacggggcccgggacgcgactacgacgcgatgcgggcggccgtggtggcgtttacgagcacctcggcggggcgccacggcgccgcaagctctactgcgctaccaagtaccacctccagctgcacccaagcggccgcgtgaacggcagccttgagaacagcgcctatagtgagtgttcaggtccggacagggaggggagggtggcggaagagaccggagggctcggtcccctgccgccacgtcctagatagaggcagagctgaggtcagtccgaagacgccgccgcggtcccagctaccgaactcagcaagctgccccgcccgtcccgctcccccaggagctgcgcgggaggcgaccccggttctgacacgtttctatttctcaatgaaaagccgttggacaaggatttatcgccctctttattgttttgacgaccccggggtgcatggccagtccctttcgttctctttgctctcagccgatgcgcggaggacactccactaggcagagctcggtttccgcaacgcggcatctgacgacaggcttgtcccgcgtcctgcgccctgcaagagagcgcgacaggacaaacaggcgtcccctcgtgttccggatgctgctgacacgcacccacagcccgcagctcgatcatacccagggccagttcccgagtattgcagggtttggcttcttcagttgggtacccacgagcggagctggaccaggagcgttgctcgctgcgtgggagggaggccgcgcaaaactcaccgcgcccggggcgcaggaagccgagcggggggcgcgggcggcgggggggaaccgcagcttcctcctgcaaagccgcagccccgcgggggcgtcctggggactagaccctgtcgggcctggagcgcggggctcctcatgcgcaccactccccatttgctggatcccgggaggtcccagatgtagaggaggggcacattcgctgccacctaggggcactcagtctggtgctcgtctggcgccagctgtagaggcctcatcctgcacccctccaaaccgtggctagggcagaatctcaactgagtccggtaatctggaccatgctgggtcccagcggccgctccctagaaagggagtgaatcctcgacccactatcccgggggtctttgacctccgctcccctcccaaaagcactatactgttcacggcaaaggctggtagaagtttggttgtttttgtattttgtttgttttgtgtgccacagtgagtgtgtggaggtcattgagccactagctggagtctggtctctacttccatcatgtgggttcctcgatcaaactctggtgatcagtctctgcaacttctctgtcatctgcgctgagagattgttaacttttgtacctactcttaggcctgggtgagccctgtcacctttcctcagcacccaggcccttttctgtggcaggctacctctcagcacacatctttggatcacttgctgccagtggggggctgggctgcaaaccctggcttccctaagagtcttggccacctccccttctgggtctccatctgctctggggtttggatctcccaaaccattatgtgtggcttaagttacttgatgcttgcgagaccgaggcattcacaagattgcacaaaatacagactgggtcgatctgtccaggttgcacccaaggtgcatggcaggggcagaacattcccatcatgtcttctcctgaggttaggattaaggtctcccgcacagtggcaggatgcccctttccttaccacctgctcaatgttttcttcctaccaggacttccaaccagacctgtcccagcttcctgagcctagagggggaagctggctcaggctgaggttctgcttaggttgagacgttgatggactcttcctgactctttccaggcatcctggagattactgcggtggaagtgggcgtggtggccatcaaagggctcttttctgggcggtacctggccatgaacaagagaggacggctgtatgcttcggtgagttccattactggtgggcaggtgctgatggaataaccatctggcttgagcatctgattgggggacagaagaggacatgagagatagacttcttagcccccaggtcatgccagactcaagctcgtccagatccctcctgggcttctgagtgcctgcccaacacagactttaggtgctcaggaaaatgccctttccacctgtctgaagtcagtctctttctctaaacgtcgaaatgatggagacaggaagtgagcatggcagcagggtcccaaacctccatggtgtgagtagccaccatagctgcagttgagggagagcaggtcatggcaaacctgccctgcatctgtggaaggaggaaggctggtgcttggcctgttcttctcagggtgggaaggcaacagttgtctggcttagcaggagactggagaaatggctgtcagtctagtactggttgcacagcatgagaacctgagggtctctagcacccatgtatcaaagccaggataaagtgtggtcatcccagggcagggggaggaggcaggatggcttttggggttccccagctaacctagctgaattggcctccacgctcctggatgggcaacaggaggagctcaggggtctccattctcctgacctgaggtgtgacagaaacacactcttgcctgagtgatgggtcttagctgctgcagagctgggctggtgatttccctgactcttagactctgtgtcctgacccactctagtgagtgaactcagctgactttacaatgaacctgactatcccccagaaactctgccttagggtgaggttttgggtacactcaatgacagatctgcccacagggaagaacatgatggggggcatgcctgtgctctcttggcttcaggggagcagggatgatgaggtcaggggtcccactggttggagtagaactttccagataacccatcagggatggtcctacagacttgcagacaggtcccagcttctttcagctgctggctggtgtctaaggcctcttcctgtagacctgtccctgggtgtcctgggtgcgtaatgtggctgcctatgtgctatatccatgggacagtgacattccatagtcaatccccacctcctggaagtcttcgaccacaactgcccacagctccctctactgtaaaagcaggctgaatgaagtcagctcatccttcatgacagtctgtccattcattgtctatcatccatccatccatctatccacccatctactcagcctgccatctatccacccacctacacactcagtcatctacccacacctccatctatacactcgttcatacgtcccaacctatcatccatccatctatccacccatgtaccatccttacacccaattatctaaccactgatacatttatttgtctatccacctacacagtcactcacccacccagcaacatacctagctacccatccacctattacatccacctgcctgttcagccactcaccaacacatccattcatccaccctctgacacaccagctagccagccacctccagcatgctctgtctaccacataccaagcactgagccaagtgcaaggctgcagcaaaaggggatagtggaagcaagtcacttggagcagggcacagacttggacaggttggatagccaagctgcctagacagtggcaggtgtggactgctggtccaggcagccttaggagaaagggaggcattggggagatgtagccccattgacatcatggctccaaggctgttgactgtggcttctgtctcacaggatcactacaacgcagagtgtgagtttgtggaacggatccatgagctgggctacaatacatatgcttcccgcctgtaccgcacagggtccagtgggccaggagctcaacggcaacctggtgcccagagaccttggtacgtgtcggtgaatggcaagggtcggccacgcaggggcttcaagacccgccgcacacaaaagtcctctctcttcctgccccgagtgctgggccacaaggaccatgagatggtgcggctgctgcagagtagccagccacgagccccaggagagggcagccagcccaggcagcggaggcagaagaagcagagcccaagtgatcatggcaagatggagactttgtctaccagggccactccaagcacccagctgcatacaggtggactggctgtggcctgagtggccacctggaaagccctctgagaccaactccagtgggcacccaagattcacttggagccctggcctccccacccttgtctttgggctggctgcttgggggaccaagaacttgcatgccttttacagctttcaaagagcaagtgccagctgctaaggggcttgagtcagagactctggaagactcgaagttcaagatgtatgtggagttacatgagagggaattcttattacaggggtcatcctaatcccggatggagcccagccaatggcagtcagtcctggcaacctgaggcagtggaccgtggagggggctgtgattcacacattaaaggtgtctttctgtcttgctatttaacagctgggatacagacttagcatgccctgaggctccaactgagatattctgtggagggtgaagaaggcagtgatctgcgggcttccctgcaaggtgtcagactggctgtgtcctgagaaagggctgaggtgctacatgcaagcatgtgtttgtgggttcttatgtctgcaaatacccacaagcatgtgtgtagaagggtgttggtgtattcctgagaacatgtgtgtgtgaagcatgcacacaaactggccctgaacttttgacttccaggcctctgcctctctgcgcgcacacacacactcgcactcctgtatatgaagcgtatatgtgtttctctgggaactgtttttatcaggtgaagtacttcctttgttcttgctacccacctccagggctccaggatctccagacagccaaccctaagacaggcccagcttcctctgtatctctgtgatgagaaccttggcatagagctgccctcaccctcgggatagggcttatgttccccggaacgagccaggcacctcaacagctcctggggaggaataggggactgggaagtgtctgttggctaatatttaaaactgacccaacaggagtctgggccacttcggggatctgtcccttgcccttagtcagaggccagtggcttcacactgggcgtgggttgggagggaggcaggaacattcatgtcctgctcagttcctatctaccatttgaccctggttgacacaacacaaccttttctgaaaggttttgctagatgtgagtagcttacagaaggccatgcaggctcagggaaggcaccacgataagccattagtgtcctgatgaagaaatttggctgtaggctgggacacacacacgcacacaagccccatggggaggcacatagacattcagagcattccaccagtgagattccatgtggacctgggggctaagtcagggtgaagcttccacagctaagtggctggaggctgccctaaaagctcaggaggcaccgcaagcaagccttgaaaaaccttacccaccagcttgaccttagacttctggccttcaggctgtgacaatacattcctgctgtttaaagaaccatatggttggtgatgttttgtttgtttctggttcttttgtgttggtgttttttgtttgcggggtgtgtgtgtgtgtgtgtgtgtgtgtgtgtgtgtgtgtgtgtgtgttgcagtgctagagataagatctgaggtctagaacataccacacaggccattgaaccacaccccaaggcagctgtgacatttttgccagcttccctagcaccatagtaccaggtattgggtaaccctaaaaagaagaccccgtaatgcaggaaggtggggggggggagcaggtcaactcccagactcaaagtcatccaaggaaaattctggatctttgtgagttcaaggctagcctggcctatatagagaattccagaccttccagggttctgttgagagactctatcttaattttttaaaaaaatctaaggaggaaagaggaagatactagcctggtaccactggcctccatgtacacacacgtgagcacacacacacacacacacacataaatgcatataccacacacacagggagaaagaaaaagggagggaagagacagagggagagagagagagaagagagagagaattttagaatttcaatctctccaagatgggcatcagcacctctttggcccctgcccttttaccttatgacccccgacccttgctcaccttcaccactagagccatgtttgttcccaaactcctttgcacgtgccaagggcactattcttccctctgtttgtccccagattacccacttctcaacattcacttctgagtgcactgggctgtttaatcactgagtccctggaacttctgctctgtgcctccaagcctggagcttgtgacatgattgaaatacttactcataaacagtgggggtaaaggtgccacagactaggctactgcttgctgtcactagaggtgagaaaacctgctcagagagtggtatgtggttttcctgaggccacacagcccgtgaaagacctactgggcaagatctggggactctaaagcctgtcctgctacctgcatggtgccaggaggaagacaagggagcagagcctagtggcaagagcctgtggctgcgtgtgctgctgtaaactcccaatcctaacgctggggtaaaaggcagagacagggggctggtgagatggctcagtgggtaagagcacccgactgctctcccgaaggtccggagttcaaatcccagcaaccacatggtggctcacaaccatctgtaacaagatctgactccctcttctggagtgtctgaagacagctacagtgtacttacatataataaataaataaatctttaaaaaaaaaaaaaaggcagagacaggaggatctttgtgagttcaaggctaatctggcctacatagtgaggctcaggttagctggggctgtatagaaagaccctgtttcaaaaacaaaacaggagaggaaaacaaacaaacaaacatgagctgcatgagactccgaggtcaccccaaaactgtgccaggagacaagatacaaatataaacaccagcagtgcctacaacagggaaccgggagactgtaagagggtggggccctttccaggtgaagaaaatgttctagaaagggcatcagtgacagggcagcatgctccatataaactcatcaaggtcacaacttagacagagggactgtgcaggctgttttgatggggacctgatgctgggactcgagcccaggttggtctgaaacttttggccatcctcctgcctccaactccagagtatcaggannnnnnnnnnnnnnnnnnnnnnnnnnnnnnnnnnnnnnnnnnnnnnnnnnnnnnnnnnnnnnnnnnnnnnnnnnnnnnnnnnnnnnnnnnnnnnnnnnnnnnnnnnnnnnnnnnnnnnnnnnnnnnnnnnnnnnnnnnnnnnnnnnnnnnnnnnnnnnnnnnnnnnnnnnnnnnnnnnnnnnnnnnnnnnnnnnnnnnnnnnnnnnnnnnnnnnnnnnnnnnnnnnnnnnnnnnnnnnnnnnnnnnnnnnnnnnnnnnnnnnnnnnnnnnnnnnnnnnnnnnnnnnnnnnnnnnnnnnnnnnnnnnnnnnnnnnnnnnnnnnnnnnnnnnnnnnnnnnnnnnnnnnnnnnnnnnnnnnnnnnnnnnnnnnnnnnnnnnnnnnnnnnnnnnnnnnnnnnnnnnnnnnnnnnnnnnnnnnnnnnnnnnnnnnnnnnnnnnnnnnnnnnnnnnnnnnnnnnnnnnnnnnnnnnnnnnnnnnnnnnnnnnnnnnnnnnnnnnnnnnnnnnnnnnnnnnnnnnnnnnnnnnnnnnnnnnnnnnnnnnnnnnnnnnnnnnnnnnnnnnnnnnnnnnnnnnnnnnnnnnnnnnnnnnnnnnnnnnnnnnnnnnnnnnnnnnnnnnnnnnnnnnnnnnnnnnnnnnnnnnnnnnnnnnnnnnnnnnnnnnnnnnnnnnnnnnnnnnnnnnnnnnnnnnnnnnnnnnnnnnnnnnnnnnnnnnnnnnnnnnnnnnnnnnnnnnnnnnnnnnnnnnnnnnnnnnnnnnnnnnnnnnnnnnnnnnnnnnnnnnnnnnnnnnnnnnnnnnnnnnnnnnnnnnnnnnnnnnnnnnnnnnnnnnnnnnnnnnnnnnnnnnnnnnnnnnnnnnnnnnnnnnnnnnnnnnnnnnnnnnnnnnnnnnnnnnnnnnnnnnnnnnnnnnnnnnnnnnnnnnnnnnnnnnnnnnnnnnnnnnnnnnnnnnnnnnnnnnnnnnnnnnnnnnnnnnnnnnnnnnnnnnnnnnnnnnnnnnnnnnnnnnnnnnnnnnnnnnnnnnnnnnnnnnnnnnnnnnnnnnnnnnnnnnnnnnnnnnnnnnnnnnnnnnnnnnnnnnnnnnnnnnnnnnnnnnnnnnnactgtaagaagggtggggccctttccaggtgaagaaaatgttctagaaagggcatcagtgacagggcagcatgctccatataaactcatcaaggtcacaacttagacagagggactgtgcaggctgttttgatggggacctgatgctgggactcgagcccaggttggtctgaaacttttggccatcctcctgcctccaactccagagtatcaggatgataggggtgagccctcatgcctggccaagttgagcgcttccagagttgcatctggataggtctgatgtaattgtagggactcccaggtcttcctgtgacagttctgtgggtcaggaccaccccatacagtactactcccttccagcaggtggcagtggtctcggggatgagctcaggtgtggagctagctgggggtgttactgttttcaggcgaggacactgaggtctttgcaggtgatggctacctgggtgagtcatggctggtcaccccaacaggctcaggattacccacgatggcacagacacaggagtaggacctggcagggcagatgctggagccaggagaaccaggtcagggatacagcaggggtccactcttgcccatacctcaaggtggtggctgaacttggaagaacagtggggctggaaacattttccacgctatgctgtggtggctgactacttcagtttccccggtgggacaaaaggggaactgaggcccaaagaagagaggctgcttgcttggaagtggggaaggcagggctacggtcaggcccactgtgggctctaggcccctgctggctcacagtgtctcctatggtgctcagtttcctgtcttggacactgacaagcatgtctggtcaagcatggtggtacaggcctattgtttcaagactgaagactcaggaggctgaggcaggagaatgagtttgaggtcaacttggacagcaaagtgaaatctgtctccaaccaacaaccaacatggctctaaaagacagccccctacccaggttgtgctccccagatggctctggatatagtgccagtgccccgaactgcttggcaatggttgccagccttcctagccaggaacccctactttattttaatttattatttatctatttacttttataagtacccttagccaataaaccatccctctagtccctgtttgttttgttttttttttaaagacagggtctcaccatgtagccctggctggcctggaacttgctacacagatctggctagcctcaaactcacagagatcccctgcctctgcctcccaagtactgggattaaaggagtgagctgccacacccagatatgaatccctatttaagcataccctaatgctcatgaactcagtgggcagatgaagagtttttgtgtgaactggggctttgcccttatcatcctgtgtgttctcctggtgaccctcaagcttggctgcaatgatccccacttacagatgagtacactgaggcattggataggctctggcagaaggctggatctgagagacccagaggtaagactgctccatacccattagggcccagaacattcctacctttttcctctatatttgttgtgtgatatctgctcagctgtggcacaaaacggctgcttaagtcaagctttcttggtgtattgcatttctgagcctaccagggtgatgctgtgactgctggcactgtggccacctccagcattagatgaagctgtctccagatggtggggtaggcctgctcgctgccacagataatactctgctttcccaccctccactaagcaccagctccatgcaccctggagggtgccagagggaagggcagagcagtgtggcccacaccatccagacatcagcaagagaggtaaaaccaaaagatgcttttaaagtaacatggcagggacaacagatgatgctctgaccaagaccatgggggttgggggtggaagtggacagcatccaggctgagacccaaaggacaagaagacacaatgagccaggcagtggtggtacacgcctttaatcccagcacttgggaggcagagacaggcctgatttctgagtttgaggccagcctggtctacagagtgagttccaagagagccagggctacacagagaaaccttatctcgaaaaaccaaaaagaagacacatacaaaggccctgggggttgaggggaagacctggcaacaagctgcaaggcccgatcatggtctcagcattttgtccccagtttggctgaggctaggtacagagcttactccacaccatgctccccacacgctgcctgctcttactgctttcctcgctgctgcagatcaaaggaacatgaacaccaacaggatttgccttttgagccccagagccctgctgagggtctgcaggattatgggtgatgtgctgggtctcactgtgtatcccaggctggctttgaactaactctcgaagtaatcctcctgcctcagctttccgaggcggtgattgtggcagatgtgaacttggttggctttcctgtgccagcaacacatcttattggctgacatggtattagtatagttcgcctgtgaccagtctcagtatgcctcagtttctctgttcactgaacagttccctgttcactcccccacaacctatgaggtgggcaaagcccaaatggagagtcacacctttcatctaggcactctggcggggtaagcaggaggatccagccagtgccaccctactttatacagtgaatctgaggacagcatgggctggctacccgagacctatttttaggttgaaaaataggatcagcaagggtatggagaggaggcccagtaaaaaaagggcgcagagttcctagcaccagggaagagtagctcacaatgacctgtaactccagctccagggaatccaataccttctggcctgtgcagacacctgaatacctgtgcgcatacatgcacacaaacacgcacacatacatatcagcaaaaataataaaatcttttttttttctttttttggtttttcgagacagggtttctctgtgtaatcctggctgtcctggaactcactctgtagaccaggctagcctcgaactcagaaatccgcctgcctctgcccccccaagtgctgggattaaaggcatgtgccaccacatctggctttttttttttaataaaatctttaaaagtaaatacatggcagagcagccagtgtttgttgaatgcctaagtcaatgtttgcatccaatgttccccagattctcaatctgataccatcgcaagcccaagacacaaaagacaatgatctcaggcctccttgtgtgtagggggctatcccaaccgattgccatcctggggggggggtgtctttaaggctcacagagctaggacaggttgccgagagctcatgcctaccccaggtcagtcccacataagtcgatgttaatgaagaggccagaatatgaagagaggtggctacgatgtctctgcctgcactaagaaaggctggacgttgtccaggaccaggtcagcaatgattgacatcttaacaaactctagagccttagatggagtaatgttgtgttgggggaacctggctctctgatctcaggggatcctggtccatctctgagacagacacttttgtccacagacagagcttcacaagtgacccacacacgggtgaccagctgggcaactctggcaccccttctggctgccccggtgatttcccaaggatgcaggaggggctgtgtagctgaacgtcctctgagagccattacagccaaccaggctttattttggcttttacaataggtttgctgtcaggatttccatgagtctctcagagctccagatgctgggtctgtatttaactcaaatgagtggcagagaagccactggcctgggcaacctggttcctggggtgggaggtgacccctaggcttggagcagctattttagaggtggctgccatttggtctttgccaaaatagttgaaagaagacccccaaaatagcatccgggtctgccctggcttagacggcatcacatgcaggcttagagcaggcgtgtggcctgtcagcaaacaggcagcagagactgcttgtcacccaggccaggggcctaggaatggcctttgggctgcctcacaggaccagtgtccctagccctgcagggtgacatcatggaggaggaagcatagaagagctgaccaggtcctgagaacccaaggagctggggccaggccagatgtccttagaggcccccaggctttgtggagcctaggtagtttccttctttttagatcatggttctggggaaggagaacataacccttcccttaaggggacagaaaggtcaggacctcactcaaggtgtgaggtggagtgtctgtcacctagcaaggctccttgagtctctgaggttccagtgaaggcagggcagtacggtgcccagggcccggggaaagccagtttcaagccagattctggaagatattttttctttttttaaatttgtttcttaaagtttggtttagtctgttgtttctttgaaacagggtctcactctgtagactaggctggtcgagaaccacaaagatcctcctgcctctgcctcctgagcactggaatcaaaggtgtgcaccaccatcactccatctacctataactttaatccgagcacttgagaggcagaggcaggcacatttatgagttccaggacagccaaggctacacagagataccctgtctcaaaaacccaaccaaccaaccaaccaaccaaacaaacaaacaaacaaggtacaggccactgcagcaggtcatatgtgcaggcataggcatagtgaaggcagatgtccccagagtccaaaagaggtagttggcatccctgaaactatagtgacctttgtgagctgtcatttaatgtaggtgctgggaatctgacttcgatcttctgcaagaaccacagagcaagtaacaactaacccatctctgtagctctctagagggacttttccagaacaggtgtggcttagtgaggccccactttgccaaatttactcagatcctgcctccaagataccagactggccctgcactagcaagtgttccctcccctctgaatgccagtcccctcctcaccaggaggggccgtaaggttgctggatcaatgggccaatgaccctggcatggatggctgagtcacccggtaagtctctgagctggatgacagatcaccaggtaaactgaggcccggaaggaccaggtgtctatggagccctcctcccatgagctgtgaacatacttggcccttgggctgctcctagggatattggtgcaagaggcaaaagcagggaaatgggcaggtgaccttgagctgttccaaggctcccacacagagcactcaacccggccccagaagagcttttgtgatggggctctggaggacttctcctagtctcctgcggtgagcctgcccaagggcaggtcagtctcttcccagaggtgaaggtgggatgaagccaggaagggaaggttctccagccccacctgctgttgctgagcagggcccacaccttctactgtcgggagactgaacagagatataccctgaggggctttggagagaatggctgtaggcttaggagttcccttttctccactctccc

SEQ ID NO: 1000 - DNA, 738 bp, Mus musculus
atgggcctgatctggcttctgctgctcagcttgctggaacccagctggccaactacggggcccgggacgcgactacgacgcgatgcgggcggccgtggtggcgtttacgagcacctcggcggggcgccacggcgccgcaagctctactgcgctaccaagtaccacctccagctgcacccaagcggccgcgtgaacggcagccttgagaacagcgcctatagcatcctggagattactgcggtggaagtgggcgtggtggccatcaaagggctcttttctgggcggtacctggccatgaacaagagaggacggctgtatgcttcggatcactacaacgcagagtgtgagtttgtggaacggatccatgagctgggctacaatacatatgcttcccgcctgtaccgcacagggtccagtgggccaggagctcaacggcaacctggtgcccagagaccttggtacgtgtcggtgaatggcaagggtcggccacgcaggggcttcaagacccgccgcacacaaaagtcctctctcttcctgccccgagtgctgggccacaaggaccatgagatggtgcggctgctgcagagtagccagccacgagccccaggagagggcagccagcccaggcagcggaggcagaagaagcagagcccaagtgatcatggcaagatggagactttgtctaccagggccactccaagcacccagctgcatacaggtggactggctgtggcctga

SEQ ID NO: 1001 - protein, 241 aa, Mus musculus
MGLIWLLLLSLLEPSWPTTGPGTRLRRDAGGRGGVYEHLGGAPRRRKLYCATKYHLQLHPSGRVNGSLENSAYSIITAVEVGVVAIKGLFSGRYLAMNKRGRLYASDHYNAECEFVERIHELGYNTYASRLYRTGSSGPGAQRQPGAQRPWYVSVNGKGRPRRGFKTRRTQKSSLFLPRVLGHKDHEMVRLLQSSQPRAPGEGSQPRQRRQKKQSPSDHGKMLSTRATPSTQLHTGGLAVA

SEQ ID NO: 1002 - DNA, 57501 bp, Homo sapiens
aagtgcccctgcatgcccagcacacgctgggcaaggtgggcaccccagacactgggccgggcaccaggactgagcagcaaggaccccatgtctttctttgctgtagtgccaagttatgaaaacatggctctgtctcaatacaagaaagagtgtattgaaaagctcatcagcagcggtagaggtgcagctgagaaaatgtcagtttcacaaaagcacctgcctagccagtgggcggggaccttgccgtggggcgaagtccaggcccagtggcctggggctttctctttggcttttcctgggagctccattctaggggactcatgctctccaaactcctttgtcagtcccacactcacagtaggggcggtaggacgaggccttggaccctcagaagaattcttttctagtcctgttctggtttggccaaagcctgaggccccagcaccctggagacaggtaggtgcaggccctgcaggtcaggcagagaaagggttaaggctgctgcagtggggctgggggagccatggctgtcagtttgcaggcaggtgtgggacagggcctaggcaggctctttccctgggtgacaggcaggcaagatcaaaagctgttgggacaaaaggggctgaggtgaattgtcctggccaaaggcagggcactctgggacagtgtgcagcccagtcaggcctcagacatgcaccccagaagaacccccaccctgacagcaagcaccatgtgggggtcaaaggtcggggtgtttggcttggattacggtgcctgcctttcacccagagcaagaaagccagagagcaggataagaaccttccggattggaactgccaggaaaggctcctctgtgagccacggctaatgaaaatgtcattgtggctcagagacattctttacatttgtgtgcatgtccccaagagagacacacggcacctctaaataacccggtaaggagattcgccaaggaacagccaagccagcgttttccgccagcctaatgacggccccaatgagttcagcctttgttgtataatctgttgctaaaaggatttaaaattcaagaaagaaaaatgttagggccaattagctacgttgtgcaggcctcgatgtctatgtgggccccaagctcctctcttgaagtcaagtgggggctttgcttaagcccgtctgcccatcagaccccaagctggacccaattgatctttcagagtcagattttgttgtgtaacatggcgtgggagagaaggtctaggagctcagggcaggggccccgagaaatccttcccagttcactacttacgctaccgacacacagggaaaaggaaggcttttatttctcccaagatgtcagtttaaaatacatctccaggccgggcgcggtggcttaggtctgtaatcccaacactctgaggccaagacaggaggattgcttgagcccagaagttcaagatcaacctgtgcaacatagcaagaccccgtctcttaaaaacaattttaatttaatttaaaaaataaataaaataaatctccagggtggccccacattgttctggcatttctgctcagaggtctgtgctgatgacggcaaaacatgatgatgacggccatggtgtcaaattccactggacatgaatccagctgcacggtccccacactatgagcccttgcctgggcttcagccttcacatccgttcctgggtagagctgacgccagaggagagagagatcacatactgaggacagtcctggtctcttgtagtcctgtctgggccttgcagtgaacaccctgcacaccaactggcttattcgtcaccaaaggaatccctatttgcagtaaaaatcaagtcaatagcaaaattagtaccaaaggctcaaagagaaaagttctccctctcacctctttgtatccttacttcccagaggtggtcattcctaccactgcttgcctatcttgcagaagggccctgtgtataaatcacatgtgtgggctgggcacagtggcttacacctgtaatcccagaactttgggaggctgaggcgggtggatcacctggggtaaggagttcgagaccagcctgaccaacatggagaaacccatcctctactaaaaatacaaaaattatctaggcgtggtggtgcatgcctgtaatcccagctactcgggagactgaggcagaagaactgctctaatctgggaggcggaggttgcagtgagcagagatcatgccactgcactccagcctgggcaacagagctatactctgtctaaaaaaaaaaaaatcacatgtgtgaataccaacaacagcagcaagcactgatctggtgtgtcctgctcgccggacactgtcccagctcttcacccatatggattcatgttggccttctgagagcactgtggcacgttcccattttacagatgaggacatcgaggcccagagaggttactatgcccaagtcctcacaggtcatacatggcagaatctggattctaacccagcaactcacacatgggagggcactctggttgctaccgtgttgtttcccttcctggccaccctgatcacgactccggctgtctgctgtctcgaaagcttcacagcgcacccttgtatggccaccagtctctgacgggagggttctttctggtctgaaatcctgctgaatgatgctgcttgtgcatatttctttatagactctgtaagataaagtgtcagagtgtcaggtgtggcattcctcaagcaaaaggcattgtgatggacactgtcatagtcacggcccagtgccccctgtgatgatggccctggtttgcacgtcccctcacccccatctctgcagagacaggctcaaggcccattctcggtctttttagttgccctgatggttttatctattggttgaactcgttcaagtttgagaagtgcctggaattagctctgtgcttccgaggagttctttcgtgggcgattttctagtctatcatttttctggagttcaccaaatcaaattttgcagaaagcctccggcatccctactgaaaggtctccaagtgggtcatgccaccctgccagggggtgagaggggatgaggctgcttgtccccggccaccctctccctctttgtcgggatctatgtaaggacctttctctctccatgttttcactcaaatgacggacattttcaggtcagggatgccacagaggtttcatgcaattgttcctgaagcatctcagggactctgggccaagccctggggaggggccaggaggaaagcagactccgtccacctgctccagagctcacagccgagggctgggggtggcctcacagacgcctcttgatgaggaaggtgactgtgcagtgcaggaggctgagggagccgggaggaggaccctggcccagccagggcaagggggtttaaggacccctccaaccccgaggagagactctcttagctgcatctggaaggacaggaggaatctaaacaagccaaaggtttggaggaggagagggagcagtagctgcaggcagtggtaacagtccgtgcagagaccccagagtggggaggagccggtgctcactgggaatgtccgggtcacagcagctgctcaaggccaagggtgggccaggaggagctgaagagatggacagggcccagaccatgcccaaatccaagcaaagagcatgggcttcaccccagagatgaggggctgcagccctgcctcagaaaacagaaggacgcagcacactcacggtgactcacccccatgtggctggaggcgagggagcctcctgaggcagggccagggcagccgtcaggtgggtgacggcaggggtcttgccatggtgggcacaggggctgcatacagcttactcagtgacaatcgagtccctggtgccagcctctggaagtctggaagtgagcaatgtttcccattaaggaaagtgtgtggccggccatgccccccaacgttgcacactcactgcctttgcagggttggggcttccagtcacagggtcccatccacgtaccagcccaggtggctgcagaaggtccctcgcagtcatgaaaccaagggaggcttgggaaaccacatctgaagggcatggctttgatttagtgagagggtggggctgggctgggcaaggccaccaggtctgagtcagagccagaggcaggaagctggtccccaggcactgcccgccgcctctgcgatgcagtcctcctggccacctgagaacagcctgtagagaggcagtggcgtctttcggacttcctcgagagtccctgcagcttgggcattgatggccagtcaccggggctgcaggaccctgagctcacacaggcccggccgggccaggccaggacttggccccagaaaatccctccctggaaatttcttgggagttatctcagctcttcggccccttcctcagctcagggaaacaggtcagagcacgctcagtcctgatgctagaagtggggtgcacgctcagtcctggtgttgggactggggtgcgctactctgggacttgagaaaaagtcctgcttgtcctttaaacttagaataggggttgggcacagtggctcatgctggttgtcctagtgctttgggaggctgagatgggaggatcgcttgagctcaggagtttgagaccagtctgggcaacatagtgagaccccatctctacaaaaaatacaaaaatcagctggatatggtggcacatgcctgtagtctcagctacttgggaggctgaggcaggaggatcacttgagcctgggaggtggaggttgtagtgagccaaactctagccactgcactccaccctggatgacagagtgagacccggcctcaaaaaaaatccagtaacttggaattgatatcagaggctgacagctgtaggagcgcttatgcagggtaaggaatagagcagaaaatggaatctgggtggtcctggacccatgtgccaccacccccaagatagaccatgcataccagggcccatcagtccatcgatgctggctcctgtgattgtatttgtagcactcctcagcctcccccagttgtaggcggctgaatgaaggccccagcagcgcagcccctttttcctagcagacacaggagcctcaaagcagcaccgtgatggtttaaggagaacacagaacatgcaggtgtggaggaggaacatcctagactgggagtgggtagcccggcactcctccctctatccccacctcaccatccctgcctcctgcccactgtccaagtgtcctggccacatctcgcacaggtcagcacaggggagaggtaaacaaagcctgcctgccctctagagcaagctgccctgcctgagctgctgctgacgagaaacaggcctaggtatcagggcagcatggaaggagcaaaggccagggaggccagaggaagagactcgctctgcctggggtgtgggcccctccaggggccggggccaggtctgcaggaatggcaggagcttctagatggaaagggtgaaagggcccccaggtggagggactggcctgggcaaagggtggagaggggtaggggggtgcaaggcagggacacagggtgattgcttgagtgtgggtttgccaccacagctccccatcaaagctgccacagctccccatcaagcctggcctcgcccagctgcagttgacttcatggtgggaggaggtggggatgtgaatttcttcccttccctccaccccacctcatccacaggactgggggtgtacctcatcatttgcacttgttttgggcggaactgtgtcccccaagatttgtatgttggaaccctactcactaggacctcagaatgtggctgcaattggagctagggtctttcaaaggcgattaaagtaaagcgaggtctgtggaatggccccagtccaatctgactggggtccttataagaagaggtaatgaggacacaggcacacacagagggacgaacctgtgaggacacagggagaagatggcatctacaagccctgttggctgctctgcctggagcccgatgccaggcactgacaggcacaggctgccctcggtgttgtggggaagaaaaagagcagctggaggtgtctgtccctgggccagggggccctctgctccctcctctcctctacccagagagaatcctcctttatgtctcagcttggggctccaaaatagccaagtagccaggaaataaggcgaacatccatccatggatgaaaaataaacagcatgtggtctgtgcacacgacggaatgccactagggcagaaaaggggaggacacactggcacacgccacaccgtggatgagcctcaaagtgctgcgcaggccccactgcggggagatgtgccttccatcccacccctgcctgcgggggctcctaactttgccagaagcaaagtgccagctttgccccagagggacttagaggggcaatggtttccctctccccactgctcgggtcctgggtcccgtagccagaaggggcattccagtcttctcgcctcatctcctggctgtgtgaccccgggcaagtcacttcacctctctgagcctccctttctcatctgtaatgtggggctgatcagggctgctcccagaatttcagggacccatggtctcccagtgacacaggcaggctgggtctctctcccactgctcttggggacaaggatggggtaagaggatgggggggcaggcaacataattagagtgagtttggggctgggagtcagcatcacatctgacagtccctggccagccacctgcggccacaccataggaccctgttctctgccctctctccaccccagctctctctccaggggaagaggctaggggcagactcaggtaccagatagggctgggggtgctctgggggacagggtcccagtgcagaggttcgggggatgctggtaggagcacttctgctgggcctggggtgtccagcctgggctctggaagagaccaattagtcaaatgactacagttgaccatttggaagcaattaacagggtcgctattagcgcatggtgcaccccccgcctggctccgaatgggagggagaggggcgaggttgccattatgtgggtgcctctgccccaccccacacacaagactttgtggcccagccccctgcccctgccgggcagatgtggaggaatcaggttcccctcccttggctgggcctgagggtcccagagtcccagggtgggggtctggggggcttcctgggctggaaagatcaacaggtttagatgaggaggaagaactcaataggtgggtgagcaagggcctggaggcgcagcccagaagatgtgggaagtgaactagaggtccacgcgggtgggtgagcatccccagggttcccccaacactacggcatttgtcagaggggctggggcagctggagaaggcagctttgggctccagaccacttcccgtgactgcagggtggaccgcagatggaaggaccgggctgaaggctgtcgccagcgaccggaggagagaggaaaacttggcccagagagcttggctgcctcggaaaagtcatgcttaccagaacagcagacagtgagccagggccaccaggagggacctcaggcagggcaccggctgtcctggtataactgcaaattgcgccctctttcactctcaaaggcagcagggtttgcgtcataaactgtggtcccctgcggctggagcatgccctgcgctgatgggaggccagaggctttgcagaggtaatgccactcagtttccggccctacctttggggcatcacacacatgagaaaccagtatctcaggagcgacactacacagccaaggcctcgtggcaaggaagtggccgagccattcattcattttaggagtatgcactgagtggctggtgtgtcaggttctccctaggagctggaaacctcttgcccatcccctgagcttccctcctatagaggggtcacctttggactcctgcttcagggcagcagcccctgccctcatcttgggttctcgggcacacggcaacctggcagtgggcagggctggagaccagagcccgggagtttccctgggaactgctgggggccccaggtgtagagcaggaggggcatggacacccagattgccttggtcagatttttctggctcctcccagtcctccagagggggtcctgccaaggaggcagccggagccttgacaggaaagggcatcggaagtcccctggccccagcaggctgctcttgctctctctctcttaaaacattattgtgtcctctctcctctctctgtcagactgtgccccctgactgcacccctctctgaatttcttgtgcaccccccacccccgccactacatctcctctcttcttggccaggtgtcaggaggtagcagagctaaggcatttagagcagcgacctccttcctgtgcctcttccatgcctcttagggagcccaggtgaccacacatcccagcccaggcctgcacagggctgcactggacaagctctcctcttgctgctgtcctttggggctttcctgtcaccagcctctgacccctgtaacacagtctccatcaagagtctgaggctccagtagttcagtggctggcctctggcctgttcaaggactctcacaagctggccctggggcagcggctaggagaccctgactaagactgaggtgctcggggatggcttgggggcgccctccttcaggatggccacctggaccctgtgcacgctggagtgggctcacagaggacacactgccctgtgtgtattgggccatgggagctggacacgtcccaggggtgtgtgctcactgccacagctcatggtgccctgcacacttgcctgaccccaaaccctgatgcagatggcaggctggggaatgtcagcccacccaactcaccccagagcccctggtcaacttggagccaaagctgtggcctagacccctggactccacagcgtgccctcctctggggcagggttgagagaagcaaatcccctgtgctggcccctgcttcctgctggccccaggaccctgggggacagaggaccaggaagcaagagaaatgggtggggacatggcttttcccgatactttttgaagcccctcttcactgggccccctgagatacaccttgacccccacacagtccaggggaccacctgggcatctgcactgattcagatcctccaggccaggactcccccacacccattcccagcttctaccgggttcctcttgtcatcacccacccgctgtggctaccagactccctgtgcttttctctgggtgttctccgcggctctgtcttctttccatctcccctgcctcctctttttggcgatctctgtcattcacattttccatgtctttcccgtcctttcctcctccgtttctgtctgtctctatctgcatctctttctctctagggctgtctgtcggcgcccacttctctggctctcgcgtccctcctcccgcctccccaggcccctctctggaccgtcactgggacgggatcctccgaggcctgccagacgagagctaaccccaccactccgggtgcccagttggtgtgcgcaaaaggagatagcatctccagacccggcctgccccgcgccttgcaaggctgaggacagcgccactgctcctgcaggaagcgccgggcgcagacacaaacccggagctccccacgcgtgcccgcgccccggagcctccccgccgccgccctccgcggtccccttcattatgcgccgcctttaatgggcgtttgtcagctcgacttccccgcaagttgttttcacggacatcagtcatcggcggcggccccattgtgcagggggattgatggggagcgggagggggtgacagggcctggggcggcctcctcaaggcctcggtctataattttcggaggcataattggtctgggggagggggcgggggaggggcgggtaggggacctttcagagccaggagggctttcgggggcgtggggcgcgctgcggagcggagccgcggctcgacggcggtgcgctggcggcgagtgtatgcagacggcgcccggcccgaaccccgagccccgcggggctccccacccgccggcctcccgcccctcccgcgcctccgcctggggaccacgtcggccttttgttggcgaaccgtcctttctttcagcgctttgcgcagcaacggaaatttcattgctcctgggtggaaattaaagggactcgcgttccctctctccctctccctctcccactctccctctctttctctctctcgcccacccttcccccttcttcccccacctttcccgcgaagccggagtcagcatctccaggcgcgggatcccgctccgagcacctcgcagctgtccggctgccgccccttccatgggcgccgcgctcgcctgcagccgccgccgccgcggggcgggcgcgatgccacgatgggcctaatctggctgctactgctcagcctgctggagcccggctggcccgcagcgggccctggggcgcggttgcggcgcgatgcgggcggccgtggcggcgtctacgagcaccttggcggggcgccccggcgccgcaagctctactgcgccacgaagtaccacctccagctgcacccgagcggccgcgtcaacggcagcctggagaacagcgcctacagtgagtgccggacgctgcggggccccgggggaagcggcgccgggaggggtcgggcccgggagaaggcgcgctgcggggccccgcgggggaggcggcgccggggaggggtctggcccgggagaaggcatggtgcgcccggggtgtccgggaaaagaccgtctgcctcccgctgccagaaggggaatgccagggtgccctcctcaacctacacgtccgggagaagagcgcgcgctggggttcgagcagaactcgggggcatgggcgttcacgtccgaagagggcgccggcggctgtcagagtccgtccccggtccggcccgctggtctgaggggacgcgagctaggcgaccccggggctccaggctctgctgctttgggcagctctgacaagtttaagccctttgaatgtgtcggagaaaaggagccggacaaggcatttatcatcctctttattattttgacgacttctcctcctcctgccgacccctggacgccccgccgtcccctccgccctccccgctcgcggctgcccaggtggccgcccccgctgctgcctctgcgcggaggactcttgccctgcggagctcggttccctggccgcggccgccaccgacagttattccccgcgctggaatctgcacctcccccgcctccgccctggccgcacagcgacaggagggtggaggccctcgccgtcgggacgtgcggatcacgagcgcggaacggtgtccgcccgggcctgggggtgcagacacacacactccggcccccgcacgcaggacccgcggcccgggctgcgctcaccgcgggagtctgccggactacacggttgggctcctctggtcacagggacctgaggcccgcgccgagccctttgaggagcaggatagcggagctcagggcccgggaggaccgcgtggggagcgtgggagggcagtcaagaccacagctgtcctcgggtgctccgcgcggcgctcggctccggccccgggcgcaggaagcggttccgccgcttgaaggtggcggcggcggcctcagcaaaccgcggcttcctccaggaaagccgcagccctgagagggcgtcctggggacatgcgcctccggagccgcacggtgggcaccagctgtcaccagggggtccgagtgcgcggaattcgtctcactaagacactccggttctctccaaagccaggctccccctcggagtcgcacagcatccaaacttcttggtgtaggctgctcacggggaggggagggcgcgcgcccgcagccgcccctgtcctgcgtcgagactcgtgcttcgctggtccccggtcaggcaccgccgatgccgcccagcctgcgcactgggaaggcgggaggctcgcagcctgcaccacagcacccctgggctggagcaaaagcccggtggtgaccgcgtctgtgctcggaccgcgtgccaggagggcgctcctgagaggcatgccttggagagggtgcaggcagtcgccccaatcccctcgcagcctctattgggagacaatgaccccaacccgtcctttgatgtagtcccccgcccccagcccccaccacagcactcgtgtatccagaaggaaaggcgggaggggagatttaaactttcttatccctggggagtgggtgagacccgtccagcttccctctgcgggctccagggtctaaactggcttcctgcccttccaggtcccccggcgagtacaatgatctcccgccaggtctattgccagcatgatttgggtggcaggcaccctggctgtgttattgccagtggtttatattatcagcctggctcatcagggcccagctttcccgctggcaggcacaggcattggggaccgtgcagtcccagagctcagactcccatggctgccgccagggcttgatttcccgctcaagcacatgtgcaggggcctgacagtcacccagccatagtggtccccacttgcttgtctgtcggatgatgatggcagctggcaaggtgttgtgaggctcgaatgaaagccagggtgcaggcagcgtcagcaggtgggaatgttaatttcattgttaccctcccaagtttgaatgaagagaagccttccctgatgttcccttctctacctcctgtccggtgacttctcccttcctgaacttccactcactccccgacctgtggggtgtgtgctaccctccccagccctgagcccggggtgtggctttgggcagggccagctgggcctcagccgccccctccgtgggggcggcgggagtgaggcacctctcatttcttctaggtattttggagataacggcagtggaggtgggcattgtggccatcaggggtctcttctccgggcggtacctggccatgaacaagaggggacgactctatgcttcggtgagtccaggctgtcacgtgggtgggcgctgacggagtagcggtctggcctgcacatcaagccaggggacgggggatgtgggcagtagaatgctttgccaagggtacacgggacccaagctaggaccagaccctggcccagggctccacgcccagtgatctttggctgtgtctgttagaggctgctccgcgagtgacctggagcctggccctgggggacctgggatctggagaatgccaggttagcaaaggtttcccccatccttgtcatcactaccaccctcccttgagagtagctgagagcagggaagtgattgttctccaaatttccaccaaaataaatggacccaagacaacctgggagtgttccttggggcagccagagctctcctgggagcatggagaggaggacgctggcccagctccaccggctctctccaagggtggaaaggcgagagctgaagcctaggaggggaagggggatggcgcccatgtcccgggcacacaggagccttggagccctggcttgggacccagtctatctactgcctgggcctccgtgtaaccaaaaagggtctccttactctgtgggtatggcagcgcccctcttcataaggggtaggggtggggaatacacagagtaaaatacatgtcacagggaaatttgctacctccaactagtcattacatgcaatttggctgatacttccttgggcaatgagaggttttccatccatgagtagcctggctgacgcggcccaaggacaatctccctgcagtgagctctctgctcagtcctgctcacagaggacacatcccgcagctccctctcgcagaagctgatgatttcatcacagatttttagccgttttgctaaaggaaggtccagaaagccgggatgcgccccttcattttctctggtccagaggctactccctccttcctcccatccactcacccatccacccatccacccattcacccatccactcatccacccatccacccatccatccatccactcatccacccatccacccatccatccatccacctatccatccatccatccacccatccacccatccttccatttacccatccaccatccacctatccatccatccatccacccatccacccatccacccatttacccatccacccatccacccatccacctatccatccatccatccatccacctatccacccatccactcatccactcacccatccacctatccacccacccactcacccatccatccacccacccactcacccatccatccatacacctatccatctgacattcagtccattcatcagtcagtgtcctggaagctgtgtctgggagcaggggccctcatggtgccagcttctgccataggggagccaggatttggagagacagaataaagcatgacatgagggggtcccagtggttcagagcccacctggggcttccgtgcctgagaactcacagcctggctttgagaagggtggacagaggctcctagccccaccagggatgcttagccaagcagtctggctggagggtgtggaactttccagagtgcccagtggagaagttcccattgccctgcagacaacctgggaggcatagtagcctggatgccaactccgtcacctgccacctgccacctgataccacagtcctgcgtgcggccagcttgcctaggagtgctgtcccaccacggggctccctggactttgccggcagcatgcttgccctcaggccagctcatctcactgtgggccagtgagcactgcaccctgacactcctggtctggccctgacctcccttctgaggtatagaccaccctcccccaacatcctgctgactcagacactcgaaccgaactcagcagctccccgactccccatcttaatcatcgccccaccagccactcactctcacccagagtgggctgggagtcatggtagacccctcctgctattcagtccatccctagtcctcagaccacgcccctgcatctcttcagcccacacacctcacctccctctgcctcatccctgagagcacgccttaaaaggcaggctcatcacttcccacctggatcactgctccagcctctcctacctccagtccatctgtttgtcaagccatccatccatcttccttccttctttccccttcctttattctcttcacccatctgtccatacacctctccttccttccttctttcctttctctcatccttctttccatccatccttccaaccgttcatctgtccatctgcccattcacatgtccatccgtccatgctccctccttccttccatcctttcacccatccacccatccacccatccacccatccaccaatccatccagcaatccacccatccatccagccatccacccatccatccgtccacctatccatccatccacccatccatccaaccagccatccacccatccatccatccatccatccatccatccatccacccacccacccatccacccatccatccatccagccaaccagccatccacccatccacccatccacccatccatccatccatccatccatccatccatccatccatccacccatccacccatccatccatccagccatccacccatccatccatccacctatccatccatccacctatccatccatccacccatccatccatccagccatccacccatccatccatccacccatccacccatccatccatccatccatcaatccatccatccatccacccatccatccatccatccacccacccatctgacattcagtccttcgttcaccagtcagtgtcctgggcacttaccatgtgttgcactctgctagtgcatgttaaaggggcttcctaaaaaagcaaatcagcccagttcatggcttctgaggactcccatgatgcgcaggcatcccccaggcaccttagctccacccacagagcagcagcccaggtgccatctgctcccaggggggctgtcatccagaggttgagcctcctccggcttccggaagccccctcaactctccaagccatctgtactgctcaggccacaccttcactgcctggaacgccctcctccagaaaatgcccatgagaaagtgcccgccccgcccttacagctccctttagaagtcacctcctcaacaaagcagcttcggagtcggcttcctccccacccttcatggggtggaagcggccctgggggaggggcctgtggaaccaggtctggtggggcggcagtgtcaggacacacattggaaagtgttgtcacagcgagtcccaactgcagtagctctggagtctatggccctggcccctgagccaacaccttctgccctggtcatcttggccaccccaggtgccctaccacgtgtcagcaattgatctacactgcccccaatctcccaccttgggagagcctgagccccctgccacctgaggctcacaggcacctgtccttcagtgacccacccctcaagtggccccccaaagagaaagcctatttcctggcctctctggccctgagaggactcacctgctgcaggatcgagggacctgggagaagcttgggtcctgccctgagcttctcacagtctgccatgggagccagacactaacatggtgtacccagtgtgtggggtggggaagtcggccctgagcccacccgctcattcccagatagtcgctgagccccaggctatgtgggggtcaggcacagatcagacactgttctatcccctgtaatgtagggcctggcaccacccctgggcctcagtttccccatctataaacatggagaccggtcttggatagtaacatccagactgtggcccagggggcactgggcctccaagagggctggagagcaggggggcttggggttatggggagaggcagcccctaccaccaggtcaagccttccacccttccctgctctgggctttcatgtcgctgaaaaacaggatggggtgcttgaagcatcttgttccctgaggtcctgcgaggtcagatgctgctcggtccagtctgggagcctctggaggccatttccactctctctctctgccacgggacaccacaccccagatggggacagaccatgagggcctccgactcctccctgcggccagtccccaggaggaaagagagatcctgctgtctgccttgcacctgctgcttccacctcccaccaccctttctggtttggagggagcagctcctgtcagtcatcccctgagggaggtggccctaggcattaccacttgcctgtagctgggactgaagcctagtgggtctgcataaggcatacccacctcttccctacgccacagactaagaagaccccatgaggcagcccttgagggaaactcccacggccaagtcttggggatgttggtgtaagctccttcagttcagagcttcactgtgcctttgagagggcagggtcccttctgcccttcccccactgcaccctgggcctgacaagggtcccattaatctctgatgacaaagaggtgtcctctctgtcctgcttgtggtgggacaccccagcttctgctctcatcctaagaacagcagtatctgtggcactgattgatcatgtgcctcatgccaggccccagcccctgctctgtgttgtaacctcttcaacctgcaaggcgagatcctccagcttaagagagtgttgctcaggggtcaatgaccccagctggggcccctgagcgcagcgtttaatggagagtctgggctcatcaaacctggctgtgtccccttcccttcctgctttttgtgttctttcttcttttttcttttctgcaatttctttttttttcttttcttttttttttttttttgagtcagagttttgctcttgtcgcccagactggagtgcagtggcacaatctctgctcactgcaacctctgcctcccgggttcaagtgattctcctgcctaagcctcccaagtagctgggattgtgggcgcacgccaccacacccggctaatttttttgtatttttagtagagacggggttttgccatgttgcccaggctggtctcgaactcctgacctcaggtgattcacctgcctcggcctcccaaactgctgggattacaggcatgagccaccgtgcccagcctctgcaatttctttaaaagagatctgggtgttgtcatcttcctttgtccaaatgcccagtccttgctgacctccacactgccagcagactgccagggcacctgggttggccggcctggtctctgctccacagacaaccctacacatccctttgctgtgtcagcgccctcagatgggggacagaggctggtggaacccagagagcaggagctgggagttgtctggcacagctttgagtgaaggtgacctttaggcagaaggccaagttcaccaggcacacaggggaggaaggacatgctgggcagagggcagggcctaggcaaaggtgtgactggctgagagtgcgctggggtttggcactggaccgaacagcctcacaggaggggagggaggcatcaggcaaccctgggccctgacgctgccacagtctccccggggcactgaccatgatatctcatccccgcaggagcactacagcgccgagtgcgagtttgtggagcggatccacgagctgggctataatacgtatgcctcccggctgtaccggacggtgtctagtacgcctggggcccgccggcagcccagcgccgagagactgtggtacgtgtctgtgaacggcaagggccggccccgcaggggcttcaagacccgccgcacacagaagtcctccctgttcctgccccgcgtgctggaccacagggaccacgagatggtgcggcagctacagagtgggctgcccagaccccctggtaagggggtccagccccgacggcggcggcagaagcagagcccggataacctggagccctctcacgttcaggcttcgagactgggctcccagctggaggccagtgcgcactagctgggcctggtggccaccgccagagctcctggcgacatcttggcgtggcagcctcttgactctgactctcctccttgagcccttgcccctgcgtcccgcgtctgggttctcagctatttccagagccagctcaaatcagggtccagtgggaactgaagagggcccaagtcggagctcggagggggctgcctgcaatgcagggcatttgtgggtctgtgtggcaggaagccggcagggaagggcctgagtgccagccctggcagactgaggagcctcccaggagcagcggggcagtgtggggctttgtgtcatcacaacattaaagtattttattctactctgtcgtttggtagaccgtgatgcaggctgaggagcgcttgccgcctttactggaacgtgcttgcttccagcacagcagaatccgcgctggcatcagcctgcgtcagctgctgctttaagaggaagacggcattcccagaaatcgggctaaaggtgcatttcagttccctggttttagaaagttacgtttttttggatggttggaaacaagcaaaggcatgtttgtgcatgtgtgtgcatcgtgtgtgtgtgcgtggagagaaggatcgtgtatttctgaaagcgtgagtgtgcatgtgggtatgtgtgatcttgtgttagtggtacctgtgtgaggacatgtatgtgtgtgtgtgtttctgggtgtgtctgaatgtgtgatgtgtgtgtgtctgtgtgtgtgtgtgtgtgtgtgtgtgtgtgtgtgtgtggagagagagagagagagtttactttctttgaaaactctaaaaagcctctccctctggaagctgtgtgcttctccagggaccctttagagcaactgtgtcaggtcaggcagcacagaaacttcctttatccttacaacctgctcttggggcccgtgcaccctgtctttacctaagaaggtgaggctcagagaagcaattactcagtggccgggccctgccttggactaggtgcctcctcacacctgttccccaacaatggcatgggtggaatcacctgggccggcccaggtgagagccagcatgggcagtgtactaacctctcctggcacttggcaggatgggcagggtccaggtgaggaggctctcctgagcctgggactgtgaggaccatcgctctctgttcccatgccctcccaggggtcagagagcccagactcagagagcccagggtcagagaacttagggtcagagaggccagagtcagagagctgagactcagagagcccagggtcagagtgtccagggccagagagcttgtggtcacagagcccagactcagagagcccagactcagagccacctgattggttagtgcagactcgccaaacccacagggaggctgggctcctccctggcacgtgtgcaacacaagtgaaaatctcggtgcctccttcagcccccagcgcatgtcagatttcccggaatggctcccctgcagctgcgaacattcctggcagtcaacaggagcagcacgcagctgagctctgctgtgggttttgttgtttctctagagtgagatggggcaggggctgccatcactccctccttgcagatgatgaccctgagtcctggcaaggggaacttgcccggggctgtgtcaacacaggggaagcagcagtactcagtgctgcaggatcaacagatggtccctgatgaaggcgtaggagacactgggggctcttgtttaacatgtaaaacagctttgacaagagaatgtggatttttcgcagctgatggctgtgccatggtcaccttcttccccacaccagagtccaagggacttcattttgtgtgtgtgtttggggggtcatgggctgaattatgtctcctccccagagttcatctgttgaagtcctaacccctagtaactcagcatgtgaccttatttggaatagggtcattacagatgcaactggtgaagatgaggtaacataggagtagaatgacccctgaatccattgtgaccaggatcctccttaagagacacatgggcacagccgtgcacacaggaggacgccatgagagcgtaaaggtggggacaagggtgatgctgctacaagccaaggagtgccaaagtttgccagcaaacaccagcagctaaaggacaagaaaggaacagactctgccctatagccctgagaaggagccaactctgccgacaccccagtcttggacatccagcccagagtcctgcagatgataaatgtctgtttgagccacctaccctgtgtggggctgtgttaccacagcttgagcatcaggcacagagggcaaggggcctgctggcctccaaaaggagagcgaccccgcttctgctggatgaggggaaggggagagaaggcgggccccaggctgagagcgtgggctccctgggaggggtcagagggtgcccgctgcttccggtgccacggtgggaactcctgcttccttacacacaggaggggctgggggcaggtagaattctcctgaaaaagaaaagggtatgggggtgagagggtcctgggacccagcacccatcactgttagatggttcacctgctccacgtgtgctcagggcgggcagtgcctggagaccgcacacctgtggctctgtgggaagatgccctctgagtcaggaaaggccgccccaggggctccagggacagtggcctccctacttgcatttgcgtcacccagagggaatcggaagggagagaaagaggctgagcaggtggggcaggtctttgcctattgagtctctgggattttgggtccagaacctgtcaggagtaggaatggaaaaattatgcagtctatgaaaaatggtacggtggctcctcaaagcactaaacagagagctaccatgtgatccagcaattccatttccgggcatatccccaaagaaatgaaagcaggatcatggatagatgtgtgcacactcatgtacataacagcaccattcgcagttgcctgggggtggaaacaagccaagtgtattagtcagggctctctagagggatagaactaataggagatatatatatatatatcctattatatatatatatcatatatattatatatatatctcctatatatatataaaaaatatgtgtgtgtgtatatatatatgtatatatatataaaggggagttgattaagtactaacttacacaatcacaaggtcccacagtaggccgtctgcaagcttgaggagaaaggagagccagtctgagtcccaaaactgaagatcttggagtcagatgtttgatggcaggaagcatccaacatgggagaaagatgtaggctgggaggctaggccaatctcgccatttcacgttcttctgcctgctttgtattcactggcaactggttaggttgtgcccactagattaagggtggatctgccttccccagcccactgactcaaatgttaatctcttttggcaacaccctcacagacaaacccaggatcaatactttgtatccttcaacccaatcaagttgacagtattaaccatcacaccaagaatccatcagcagagggatggatgtatagaatgtgctccatcgatgcaatggaatgccattcagccttaaaaaggacagacatggctgggcgcggtggctcgcgcctggaatcccagcactttgggaggccgaggcaggcagatcacctgaggttacccgaggcaggcagatcaccgaggtgggcagatcacctggccaacgtggcaaaaccccgtctctactaaaaatacaaaaattagctgggcgtggtggcaagtacccgtagtcccagctactcaagaaggctgaggcaggagaatcacttgaacccaggaggcagaggttgccgtgagctgagatcacaccactgcactccagcctgggcgacagagggagactccatctcaaaacaaaacaaaacaaaacccacaggccaggtgttgtggctcacgcctgtaatcccagcactttcagaggctgaggcaggtggatcacctgaggtcaggagtttgagaccagcctggtcaacatggtaaaaccccgtctctactaaaaataaaaaattagccgagtgtggtggtgggtgcctataatcccagctactcgagaggctgaggcaggagaatcgctagaaccaggggggcagaggatgcagtgagccaagatcacgccattggactgcagcctgggcaacaagagcgaaactccatctcaaaaaaacaaaaacaaaaacaaaaaacaaacaaagaacccacaaaaattagccggggtggtggcgtgcatctgtagtctcagctacttgggaggctgaagcacgagaattgcttgaacccaggaggcagaggttgcagtaagccgagatcatgccattgccctccagcctgggcaacagaattagactctgcctcagaaaaaaaaaaaaaaaaaggaaggacattgacacatgctacaacatgggtgaaccttgaggacattgtgttgagtgaaaaaatatgatacaattttacttagatgagattcctgaagtagtcaaatccagagagactcaaagtagaacggtgggtgctgggagctgggggaggggaatggggagttagtgtttgatggtgagacagtctcagtttgggaagatggaaaggtactgaaagtagataatggtgatggttacaggttgtggaagtcctcaacgcactcaattgcacacttaaaatggtgacactcttgcagcaccttgattgcagtggttctgtccttcatcttcgtgccctccccatggaaagtgctcgttgagagcactggcagcatccaatcaccattgctggatgaaggaaaaaaaggaagaaaaggtcctcttggagtggccagtaggtcccctgcctgcccagtcggcctgcacagtgctctccagggtggacatgggcagagggagcgcttgaccggggtctggtccactccccgcttgccccacaggggaagacagccttgcctgggtgaagccaagagactaaggacccacactacccggccccctgcatcccagccctggagcccgcttgaccttctctgcgtcggatggagtcagtacttcaatggggagggtaggacggctgtgggtgcccgagcttcagctgctcggagcgggtctttgaactcctcagtgggttcagaggcctcctgcctcccaggggtggaaggactcagaaaggtgaaccagcaggcctataattagcgcccacccatcggagggccaccgtgcctcagcattccagggctgtgacagatatagcccctggagctgacctctgtccccacttggctgcaacggctggaataccaggggcagcctacacttgtgcctgagtgcctggccggctgtgtgtccacacaaggaaggggaccatgggagaagaggcttctgggtgggtaaaaagccagcacatgtgctgttttcagacctgctgattcagatgtggccttagtcacttctgttatttgatcatgacagcattttcagccacgtggcccagaactggccgctgcccctccccagcctcagtgtccccatctgtcaagtggggctcccacagtggtcattgagagctgctgaggccacatagatggtaaaaggtctgtaaataatagctgcatacacagccatgagaggatgcaagagaaagcctggccctgctctctagccagcagcaggggaggcacagtgcagagaaacagaacacacttccactaggtgccctttctgcagcactcttgctggaggggctgctgacctgggcccagaaggtggggaatgattggaaaagtttagaggacacagggagtgttggtggtgggctgggagatcctgggagctctcatgccttgagcaggctggtttgaagacagaaattttaaaaattcatttattatcactgataaacaaatacatttatctgtgttttgtacagttcaagagaaaggcactgtaattcatcatccctccatccacttatcttttatccatccatcatccatctatccatccatccatccatccatccatccatcttccatcttttcaaccatccatcttcaatccatccttctatccttccttccatccatcattcattcatccatccatccatctgtccaccatttatctactcatctactatgccttcatccatccatccatcttccatcttttcatccattccatccatccatccatccttttatccttccatccatccttcattcatccatccatctgtccacccattcatctactcacctactgtccatccatccatccatccttctatctttccatccatccttcattcatccatccatccatcatccatccatccatccatctgtccacccattcacctactcatctactatccattcatctatcaatccatcttccatcttttcatccatccatccttctgtccttccatccatcatccatccatccatccatccatccatccatctgttcacccattcatcctctcatctactgtccatccatccatccatccacatccatccatccatccatccacatccatccatccatccacccatccatccattctcccatccttccatccatccattctcccatccttccatccatctatgcatctttccatccattcatccccccatccatccactcatctaccatccatccagcaagcatatgggcatccatcagtgggtctggagcctgggtagagaatgcagcaggcacccatacagctagctaaatgccagatactctgctgggcaggatggacagaggtggagctacctctccttgtgcatcagaatctttcagtttcacaggggacaggctggccctgggatatggaaaggctcagattgcagggctgaaggaagggcagagaagacaggacagagaaataactggctgcctcatgaggagtgtttaggatctcaggccctggagtcaggtcaacctgggccccaggctaaaagctcccttcacaggctgtgaggccagataaagcgctctgatatctctgtcaatcccaaactctcccctgccccaggacctttgcacatgctgtctgttgagactaatcttccctccactcttcactagttgagtcccttcataatctttacttctaaaggtgtcacctcttcagagagacctaccacgaccaccctactccaactggggccccttctcattttgttcttacagtgccttgttattttccttcaaagaacccaacataatctgtaattatctagttaattgtccactcactgctgtccccatcagtctcccacatgcaggtgaggcacctgggctatttatttccaccaactcaagtctgcctttggttgaggactactcccagggacagacactccctgaacttctggcctgctcccctcagacaagaaatccaagggcttgtgatgggaagccctggggcctctttgtgcagaagggtgaggcctgaagggttatgggtggaacaacgccagtgtctgctacattctgtcatgattcaccttttgcagatgagaaaactgaggcttagagatatgaagcaattgtctcaaggtcacacagccagtgaaggacatgtcagggctgattccaagatctctcaggctccaaagtttatattacatggagcccaaggaggggagcaagaacaggaagtcgccaagaagtgagaagtgggaaaatagtgtggcagttctgaaactgcagaacagagagttacacatgacccagcaattccactcctaggtatatgccccagagaagtgcaaactcacgtccacacaaaaacccgtatactaatgtttctagcagcattattcatcatagccaatgcgtggcaacaacccaaatgcccaccaagtgattaatggataaatacaacgtatccactgtctactgtagatagcatatacgatgctatatgtatacagtgctatggcctaggatgaaacggtgttcacagacaaaaggaatgaagtgctgaaacgtcttacaccccctcaaggcatgaacttggagggccaggtgctaagtgaaggaagccagaccaaagggacacacttacgattccattcctatgaaatgtccagaataggcaaacccatagagatgggaagtagattagtggcttccaggggctgatggggaaagtggagagactgctcattggtatggggtttcttttgggatgatgaaaatgttctggaatagatggtggtgatggtcaccatcacactgtgaatacaaataatgaattgtactccttaaacaggtggattgtatggtatgtgaatgatatcacatatgaatgatacctcaatgaatctgctggcacagccacgtggtctgcaggtctttctaggagaatggggttgggcaggccctccccacccttggggacaatttggggtataggaggtgggggctgggtggtcccaggtggtctgggagggcacccctgcatgcagtactgaggcctaccagcagatggcagcgacctcagggacaagcttcaggtgtagcagagttggctgaggacacctcgccgggtctttccattcatccatctttccacctggtgggcaatggcgcctctctgccggtgacatgcttgtggcgactgctgattcaccctggtcaggcggtcagggaggagtcaggacagaccgtgcctgggcatcccggcatgccccaatggcacacggaaggcagagggccccctccccaggcacaagggccaggcttggcacggaagaggaggcagtgggcctggggcctgggtagggtatgcagcaggcgctcatccttgccactggaggaaggatggacagcagagctatacaaaatgatgatgatgatgatgatgacaatgttggggggagagggagaaggggagcatttagtgggtgcctttcccacctggcgccatgttgctttgactccacctcagctctctgagttgagttctaattctccccatatgataggtgagtcagagaagaaaggctttcccgaggccacacagcttccaagaactggagccaaattcaaacccagctgcccggctggtcttgggcccaggtggtcttaacgggatcttgattccttgattccatgtttttcgtcttagggtgtgtgtgtgtgtgtgtgtgtgtgtgtgtgtgtgtgtgtgtgtgagacatagagcgagactgtcactcaggctggagtgcagtggcaccatctcacttcactgcagcctccgcctcctgggttcaagcgattctcatgcctcagcctcccgagtagctgggattacaggcccatggtagagacggggtttcgccatgttgtccaggctggtctcgaactcctgacttcaagtcatccacccgcctcggcatcccaaagtgctgggattacaggcgtgaaccactgcgctcggcttgtcttagggttcttgatttaaaccagtggttcttgaaatttgcatttcaggccccaccccagatctgctgaaccagaaccctgatgatgatgcccagtaatcagtgtgtttcaagccctccaggtagtttggatgccctagaatttaggaacccccgatttaaaggggcatccccatgggttgctaatgccgactgagttagcgtacaaagtgctctgcaatggctgggtgcttttcacccatcatccactgaattcacccagtgaccctgcaaggatggccattatgattcccattttacaggtcgggagactgaggcccaggggtaaagcctgaagtccctagctgggagagatgagcttagacaggaggctgggtctgagaggccactgtgcaccaggcatagtgactgtcacccccaacatacacacattctctacagagtgggggttccggggaaggcattgccactgaaatatgggcatcactgtctggggacacctcaggccttgtgtatgagaaagacaggccagagtgggagtggagggtcacggtccgcttgaggctcgccaaggcctcatctggggcatcccggaccccacagcagcagggtgggtcctctcaatgctcacccgacctgcagcccacctcaaggtgcacaggaaaggcttgctttcagaacccagtgggtttgagtccacagtttgtcttggtcccagttgaacctcccagagtatctgttttccctctatgagttatagtggaattcagcctagctatgcaggccagcaaacttaagatacatgcaccctgaacaagataaaaactggtgtttctcatgtaaaggaagtccagggtgatgaggttgctcagattcatcaaggacccaggtccctccatctttttccttcatatgtgtcatgtagctttgacttcatggtacaaaatggctgcttaggctccagctatcccacccacattccactcagcagtagcaaaaacgatgggttggtttccttcctccaaggtcatctcctagaagccacacccactactgttgcataccttccattggccagccttcagtcacatggccactccaagctgcagggaaggctgggaaatgtagtttttactccagacagccagtgccagacaaaacgcagggcttctattcctgaggagaaaagagaaaagggatactgtcagtgccacagctctccttagagggggcatcacaattcctcatccacccacctgtgtgcctcccggggctgtcaagtggtttttttgtttgtttcatttttgtttgttttttttgctggcagcttcttcaaatatcaagaatacaggagaatgcttggtgaattggatgtcctccgaccccactgtgggagtgatgttatttactgccagttcagccagagaccacctgctggaggtcagactgctgctggtcccactccaggaccagccatgagagcttccccagcccaagccttttggcctccgccagaggcttttccagcatgacactgagtggctgtcatcagaggctcttccctgggtggcggcaggttttttgggctggtgccctcacctgtcactcccaacctccccccagggtggggccatgtaaggggcattggccaggccagcatctccctcagaagcacagccctgacctggcgcagtggctcacacctataatcccagcactttgggaggccaaggcaggtggatcacccgaggtcaggagtttgagaccagcctggtcaacatggtaaaaccctgtctctactaaaaatacaaaaaattggccaggagcagcggcaagcacctgtaatcctagctacttgggaggctgaggcaggagaatcgcttgaacctgggaagcggaggttgcagtgagctgagatcacaccattacactccagcctggacaacaagagcgaaactccgtctcaaataataataaaaaaaaagaaccacagtcctgagggtgagggaagcctgtagggctagcagtctctgagagtagctgtgcaccaggctctgtgctcgggccacacatgcttggccaagctaacccagccctggatactggaagtggtggtcgacacccgaatgctagtgctcagtccccctgcctgggccctcagctcctcccatagtgttggcaggcacagtgggtgcaatgtgttgctgatctgccgccttcctggaggtctgagctctagtagcctttcctggggcactcggttaaggaggctcatccaggggccctcaccgggcacatggcaggactttcatctgagccaggccctgtgtagacttcggctccagccatgcagcttctccctggcagaggggaccgggcagttctccttccccagagcatgacttcaaacccagcccggcacaggtgtgagactctaaaccctgctggccaggtgccagctatgctccacccacctggagaccccacagggatggtgatcgggttttggggcccagagctgaggccctggattcctatgcctgaacaaagacagggatcagcctttcagaaatcagcttccctccatgatcttagggatgcagttcccccaggggcagccttgtcatgacccaggaggggttgggtagaggggggagagcactggatgaggagcacggtcctagtcccgcaggccagagctaaaagccacagtgtgatgtgacgcttgcctcactgggtcctggaagtgtgctctctcactcaggcctcaggattatcccaggagatgtgtgcagtcactatcatccccattttaccaatgagggaacagctcagagaggtgaagccatctgccccaggtcacacagcacttagtctccatggttaaagcagctgtcgaacagtcagacagacccagtttccaacctggctcttaccttttcatgagcgggacagtgctttgcccttgtgagcctcgttcctcccataaaatgggcggtgcccctccctgccccacacccctcatacggagcattgcagagctggcagtgtgagagactcaggtgagaaggtcttagggtctctgtgcaggcaggacattggcagcaacccctggtctggtgtctactctagaccgaccaggtgggcctctcggagagccggccaccctgatagctgggtcctgcaggagaggctgctgagtagggatgaagctaggacttgagtcctggtccaaggggagtgtgaccccctggtccttgaggagtgacatggcccagctccaggccacccttccatgccccaccccatccgcagctcccctgtccatgaggatggagccgggcagtggccacgcggcgcggctgcctccagcagcagatggtgctatcccactgatcttgaggaagacctgcatggtgccatccactcttccggcccagcgtccttctctgctcactgacctcatctctgtgccagcctggcaccggcccctgcagggagaggacgtgggatgggccggcccttgggtctgtgcggctgacaccagtgaggcactcacacaatgtaagcaacaaagagccagcctggcgccgtggctcacgcctgtaatcccagcactttgggaggccgaggcgggcggatcacgacgtcaggagatcgagaccatcctggctaacacggtgaaaccccgtctctactacaaatataaaaaattagccgggcgcggtggcgggcgccagtagtcctagctactcgggaggctgaggcaggagaatggcgtgaacctgggaggcggagcttgcagtgagccgagatcgcgccactgcactccggcctgggggacagagcaagactccacctcaaaaaaaaccaaaaaaacaaaaaaaaaaaaaacagagccactccaggtggtggcgagtgtgtcacatgtctacatgtctaaaacctgagcagacaagagggacacagcaggggagacaggtggcaatttgaccaggaaaacctgcctagagaggtgacatcaagcgaagaccccagtggcaagaaggagcctccctgcagggagggtgtccgtcatttgcaaaggccctggggcgcaggagttctagcccaggccctgggcagccaggccagcagggaggctgcctcggacctgcagaggggctgggatgacggaggcaggcagggcagcctttgcagggctgagccaggcactctgcattttgttctgagtgtagtcaggggctaactctggggctgtggctctatgggcaggtacagaagccacgctacttttcgttgggatcttgcttgtggcccaccctgaaaaagaggccctcgctgctctcaatgggtttgtctgagatgctcctgcagctactacctccctgcctcaaggttcctccactccctgctcccctcaggccctccctgactcccacagaaccaaggaatagaaatatccccagggcttggcccacgagaccgccagcacccgtctcctggaaaggtcatcagcaagtaccgtggagtgacaggtgacaggcccaaagtgaaaggaccacagaccggcatgaactgtgtgagctgctcaggacaggaaagggctcatgttgacaacctctacagccgctcacatttctaggaaagctaccaagacccccaggagataaagggacacggaggagaaaacccgaacatcaaagcaactcatggagccgtattcagccccacagttaccttcagcgcaggaacggaaaccaagtactgtctcaaaactgccatccaggctgggcgcagtagcttacgcctgtaatcccagcactttaggaggctgaggtgggcggatcccttgaggtcaggagttcgagatcagcctggccatcacagcaaaatttcatctctactaaaaatacaacaattagctgggcatggtggcacatgcctgtaatcccagctactcgggaggctgaggcgagaagatgacttaaacccaggaggtggaggttgcagtgagccgagatcacgccactgcattccagcctgggtgacagaatgagacactgtctcaaaaaaacaaaaaacaaacaaacaaaacaaacctgccatccagcctggacaacatggagaggacccatctctacagaaaatttaaaaattaaaaattggcagggcgtggtggtgcatgtctgtaatcccacctactctggaggctgaggtgaaaggattgcttcagcccgggagttcaaggctgcagtgagctgagatcgcaccactgcactccagcctgggtgacagagtgaaacccccatctccaaaagaaagaagaaagaaagaaagaaggaaggaaggaaggaaaaaaggaaggaaggaaggaaaaaaagaaagagaaaaagaaagaaagaaagaaagaaagaaagaaagaaagaaagaaagaaagaaagaaagaaagaaagaaagaaagaaagaaagctgtcatccaagccaggcaagtccgataaactgtcacagccaagaagagcccatgaagatgagagagctacacgcgattggtgtcctggctggatcctggaatagaaagaggacattaaggaaaaactgaggcgctctgtgtaaagcatggactttagttaataatgatggatcaatattggttcattaattataataagtgcaccacactaacacaaggtgttaataatgggacactcagcatgggatatacaggaactctgcactgtctttgtaacttttctagaaatctaaaattattctaaaatagatgtttttgttttgttttgttttgtttttgagacggagtctcgctctgttgcccaggctggagtgcaatggtgtgatctcagctcactgcaacctctgactccccggttcaagcgattcttctgcatcagcctcctgagtagctgggattacaggcacgcaccaccacacccagctactttttgtatttttagtagagatggggtttcaccatgttggctaggatggtctcgatctcctgacctcctgatccgctcacctcggcctcccagagtgctgggattacaggtgtgagccaccacacctggcctaaaataaatgtttattaaaacttattaaaaactaaaagttaagtatcattgcctgcttgccaattaataaagacaaaacaaagtaggaaaaacacacacacacacataaaatgtatccaatgctggtgaggattggttaaacaggcagcctcctgtgtgctccaaacagcatcagctgacacttttaaattgatacataatattttactatttatggggtacatgtgatattttgttatatgcataggatgtgtttgtgggtttttttgtggcacacacctgtgtgtgagaatgtgggtgtgtgttttgagacagggtcttgctctgtcacacaggctggagtgcattggtgtaatcatagctcactgaggcctcaaactcctgggctcaagtgatccttctctctcagcctcctgagtagctgggaccacaggagtgtgctaccatgcccagctaattttttttttctatagagacaaggtctcactatgttgtccaggctggtgttgaaatcttgagctcgtgatcctcctgcctccacctcccatctgctgggattacaggcatgagccactgtgcctggccctgtgcatagaacacgtgatgctcaggtcagggtgtttggggtgctgaccaccttgagtactggtcatttctatgtgttagaaacatttcggccaggcgcggtggctcacgcctgtaattccagcactttgggaggccgaggcaagcggatcacctgaggtcaggagttcgagaccagcctggccaatgtagcgaaaccccgtctctactaaaaatacaaaaattagctgggcgtggtggcaggcgcctgtaatcccagctacttgggaagctgaggcaggagaatcgcttgaacctgggaggcggaggttgcagtgagctgagatctcaccattgcactccagcctgggtggcaaaagtgaaactctctctcaaaaaaaaaaaaaaaaaagaaacatttcaagtcccctcttctagctactttgaaatataaaacacattattgtttacttttgaggactttaaatttatagcccccaaatccagagattctgcttcagaaaatcacatccaaaatacagaaaaacaaacttacacacaaagatgttcatcacagcattgtttataatagaaataaactcggaaatcatctaatattagaaacagagcagtgtggttaaataagccatggcctattatatccgctctcttgacagaagtcacaatgtttacaaagatcatctaatattgtgggaaaatggtagaatatatttattaagtgggaaaaagttgtatttgcaggatgattcattcatccagctgtcaattcagcaaataaacatttatggagggcttggctatgccagacaggccctacactgaagagttgggatgtcatgggagaagcagaccatggaccagcagttatcacctgctggagtagagcgctgatgggggtggtgctgatgggggtggccctgctgggccctggaggacgagagccaggcagcttttcaaagatgagatgcctttgaaatggtggcatcagagaaggtggggacagcctttgcagggggtgcagagaagaaatggaatctgaggagtgcagtgtggccagatggtcgtggtgggtggggaactatgcagaggcagccagagtccagccaaacccatcagaccttcttatccagcactggggagccacggagggtgaaggaggcagcaacaggatcggattgcctcaggaccatctctcaggagccacctcgagttgcttgtcctcccacattgtggcaagaccactcaccgtgacccacatcctttgtaagaggaagatcccctgcccccgccccaggacctatcagggccttcatctcgacggcctttctgccaccacattcctggcctgggtgatcaagatggacagagtctgggccccttcggagtgccacggtcactgcttctggcgtgtccacatccccagagcccaacagcccctcccctgggactacaatggctcgtgagaaaccaaacatcctctggctctggcccccgcacccctgacaacaggctgacctgatggctgtcctaggtccctcccgcctccacccaggccctgggtcctgggaagcagagttgcacaattaggggccgggggcaagacagaggatatcaaagagcgtgcttacccccaatccaaagcacatgcgtctgtgctgaagagggaccaccatgggtcctggggggccccctctgctgtgacccagggcaggacctgctgcctgcaaatgcccaccggctccaaaaggtgccaggtagatagagatcagaccatgccaccagcccatgcacaggaccctgcctcccttgtccacattcttgttgaggcctcactgcaagggtaggaggaagtgaggctcagagaaggtgggtaacttgcctatggtcacacagcaagcgatgagcaaagtggagcccctcagaggtctcccaccaaggaggccatgtgtttgcttctaaaaatgcagcaagccagctcacaatgtgtgtacagcacccggcgtggcctcagccagtcaaccgaggttccactgacttccgccacacagactcaccaggctagtgaccctcactcctgctgacgtgctggcccacgtccttggccactaaaggccagggcccagatgctcacactcattcctgggccagcagcagtcggtctgatttgttcccaattcggcccgggcccactctacttgtaacagcaacgaggaaattcaatgaatcctaaaactcactgatgaaatacgaacctccaagagagagatgatgttctcatggaaacgttgtctgctttggaaagattctgtgaaaatgagttaccaaaaagtcatgccggccaactgggatgggtgggactacaggaaaagatgagaggagaaattcacaagcgcgtccagatcctgctcccaggttgtttgtgagcctcttaaaatggcttttgccctgaactaccaggttcacttccctgtggctcactgtacccgggtctccgctgtctttctggttgatgtgcaacgtgattctctatttcttggcaccagtgactagtttcaaggagaatttttgctagcgactcatgcctctgcctcgcctgggaggtgtttgcagcaaccagaaatctctgcttttgacacaaagctgactgggccccaacccaaggccagccgagccaggctttttaaagccctgctagctcgcagcctcttggattcagctcccaaggctgctgcctgggcttccctaagcaaggctgctcgtgtctcctctaggcctttgcccatgctgtgcttcctgcctggaagcactgtcaccgctcaagcccggctgtaggtccaccagatgccacttcttggaggacacctccctggcccttagactaggtcagtggctactggtctccttcagaccctacctgtagagccctctcttcctctttcttaatcctcaccctacaggtaattcctagctctgtgtctgcttctcccctgggatgtcagcttccccacggtggacatggtggcatttctgctttgtccacactgcctggagccaaacttgcatccacagaagtacagccaacatttgttgaatgactcgccaggattcaaagtgggcaaggtactccctagactctagacctgatgccatcacaaggccagtaagagagggaggcgacgcagtctcgagctcacagacccagagtggctttgcaggttggcgtgttcccactccaggctggctcctaggcctcacacacccactaggcttccgctcccatcgctctggagggttcacggctgccacttattgtcgtcctgatgctgggacccacccgaggcattgaggagcacttgtccagagactggcttcccaaggtgggaatgtggaggggggcagcccagagcgaggcgtaagacagtaaaaccacctaagcacttcatcttccaggcagtaaggacacacacctgagtcacttggcaatatgctatctttggaccatggtgccatctctttagtagaatttgaagtggcatcactttatccatgggagtcctttctgctcgctttttttttgtttttagacggattcttactctattgcccacgctggaatgccgcagtgtgatctcggctcacagcaacctccacctctagggttcaagtgattctcgtgccctcagcctcccaaataactgggaccacaggcgcatgccaccatgctcagctaattcttgtatttttagtagagacagggtttcactatgttggtcaggctggtctcgaactcctgacgtcaagtaatctgcccaccttggcctcccaaagcgtggggatgacaggcgtgagccaccacacccggctctgcttgctttttttcaaaaaagtttcctccagctgagtgcggcagctcacgcctgtcatcctagcactttgggaggctgagactggcggatcacctgaggtcaggagttcgagaccagactggctaacatggtgaaaccccttttctactaaaaatacaaaaaattagccgggtgtgatggcagatgcctgtaatcccagctactagggaggctgaggcaggagaatcgcttgaatccgggaggtggaggttgcagtgagccgagattgtgccattgcagtccagcttgggcaacaagatcaacactccatctcaaaaaaaaaaaaaagtttcctcagttattatgtgtatattctattaaaggaccccccccgcccaccccaatttaggtgagcaaagccagcagccatctggtcctggaaatcaaggggaggtgaactcatttatccgggagctgcagcctcccagagaattcggctgcagtgaggggctcctgggttcccacatttccaagtagacttcatggagtgacccaccgtggggccgggggactggccactgctcctcattgacttaggcactcccaccacctcctgcgactagccctgtgatttcatgaaaaacgtaagcacgtctgtgaaactgagaagccacaggcacctcggagggccagccaggttttattttggtgtccgccccgtgtttgcccgtcggaatttcagctgagccctcctcgaagctgcagatgccaggggccgtatttaacttgaatgggctgctaggaagaagtgcgggcctggcctgacctggttctcagggaacgacccctgggcctgcagcagctattttaaaggaggctgccatttggtcttcgccaaaatagttgaaagaagaccccagaatagcaggctgggtctgccccggcttagaagccgcatctcaggcttagaggcaggcgcgtgggatgtcagggagcaggcggcagaggcagaaaaaagcctcttgtcactgaggccggaggcccaggaatggcccttggctgcctgcgaggaccctgcatccctggcctcaaagaggcgggaagccccgcaggctgatggagagaggcaggactggcttgggagagcagaccagaatagatgcctgctcttttaggcgtgagttcacctaacatcagccgccacctcactgccctaagatgtgagtgagtgctaagatttcccacaaatgagaagactgagggtcagaatctgcccaaggtctcacccagagtgagggagagccaggcggtccttacaggccttggaggctgcaatgaacccgtgaactccccccatgcaacggcagcaatcatgatgaccatggcaggtggggaaataataatttactaacacgagtgactccccctgctgttccctgagccctggagcggggataggagagggggtgagggagcccttactccaccaggcagggctcagcttggcctccccacaatagatgagtgcacagtgcagagagtactttttatccagcgtggtccctaagggcaagctgcctgcttcatcccatccagaaaaatagccaaccctggagggcaaaatgcctctgggacctgctgggaattggcttctggaaggaattttccaggacactgactcagtgaggtcttcctttgcccacgctgactttaagacaccacttggtacctgtcacgtatgcttggggaagtcacctcctctctgggcctcagtttctttactggtgaactgagatggatcatccccgcccacctcttggggttcgtgagtgaatgggaaacggggctcccactggcaggctgatggggggcatgtgtccaaggactgggccgtcttccctgcaccctcgccctctacccagcattgctggatcctgctgctatccgccccatcctgtgggcccctcagggtcaaatgcagtcctttacgccaccagcctcggagacagaacatcagccttttcatgcacagctgatcactgggtgaatcgaggccctagtgctgcaggtgtccaggcacaggtgagttccccgagccctcctggtgcgctccgagagcatgagctggccatgcaggctgctctcgggctcagggtgcgtggtggtgagagtggaacaggtcaggtggccccagtcctgcttgcctggaactgtgcaggggtgcacccctcgtcccagggtaatagtgaggggcacttcctttctttctgaaaaggcccagtttggactgtcctgtgatcaccttgtgataggcgactggacttgagaagtcaggcaaagcttcccagaaaggtcaaggttgagctgaggtctgatgggcacataggggaaggaatagttctccaaagagtctctgctccatcccaaggccacacccgcagctggagcccccacttcctcctgcctggtgaatgggaggaacagagcacccagccacggttccctttccccaccttccctttcacaggctctttctcccactttacaaaagaaaggagtgctccttaggtgctagagcctcagggcaccaaacaaagctgcaatgtggaccagcagccgacactccttccagctctctcaggcctggaagcagcccggggagggtgcagggtggcgtcagaagtggccacccgtttggcctgccctggagagctcctaacagatgccttgggagtggagggccagggacctgcctatttctttcagtgacctgtgcctcccaaacccatgcccttgacaaagatgcattagagcagagatgtccaatctttttttttaactttatttatttatttatttacttgtttgtttatttttgagatgaagttttgctctttttgccctggccggagtgcaatggcgtgatctcagctcactgcaacctccgcctcccgggttcaagcgattctcctgcctcagcctgccgagtacttgggattacaggcatgtgccatcacccccggctaattttgtattttcaataaagactgggtttctccatgttggtcaggctggtcttgaactccagacctcaggtgttccgcctgcctgggcctcccaaagtgctgggattacaggtgtgagcctatttatttatttttcgagacagagtttcgttcttgtcgcccaggctggagtgcaatggcacgatctcagctcactgaaacctctgcttcctgggttcaagcgattctccctgcctcagcctcctgagtaactgggattacaggcacttgccaccacacccagctaagttttgtatttttagtaaagacagggtttcaccatgttgcccaggctagtttcgaactcctgacctcaggtgatccgcccacctcccaaagtgctgggattacagatgtgagccaccaatcccggctgggtgtccaatcttttggattccctgggccacactggaagaagaattggcttgggccacacatcaaatgcactaacaacaatgataactgataaactaaaaaaaaaaaaaaattgcaaaaagataatctcaaaatgttttaagaaagtttatgaatttgtgttgggccacattcaaagccgtcctgggctacttgtggtctcaaggccacagtttggagagagaggcccaggaaaggaggcaaaaatcctggtgagcctagaagtcgccaggtgcccagctccaggcagggatctggccctttctcttcatgtctgcatctcctcctacttcatagagtcagaaatcagaagcagggggtatactctggagacgcagattaactcacttgtttgaattggaaaatacaatccgaggtcttccaatggtaagtggcacatggctgtcactgagaaaactggctttactgattctgtggctatacggggaaagctgtctaagtgttgcctaggttgtgtctgcagctgcaaggttcggaaagaaatagatataaacccgcaatgcattggaagctttgtatcactatagtactggcgaagccatgttgaaattagcaacagtttcattcccagtcttccccattttcattatatcaggtttaataagtctcctccaagtaaaaaagtaactggtataattaattgttcttggcaaaaaagacctttgggctgggcatggtggctcacgcctgtaatcccagcattttgggagtccgaggctggtggatcacaaggtcaggatttcgagactggcctggccaagatggtgaaaccctatctctataaaactacaaaaattagctgtgcagggttgcaggtgcctgtaatcccagctacttgggaggctgaggcaggagaatcccttgaacctgggcggcagaggttgcagtgagctgagattgcaccactgcactccagcctgggtgacagagtgagactctgtctcaaagcaaacaaacaagcaaacaaacaaataaaacctttggataaaatttcccgaagttgagaaagtgcagctccaatgactggtgagtctttgctatcaaggaattaagagaggagctgccgaccagcctgggcaacacagtgagatcccaactctaccaaaaacaaaaaaaatttagctgggcatagtggcacatgcctatagtcccagcttcttgggaggctgaggtgggaggattgcttgagccagggaagttgaggctgaagtgaggggagattgtgccaccgtactccagcctgggttcggagggagaccctgtctcaaagaattaaaaaaaaaaaaaaagagctgttgatggtgtcagcagatcaagcaggagacaccattttttatataaaccaggtgattgagtgtataccttggcgagtgttcaaatccttgagtgacatcaccataacgaaacttcaattctgtgtcttccacctgaggacaaggcttcttggctttgccatcaacagaaatagaaaatgggaatgaaattgaggccaaacgccatattattctagcaataagtagtggtcatatgaaatttttttttaaagccctgtcctaggtcacattaaaagattcatttcggccaggtgcggtggctcacgcctgtaatcccagcactttgggaggccgaggcaggcggatcacgaggtcaggagatcaagacatcctggctaacatggtgaaaccccgtctctactaaaaatacaaaaaattagccaggtgtggtggcgggtgcttgtagtcccagctcctcgggaggctgaggcaggagaatggcgtgaacctgggaggcagagcttgcagtgagccgagatcgcaccactgcactccagcctgggcgacagtgagactccatctcaggaaaaaaaaaaaagattcatttctaccagaattttatttgtgctctttacttatcaattatgtgatattacattcatggcattttgattaactatgtattagtaaaagttgtttaaagtaaaatccagaacaaaaccatttaatgctaacagtcataagaaattcatttgtttgtttgtttgttttgagattaagtctcgctctgtcacccaagctggagtgcagtggtgcgatctcggctcactgcaacctccgcctcctgggttcaagcgattctcctgcctcagcctctgagtagctgggattacaggggcacaccaccatgactggctaatttttatatttttagtagagacagggtttcaccatgttggccaggctggtcttgaactcctgacctcaggcaatctgcctgccttggcctcccaaagtgctgggattacaggcatgagccactgcgcccagcctaggaaattagttttttaaatatttcatttattgcagtgaataatgatagagtgaacagccaggtgctgtggctcacgcctgtagtcccagcactttgggaggccgaggcgggtggatcacttgaggtcagaagttcgagaccagcctggccaacatggtgaaaccccatctctactaaaaatacaaaaattagccccgcgtgttggtgcaagtctgtaatcccagttactcgggaggctgaggcaggagaatcacttgaacctggaagccagaggttgcagtgagccgagatcgtgccactgcactccagcctaggccacagagcaaaactccatctcaaaaagaaaaaagaaaaaaaaaagaataataataaaatgatcaatgaaagactttcgaggttaaaatacaaagataatgggtgagggtttataatatttgtctgctggagtaaagcttattcatgtattttttctaaaataaaagatggcagctgtcaaactggtattgttatagactccactggacacatttttaaaagtaacagaagaggctaggcgtggtggcttacgccagtaatcccaacattttgggaggccaaggcgggtggatcacttgaggccaggagttcgagacaagcctgaccaacatggcgaaaccctctctctactaaaagtacaaaaattagccagacgtggtggtgcacacctgtgatcccagccactcaggaggctgaggcaggagaattgcttgaatctgaaaggcggaggttgcagtgagccaagatcacagccctgcactccagcctgggggggcacagtaaaactgtgtctcccccaaaagtcaattaataaattaattagaagtaacagaaggcccagcgcagtgactcatgcctgtaatcccagcactttgggaagacgaggtggaggatcgcttgtatccaggagttccacgctagcctgggcaacacagtgagacaccatctctacaaaaaacaaaaagaaattagccaggcatggtggcgtgcacctgtagccccagctgcttgggagactgaggtgggaggaacccttgagcccaggagtttgaggcttcagtgagcgatgattgcctcactgcactccagcctgtaacagagtgggaccctgtctcaaaaaaaaaaaaaaaaaaaaaaaaaccaagaacaagaacaacaaaaaagagtaagagtattttaaatcattcatagttaaaatgtaccagagattatccttatccctctgagcccttgtccctgctgaagtcctctcatctgatctcctatcttcttggacaaagaaacacacatatgtcccaagaatcaagtaatgcttttcagaccaaggtcaatctaaatccaaatttgagtgaaggggtgggtgcatcctgccttcagtgatccagatttacaaacccacatgttataacaccaagttcagaactacccgagagcaaaggagacgtgacttctgtgtgaacaagggactcctccctgataggggagggtgggccccaaagcttcattctagtttttgtcctatgatcacttgagcatccctctcaatcccaatggcaagactccagaatgttcccatccaggtgccaccatagacacctttcttagggtcccccctagatctagtcctcaggcaacacctcttccagggggtgggatggaacctggctttgctgtcctggagggagacagggggaaagagaaggaacccgcctgaggcatggatgtctcacacagccagggccgggtggtcaggccttccccaggcctcgagtccatccagggagagggaggggggagggagggtacagttgccaagactgactttgaatagaacttttcttccacctcctccctaccaggatgcttcccttgaggggcctgtggtctgaaatctggagaatggggagcctctctgcttccccactggtatttcccatcttctctcatggagacaggtggaatcccatgcccagtggtggtgtcagggaggaaagtgggcttctcttccatgttgctgggagaccctgaggaggagggacgggaagaagcaagtggggaggaggcacaaccccaccaccctgagggtcagcccaccaggcctgtggggtgctccttctgctggggaaggttgtgacctcaaggattccctggcatgccccatggggtgagctgagcccatggcaccctggctttcagcacccctcaaagggagctgaaacccttcctgggtccacaaagtcctgcccatccctctgacctcatgcacccacccagcttccacacactggcttcctgaagctcccactcttccaccttggctggctcctactcaccctttctttaggtctcggctgaaatgaccctgtccctagatcccatgactctcctgagcaggcactccataaaggctcactcagctgacggggtgccagacccctgagcgggaaaggtgggtccttaggtaacatgggggagccctttccttcttggccttccactggcttctgtgcaaggaatgggtcactttagcagcccttaggtgagtcccttctggctctgaccattttttatttgaaatattaaagagactgccgggagttggaggcttggtggtctgttttgtgatcctccaaatgaacaaatcaactggggttatgatatcaattcatggagcttaagccccactctgatgctgacagaagagttcacctgcacagtttgagcccctgacatccctctgaggcagacaaggtccagaccaccagctccattttgctgcaggggaaactgaggcagacagcagcatggtcaggggcctgactttggcgtacacagcaggagtttgagttttggcttagctctttgctagttccatgaccttgagtgagctgctcagaggctttgagtctgggttaattcttctgtaaaatggtgatgaccagcagggccacaccctgcagggctgggtgagaagaaaagacgatcagccttgcaaagcagccccaccctgcaccaaacccgctcctgccagcacctaatgaacgtggcagcgatgacttttatctggagaggtactggcgatcctgccagctcacagcccgtggataagacaccgggcactttacatgtctaattcttctaattccctagcaagcaatgaaggcagacatcgggtcctgagaggctcagcaaatcacccacattccctcagtggtgagagacgccaggacctggctccccagccctgcactcaagctgggtagtcacaccactcagccagcgatggctgtgggcacacatcaccgtgtgcctgcccgttctaagggctgaacgcacattctctcatgtaactattccagaagccctctgaggtgagaacgctgattttccacattttacagatgaggaaactgaggcatggcttgtcttccatcttcccagggttgagtatctgatatgtgcaaaagatctgcacgcgtgtgcacagggaggcaggtggttttattgattcgcagtcattgaaaccgcccccaaagcctgtcgcccagacctggctgggccaccttcagagtagaagagaaacagggcagaataacgggagaggggaaactctcctggacgcagaactgggtaagacatcgctataagccaaggagtgacctgctgtctctttaatgccccaggatcaaggtaacttgaaaacaacaacaacaacaacaaaaaacaaacaaacaaacaacaacaacaaaaaaacatggaaaacagtatggcagtttctcaaaaacttaaacatagaattatcacctcatccagcaattccatttctgggcatattcccacaagaaatgaaagcaggaactcaaacagatatttgcacaccgaggttcacagcagcatcgtccacagtagccaaaaggtgggagcagctcagggaccgctgacagataagtaaataaataaaacgtggcccatccatacctggaatattattcagcctctaaaaaagaaaaaaagaaagcaaattcccacacatgctacatcgtggatgaatcttgatgatgttatgctaagtgaaatcagccagatacaaaaaggacaaacattgtgtgattccactcatgaggtccctaagtagtcaaattcgtagacacagaaagcgaagatggtgggtgccggggctgggggagcagaatggggagcgagtgtttaatgggcatggagtttcagtttgggaagatgaaaaccatctggagatggatggtggtgatggttgcactagaatgtgagtgtccttaatgccacttacccgtgcacttaacaatggctaaaatgagagaggctgtgagtgtgtggggacagagggtgtaagggaactctctgtaccttcctctccattttgctgtgaacttaaaactgctctgaaaaaagtcttttaaaaaatagttaacatcaggccagacacggtggctcatgcctgtaatcctagcactttgggaggccgaggtgggtggatcacgaggtcaggagaccgagaccatcctggctaacacggtaaaaccccatctctactaaaaatacaaaaaaaaaaaaaattagccgggcgtggtggcgggcgcttgtagtcccagctactcaggaggctgaggcaggagaatggcgtgaacctgggaggcggagcttgcagtgagccacgatcgcgccactgcactccagcctgggtgacagagcaagactccacctcaaaaaaaaaataggttaacatcaattttatgttatgtatcatgtatattttaccacctttttttttcttttttgagacggagactcgctctgtagcgcccaggctggagtgcactggcgcgatctcagctcactgcaacctccacctcccaggttcaagcgattctcctgcctcagcctcctgagtagctgggattacaggcatgcaccactacgcccagctaattttgtatttttagtagaaatggggtttcacaatgttggccaggctggtctcgaactcctgacctcaagtgatctgcctgcctcggcctcccaaagtgctgggattacaggggtgagccaccgcacccaattaacaccattttttaaaaagctaaaaaaaaaaattggctcaatctccccttattctgaaggtcctaaagaaaaacatgccacttgctttggggtgcttcggctcagtgtagaccagtctatcccaccggccttatcatcctcctggacttttgcagaaagacatcattgtgagggtgtcttgctgaagccaagaaagggaagttgaattgagaaagcagttgagctatttacaaagtttacacagcctgggcccttgccccgggctgagctcagtcattttgccctgaggactataagtggactattatgcagcactttcttttttattattattactattaagccaagtaagttcttaacagctaacacctgagctggtggctctgagaagcctcttcactccttcacgggagacgggaccattcacatgaagatcctacattgttgtttttttttttttggaggtcgaaaaaggtcactgttaggaggctttctgggcctttgctcctctccctcaatttattacccctccagtggctgatgacgtacagggagacttccacccgataatgacatggctttgtttatttcacaaattcccagcatttactgttaatcagacccagtttgaaccacccccaaggggcttgcagtctaaacagctcactttgctcagcctcttcctgaggtcaggcactgtcttgctaaggccgacatcagctcatgcccattttacagatggggaaactgagaatgctaagaagtgaaatagcgtaaggttatacaactaacagggagacagcctaaacttgaacccaaccggaagcccaacatggccccaagccttcctcgaaccccaggacttggcaaagcgggcgtcctggggtaaagcatggcagaagggctttgggtccaagctaagtgagggtcctgtttctagatcacctggccaggtgcagtggctcatgcctgtaatcccagcactttgggaggctgaggcgggaggattgcttgagctcaaaagtttgagtccagcccgggcaatacagcgagacctcgtctctactaaaaaagaaaacaaaaaattagctgagtgtgtagtcccagctactcaggagactgaggctggaggattgcttaagcctggaagtttgaggctgtagagctatgatagagccactgcactttagcctgggcaatggagcaagatactatctcaaaaaaaaaaaaaaaattatatataggtccccttgtccctctgctgagaagtaaccagatctggaaaagatttagtcaccttggtccaactatttctttcacataaagaaaaaaaaaggcaatgcagaccttcccatgggggcagctctgcctgaggcctttgcaggtacctctgtttgtctgccccggggcacagtggcagattgggcagggcagcttgcagtgaggattgctgatggatgagctcctagtgtacctagccagccatttactcacaaacagctattgagcacctactatgtgcccagcactggaggtacaactggcaacaacacaaatccgggcttgctccatggaggtgacaatctaaatgcggtggagggtcagctaacaagtgcagaaggttctcttaagagctcaaagaagctccaaccagaaggactgggcaggggatccagaaggcatccccgagtggctactccaatggagtggcttctccattcaggcaaacctgaatgggataagtcattggcaggaagatctggggccgggggtcatccagtgggaaggggagagatgacgcggtcagcatggcgggaacacaggagcagaaaggaagcaggtgggaagccaggtcaagggccaggggcacggaaaggggtcagatgcagataagtgagtgcttcctggtgcatccttcatccgcaattcatccttacctgtgcttttgttgcctccattgcacagctgaggaggccagggcctgcggaggttgagagtgtgctcagggagcccccggagcaaagtggaagccagattccagatcagttctgctgggaattcccagctcccaaaagccctgctggctgtcagtccccagtcaccacaagcacctatcctgtgtgggtgggcctgcagttctgggagatatatcagctgcctgcagcgtcctttgctgaactcacagcaaataggagagacagggaggggtccttgggaagccctaaattgagcttgctgtgggagtcctgggaagaaaggagcctcatcctatcaaaagccgggggaagacatcagagtccctctgctcaggtcagctggcacaggtgggtctccaggcctgggtctcacttccccagagggtgtgttcgggtggccccaggctgagggaggaaagcccacctcccatgtcattttgcaaatggggagtcagggacctagagatggaaagacaacacagcaagtgagggatgggttctaggtcccctgcaccctgcaccctgcaccctggccaacgatgtctatttggcaccagatctgcaggctcatctgggggaccccaggacccagaggcagccgggttgcatctcgaagctgtgagctgcagcccaggaaggtccaggtctgggtggcgctgcccaagcaggctgcaggcccaaggaggaacaaagatcctctcaaggggtgcggagctgaggttccggtcctgccaaagccacttgatgacccccaagtgcccccctttctgcacctcagagaagagccctcaagcctcccaggtcccctccaggggcacgaataagccccagcagggttctgaaggggtcccaggaatctccctgtggggatgcggtggaggtggaggaggctgcggtggcctggggacatctctggtcacaggtgctggtggtatgagagatggggtaggcaccaagccccctgcagctgtggctaggcgggcctgcaggaagggccaggcaggctcctcagggaccacaaagaacaggggttttcacacctaggtgggcctgcatctagctaggccagtccccatcaggccataatgggcacagtgggaggtagaaccatgagtgagagaggggaggcttccagaggcctggcctgggtccctgctagattgagggctctggctatggtacatggatatttctgctgtggaatcaaaggagcaggggatgctgaatatcccctctggccctatgccctgctacctgtcctttcacggaagggtgtgtgtgtagggggtgcaggaccaggcctccctgggtgcatctctgccaccttgccctttggctcaggtggacctccaccaggtattcagaactccagcccagaaacgcgccaagcctgtggggccaagacctagggggtgggggtggcctccctcccgcctgtagccaaagggtcctcccttgcccagccaggccccggtgtcgcttactgctcttatccacccctccttcccaggccggtcctcaaggccccagcaaaggaaccaagttcccgtgagcctccgaaaggcgaagggcaggcagcagccgctggcttctgcgcccactaggagcttcggatgcccgagttagggctgcgccaaggcggccggagcagagagggagacggggacggggacaggcagggacaaagtgcaagaggcaaaactggctgaaaagcagaagtgtaggagccgccaaggggcgggacgaacaggtccgtgggccgggcggagccaagggtgggggccggggtccctccaggtggcactcgcggcgctagtccccagcctcctcccttcccccggccctgattggcaggcggcctgcgaccagccgcgaacgccacagcgccccgggcgcccaggagaacgcgaacggccccccgcgggagcgggcgagtaggagggggcgccgggctatatatatagcggctcggcctcgggcgggcctggcgctcagggaggcgcgcactgctcctcagagtcccagctccagccgcgcgctttccgcccggctcgccgctccatgcagccggggtagagcccggcgcccgggggccccgtcgcttgcctcccgcacctcctcggttgcgcactcccgcccgaggtcggccgtgcgctcccgcgggacgccacaggcgcagctctgccccccagcttcccgggcgcactgaccgcctgaccgacgcacggccctcgggccgggatgtcggggcccgggacggccgcggtagcgctgctcccggcggtcctgctggccttgctggcgccctgggcgggccgagggggcgccgccgcacccactgcacccaacggcacgctggaggccgagctggagcgccgctgggagagcctggtggcgctctcgttggcgcgcctgccggtggcagcgcagcccaaggaggcggccgtccagagcggcgccggcgactacctgctgggcatcaagcggctgcggcggctctactgcaacgtgggcatcggcttccacctccaggcgctccccgacggccgcatcggcggcgcgcacgcggacacccgcgacagtgagtggcgcggccaggcgcgaaggggcgggggcggggggcaacggccgccgggccaacccgctcagtcacactctgagaccctcggcgggcacctgctcgggggccccgggaaccggggcggactcgggctccggtcccttctgacgcggggctggggacgcagacactcttggctccggcagcccagcgcaacccctgaggccgggcgccgcctcccgccttcagaaactcgggctccgagcgccgaattccagcgccttcgcccgtgggcacagggcgcgcggtgcagccacagggggcccgagacacgcgccccggcctggcccaggctggggaaccgctggggtcgggctcgcgtctgaaggtccgggactgggtgcggccgccgggggtcccctacacaggcaagctaatctgagctagcgcaggcttgggctccggaggccctagagggcagcttgggctctggaggcccttgggggcggctgcgccgggaaccctggccctttatccccaaccccaccccagaaatagggtccccggaggcgaacaagccgaggggcggagtgggccagggatcacctgccccgcaatgacctgcgccccgcccccaggcctgctggagctctcgcccgtggagcggggcgtggtgagcatcttcggcgtggccagccggttcttcgtggccatgagcagcaagggcaagctctatggctcggtgagtaccgcaggggtctggctaggcacctagttgggaacagcggacatggctagcaggctcgtggcttctccagccccacctgtgcctgggtcttggaggggtggcagggtcaccaggtcacgggaccggcaggcctccccagacaaaggaagcagccccaaggcaggaacaatgaggttcctgccatccctgagtgggcccctcccagaccgaggaaagggcgctattgagagcccttcccttctctagtccagaggggtaggtctcagtgttggaactgcgggcttgaggctggacacggagggaatgaattctctggctgctaggtgcagggcaggtggtgagagcaccagctgttgtgggctggccatgtccccttctcaccctgtgtgggtcttgacaccttaactgctcagcagagacatctcagcccagggtggggggtgggacagaagggggttctgacccctggcttcaggctgggtaccttgcccaagaggtgccccagccctgacactgccctgctttgctgcagcccttcttcaccgatgagtgcacgttcaaggagattctccttcccaacaactacaacgcctacgagtcctacaagtaccccggcatgttcatcgccctgagcaagaatgggaagaccaagaaggggaaccgagtgtcgcccaccatgaaggtcacccacttcctccccaggctgtgaccctccagaggacccttgcctcagcctcgggaagcccctgggagggcagtgccgagggtcaccttggtgcactttcttcggatgaagagtttaatgcaagagtaggtgtaagatatttaaattaattatttaaatgtgtatatattgccaccaaattatttatagttctgcgggtgtgttttttaattttctggggggaaaaaaagacaaaacaaaaaaccaactctgacttttctggtgcaacagtggagaatcttaccattggatttctttaacttgtcaaaagttgtcacgagtgtgctgctattctgtgttttaaaaaaaggtgacattggattccgatgtcatcccctgtagtatggcgtggagcatctctgtctggaaaggcccgcctgaggcttgggcagccagttcagggagctcccaggcttggctctcggctagcatcctcagaggcccactccctttgtgccctgttgctattaatcgggacatatcggtttacttcgggtacagaaagtgcggtgttgaagtcctcgctgccactctgtttttagatctgccaagactgacctttgaactttcctgtagtcaatcttcctcgatctaccagatgggagagacccttggacaactttataaactcctgtttgccttttttggatcagcgacagcccccatcgctgtgactattggggaaaagacgaagctctttcataaattccatggagaggaatcaatatcccactggaaggctagaaatggacaagatagtgtatttgcaatcacaaacaaaaccctagtgatgaaaaataatttgtgatggcagatgcttctgatggtgtgatagaatatgtttttgaaaacaaaccatcgaaccccccgccccacccccaaaacgggcttccctgtgtttagggagctttgggctagaactagctacgatttttaggtgaaatgtccttgtaattgtacaaagcacttggtgcagtgtttgcgtggagcagcctgctgctttctgatgcattccctgtttaagtgcgtttaacatctacctcacaagccctgaaaccccaggcaaaacccacagaaagctcatacccggtgcaggagtttgccatcccaagtggctttttttccatatgtagccaaaaaggattgcagatagcgtcggtgcgtcccattcgaaccttgtcacgtttgagctatctttaccctgtgatttacttttagtaagggtgatcatggtgaaaatatttgcagacagctgttacagtacactatatggtcaccaagtaaccttatatttttctttatatattttacaaatgtaacccctgtcattga

SEQ ID NO: 1003 - DNA, 1749 bp, Homo sapiens
tccccgcaggagcactacagcgccgagtgcgagtttgtggagcggatccacgagctgggctataatacgtatgcctcccggctgtaccggacggtgtctagtacgcctggggcccgccggcagcccagcgccgagagactgtggtacgtgtctgtgaacggcaagggccggccccgcaggggcttcaagacccgccgcacacagaagtcctccctgttcctgccccgcgtgctggaccacagggaccacgagatggtgcggcagctacagagtgggctgcccagaccccctgctatttccagagccagctcaaatcagggtccagtgggaactgaagagggcccaagtcggagctcggagggggctgcctgcaatgcagggcatttcacagcagaatccgcgctggcatcagcctgcgtcagctgctgctttaagaggaagacggcattcccagaaatcgggctaaagatgatgaccctgagtcctggcaaggggaacttgcccggggctgtgtcaacacaggggaagcagcagtactcagtgctgcaggatcaacagatggtccctgatgaaggcgtaggagacactgggggctcttgtttaacatgtaaaacagctttgacaagagaatgtggatttttcgcagctgatggctgtgccatggtcaccttcttccccacaccagagtccaagggacttcattttgtgggaagacagccttgcctgggtgaagccaagagactaaggacccacactacccggccccctgcatcccagccctggagcccgcttgaccttctctgcgtcggatggagtcagtacttcaatggggagggtaggacggctgtgggtgcccgagcttcagctgctcggagcgggtctttgaactcctcaacaagaaatccaagggcttgtgatgggaagccctggggcctctttgtgcagaaggcttcttcaaatatcaagaatacaggagaatgcttggtgaattggatgtcctccgaccccactgtgggagtgatgttatttactgccagttcagccagagaccacctgctggagcctggcaccggcccctgcagggagaggacgtgggatgggccggcccttgggtctgtgcggctgacaccagtgaggcactcacacaataaccaaggaatagaaatatccccagggcttggcccacgagaccgccagcacccgtctcctggaaaggtcatcagcaagtaccgtggagtgacaggtgacaggcccaaagtgaaaggaccacagaccggcatgaactgtgaaagctaccaagacccccaggagataaagggacacggaggagaaaacccgaacatcaaagcaactcatggagccgtattcagccccacagttaccttcagcgcaggaacggaaaccaacattgctggatcctgctgctatccgccccatcctgtgggcccctcagggtcaaatgcagtcctttacgccaccagcctcggagacagaacatcagccttttcatgcacagctgatcactgggtgaatcgaggccctagtgctgcaggtgtccaggcacagagtcagaaatcagaagcagggggtatactctggagacgcagattaactcacttgtttgaattggaaaatacaatccgaggtcttccaatggtctcggctgaaatgaccctgtccctagatcccatgactctcctgagcaggcactccataaaggctcactcagctgacggggtgccagacccc

SEQ ID NO: 1004 - protein, 495 aa, Homo sapiens
MVRQLQSGLPRPPAISRASSNQGPVGTEEGPSRSSEGAACNAGHFTAESASACVSCCFKRKTAFPEIGLKMMTLSPGKGNLPGAVSTQGKQQYSVLQDQQMVPDEGVGDTGGSCLTCKTALTRECGFFAADGCAMVTFFPTPESKGLHFVGRQPCLGEAKRLRTHTWPASQPWSPLDLLCVGWSQYFNGEGRTAVGARASAARSGSLNSSTRNPRACDGKPWGLFVQKASSNIKNTGECLVNWMSSDPTVGVMLFTASSARDHLLEPGTGPCRERTWDGPALGSVRLTPVRHSHNNQGIEISPGLGPRDRQHPSPGKVISKYRGVTGDRPKVKGPQTGMNCESYQDPQEIKGHGGENPNIKATHGAVFSPTVTFSAGTETNIAGSCCYPPHPVGPSGSNAVLYATSLGDRTSAFSCTADHWVNRGPSAAGVQAQSQKSEAGGILWRRRLTHLFELENTIRGLPMVSAEMTLSLDPMTLLSRHSIKAHSADGVPDP

SEQ ID NO: 1005 - DNA, 1550 bp, Homo sapiens
gacctttcagagccaggagggctttcgggggcgtggggcgcgctgcggagcggagccgcggctcgacggcggtgcgctggcggcgagtgtatgcagacggcgcccggcccgaaccccgagccccgcggggctccccacccgccggcctcccgcccctcccgcgcctccgcctggggaccacgtcggccttttgttggcgaaccgtcctttctttcagcgctttgcgcagcaacggaaatttcattgctcctgggtggaaattaaagggactcgcgttccctctctccctctccctctcccactctccctctctttctctctctcgcccacccttcccccttcttcccccacctttcccgcgaagccggagtcagcatctccaggcgcgggatcccgctccgagcacctcgcagctgtccggctgccgccccttccatgggcgccgcgctcgcctgcagccgccgccgccgcggggcgggcgcgatgccacgatgggcctaatctggctgctactgctcagcctgctggagcccggctggcccgcagcgggccctggggcgcggttgcggcgcgatgcgggcggccgtggcggcgtctacgagcaccttggcggggcgccccggcgccgcaagctctactgcgccacgaagtaccacctccagctgcacccgagcggccgcgtcaacggcagcctggagaacagcgcctacagtattttggagataacggcagtggaggtgggcattgtggccatcaggggtctcttctccgggcggtacctggccatgaacaagaggggacgactctatgcttcggagcactacagcgccgagtgcgagtttgtggagcggatccacgagctgggctataatacgtatgcctcccggctgtaccggacggtgtctagtacgcctggggcccgccggcagcccagcgccgagagactgtggtacgtgtctgtgaacggcaagggccggccccgcaggggcttcaagacccgccgcacacagaagtcctccctgttcctgccccgcgtgctggaccacagggaccacgagatggtgcggcagctacagagtgggctgcccagaccccctggtaagggggtccagccccgacggcggcggcagaagcagagcccggataacctggagccctctcacgttcaggcttcgagactgggctcccagctggaggccagtgcgcactagctgggcctggtggccaccgccagagctcctggcgacatcttggcgtggcagcctcttgactctgactctcctccttgagcccttgcccctgcgtcccgcgtctgggttctcagctatttccagagccagctcaaatcagggtccagtgggaactgaagagggcccaagtcggagctcggagggggctgcctgcaatgcagggcatttgtgggtctgtgtggcaggaagccggcagggaagggcctgagtgccagccctggcagactgaggagcctcccaggagcagcggggcagtgtggggctttgtgtcatcacaacattaaagtattttattctact

SEQ ID NO: 1006 - protein, 237 aa, Homo sapiens
MGLIWLLLLSLLEPGWPAAGPGARLRRDAGGRGGVYEHLGGAPRRRKLYCATKYHLQLHPSGRVNGSLENSAYSIITAVEVGIVAIRGLFSGRYLAMNKRGRLYASEHYSAECEFVERIHELGYNTYASRLYRTVSSTPGARRQPSAERLWYVSVNGKGRPRRGFKTRRTQKSSLFLPRVLDHRDHEMVRQLQSGLPRPPGKGVQPRRRRQKQSPDNLEPSHVQASRLGSQLEASAH

SEQ ID NO: 1007 - DNA, 34745 bp, Mus musculus
  misc_feature (1)...(34745): n = A,T,C or G
accatagttccaatcccaataccttcattgagcagatcacaaatgtctgtgactctggctccaaggaattcagcgcccccttctggcctctgtgggcatggcgagggagagagagagacacacacacagagagagagagagagagagagagagagagagagagaaagcgcacacacacacacgaatttttaaagtgtaattttacagctctacatggaacatgcatatactacccctttctcctgaggtccagggatcgctgtggaaggagcgtaagcaccatcagcagggctgctgcacgtgtgaactcacagtagtcgtgaccagaggcagatggagcagtgcacaccagatactgcagctcagtgagactgaggcagaggagtgtgccgtccagggatacataggaaagccgtggctcagtcacccacaggaaagaaaggagagaactcacagctatgactacaaaatagagtaaatcccagcatggagagcagaactgagcacaaagttcaacacccagccaaggagctactgttagttactgggggaggaacgggctgagaggagtgtccgatgtgccacccacactccagtggaagatcannnnnnnnnnnnnnnnnnnnacagtgtgacagtgggccacaggtgctgagctgagggctctcacccactcttcaagccactctgtgacataaggaccagagctctctacagggctcagggggcatcctgttagggatggcagctagactacaggcagatctgcctgtaaacaatgctacttgtgtggaaaactccatgtagaaataaagccaatgacacaccgagatcagagccaggggcttcccatgatgacacgtatctttaattccagcatttgggaggtagaggcaagcagatctctgtgagtatgagactagttagtgctacatagtgagactcctcccaccctttctgcagtgtgtgtgtgtgcgtgcgtgcgtgcgtgcatgtgtgcgtgcgtgtgtgtgcatgtgtgtgcgtgtgtgtgtgcatgtgtgtgtgcgtgcgtgtgtgtgtgcgtgcgtgtgtgtgcatgtgtgtgcgtgtgtgtgtgcatgtgtgtgtgcgtgcgtgtgtgtgtgcgtgcgtgcgtgtgcacgtgtgcacgtgtgcgtgtgcgtgtgcgtgtgtagtcagatgtaatgtcacatgtctgtgggaggcagatgtagcagtgcaaagtgtgtgtgtgtgtgtgtagtcagatgtaatgtcacatgtctgtgggaggcagatgtagcagtgcaaagtgtgtgtgtgtgtgtgtgtgtgtgtgtgtgtgtgtgtgtagtcagatgtaatgtcacatgtctgtgggaggcagatgtagcagtgcacaccagatagtgcagtgctggtgagcctcaggcagaaggattgcggctttacagccgcaataaataggaaagctctggttcaaacacccacaagaaagagaggcgtgggaaggatggggtatgcacatgcctcattagtctatgtgacatctgaaggcaggagatcagaagctcagggttacccttggctacataatgagttcaagaccagtctgagctacaggagaccttacatccaaaacactagaaaaggccgggaggcatgaatcaccggttaagagtgtttattgatctattaggtatagtgagaatttttatttctttaagcacagaaatgttatagggatatgtttttgctttaaccccaggtgtgggatatggggctgcttcaatttgtctacaacagctaattatgatttgcctcgtgctctggcaggggccagctccaactagtttctgtgattgtgtgatgtttggaattctggggactcgtgagagggtctaaaaatgtcagtgcactgagaaaggctgttgtggctgctgctcccctggctgctgctgctcccctggatggtgctgctgctcccctggctgctgctgctcccttggctgctgctgctgcttccctggctgctgctgctgctcccctggctgctgctactgctcccctggatggtgctgctcccctgaatggtgctactgctcccctggctgctgctgctgctcccctggatggtgctgctgctcccctggatggtgctactgctcccctggctgctgctgctcccctggctgctgctgctgctcccctggctgctgctgctcccctggctgctgctgctgctcccctggctgctgctgctgctcccttggctgctgctactgctcccctggatggtgctgctcccctggatggtgctgctgctcccctgactgctgctgctcccctggctgctgctgctgctcccctggatggtgctgctccccctggctgctgctgctgctcccctggctgctgctgctgctcccctggatggtgctgctccccctggctgctgctgctcccctggctgctgctgctgctcccctggctgctgctgctgctcccctggctgctgctactgctcccctggatggtgctgctgctcccctggatggtgctgctgctcccctggatggtgctgctcccctggatggtgctgctcccctggatggtgctgctgctcccctggctgctgctactgctcccctggatggtgctgctcccctggatggtgctgctgctcccctggatggtgctgctcccctggatggtgctgctgctcccctggctgctgtggttcccctggctgctgctgctgctcccctggctgctgtggttcccctggctgctgctgctgctcccctggctgctgctgctcccctagctgctgctgctcccctggctgctgctgtccctgctcttactggttgatgattggagatatcctaacaatgaatatcaaacctgcccaaggaactggaagcctctaaccagcaggaagtcgtctaatgatatcggcactctctttcccctaaccttcttcctcttctacctagcggaggagctggatgggataagggtggagtagggcagtaggaaaagggaacccacaaaatgtagccaaaagtcaagttgcaatctaggaaccatagttccaatcccaataccttcattgagcagatcacaaatgtctgtgactctggctccaaggaattcagcgcccccttctggcctctgtgggcatggcgagagagagagagagagagagagagagagagagagagagagagagagagagagagagagagagagagagaaagcgcacacacacacacgaatttttaaagtgtaattttacagctctacatggaacatgcatatactacccctttctcctgaggtccagggatcgctgtggaaggagcgtaagcaccatcagcagggctgctgcacgtgtgaactcacagtagtcgtgaccagaggcagatggagcagtgcacaccagatactgcagctcagtgagactgaggcagaggagtgtgccgtccagggatacataggaaagccgtggctcagtcacccacaggaaagaaaggagagaactcacagctatgactacaaaatagagtaaatcccagcatggagagcagaactgagcacaaagtccaacacccagccaaggagctactgttagttactgggggaggaacgggctgagaggagtgtccgatgtgccacccacactccagtggaagatcacacatccaagaggatggggtgggggggggagaaattcacaaaattgagtgggaagtgggggtggaactggaaagagggaggggataaatacaatcaaaatatgttacataaaatctcagctgggcatggtggtgcatgctcttaaccccagcactggggaggcagaggcaggtggatctctgtgaatttgaggccagcttggtctacagagtgagttccaggacagccagggagggctatgtagagagagaccttctctcaaaaaaggggggagggggagtttcgaaatgcaccaacagagagccggtgagctccctggagccaagcccaaggacctgagtctgatccacaggactcatatgggagaaggagagatccatgttctgacctctcgggacagctgcccgctgactgccacacacttgctgtggaatgtgtgcgtgcccgtgcacacccccaaatcaaccagccagtaatgtatgttgggcttttttgtttgtttgtttggttggttggtttgttggttggttggttggtttttgtcctggctgtcctggaacttgttttgtagaccaggctgtcctcaaactcagaaattcacctgcctctgcatgggccaccactgcccgacctcagtgtatgtttaaaacaaagaacagtacagattttttttttcttttggaaaactaagggggaaaggaggacagtaaaggaagaagaggaagggaaagaagggacgaggctggacgctgcgacgtaagaataacaaatgcatgtgcccagagactaagaggaagagacaggagtccaaagagaaagggaagcttggacggacgctgggatggctgaaatcttgagcgctctctcccatggcccgaaagtgcctccatggcagggttgtctgttttgtttgttgcaatatctcctgctcttagaacgatatcaggcattcagtagatgcaccatacatgtcgacaagaaacttttgttacaaagccacagagtgcctgcagtttccaaaatgaccaccaggtgggagtcttccaaaccttgacgcctccgtgagccaagccccagagctggcttcacggtgcctttgctgcctgccaccagcctaggcctttcaggatgtcttccgtggagctcacggcttgccaggcccagcacatgccctgggcaacaactgacctttccgcctaagacaccctcttccctacttccctccaacaccagccagttaaacaaccctttgtccttggccccttccggctgggccccgaggctcctgggtttcttccaggcccggagatggggctgggacaaaggtgcggcatatgagaaaccgccaaagatatgtcctggggactttgaatcagctcttccactcttcctggatataactgtgggatctaaccccattctcaccttgaacccagcccccccagccccagggctccaggagccagccctccctcaggtccacaggtccaggtgccagcctcctccctcagacccaggggtccaggccccagtcctcctccttcagacccaggggtccaggccccagtcctcctccttcagacccaggggtacagaccttcccatcttagaccaaggggtccagaccccaatcctcttcccttagacccagagctctaagcaccagcctcctccctcagacccggggcccaaggcaccaatcctcctccttcagacccagaagtgcaggcccagacctccagtcttagagccaggggtctaagtgccagtctcctccctcagacccaaggtccagaccccagccctcctccctcaggctagctctgcaccctgcttttactctgcagtcctcttactccaaagaccccggtctccctcctgcccccttcagtgtttcagtattgaactcaaggctgactcacaggaagttttggggcctgagtcactcccacctctcagttcagcccctcccagagctggaaagagccagaaaatgggactatttcaactgtccgtagctccagtatagattttccatgatcattactcagcggtgccagttggggtatctcccacattcaaacttcccagatatctatttttttttccagtatatttggagacaacatttttgtctaacgtccatgtatggatttcagatttttttcttcacttctgtgtgttttctctatctccttaattttgtactgttttaggtgttttgtgtgctacagataggatccagggccttaggctagtgctctaccactgagccacacccccagctcctcactgggggtttctaagcaaaggctctaccactgagctacacctacagctcctcattgggggattctagtcaggggctctacctctgagccacgccccagtattgcctttattccctcatctttcttgtctttttgtttctctcctccatctctgtggtcatcgtcttctgttgtctctgctctctccagcctagttctcgctgactctgagctcccgttctttctctgtccttctgtcccgatctcaccctgcttcttccctagctctctctctgtcttctgatccccattccttcctcggtctgcatcactggcgtagttgtggacggcaggttacttccatttctatcttagcagcacagaggagctgagaacgatgtacagggacgagagccacacgtgagtccaaagccacgaacagctcaagccactcaactgcacagcttctgggccccagttcagggacttctgagaaatgtacacacagacaaatatcaagggagggaggggccgagggaggaaaagaaagagggagagggggagcgaggggctgagaaatcagagggtccaggagtcaggtgtggtatcaaacatctgtaatttcagaaaactggaggctgagtcatggtaatgatgaggttgagtccaatcaaggatgtggagttacttcctgtctcaaaaaacacaaacaatatacaaaaaaagaaactaaatcacaacacaggttttggagacagaggtgaacaaaaggctggggatgtggctcagtggtagagcccctgcctagaatcccccaggggaggggctgggggcgtggctcagtggatagagcccctgctagaatcccccaatgaggttccccagtgtggtccagtggtgagcacatctctagcacacagactacccgcgttccaatctagcagtgaaacaaaaaaaaaaaaaaaaaaaaaaaacataaagacatagagtgagggagataataatacagagttgtgtgcaaagcccagagatgttcccggggaggaggaagcagagatggctgcaggttccaggcagcaagcaggcagggattcctgggtggcagcatgaggagtccccagctgcagccttttctccaagtagacacacgtgtggtgtccgggtgtgactgggtgtgactccatccttctccagccatgtgtcactgagtgggatcagcatgtgtgccatggggtggggcacccccacggggtgtgtttctgtcactgggcgtgtgtgtgtgtgtgtgtgtgtgtgtgtgtgtgtgtgtgtgtgttccgggcgtgtctgtgtgggtagcattggtgccaggcatgtctgtccacgggtatctcatttctctgtagctggcgggtgcatagtcctcgatgccacaggacacagagtgggaaggagttgtaactgagcgtttctctgagcttggggaccgtgaggtgaaaccctatgttacaagatccctttgtgacctgtcttggtgtccccattgtgtcgtgtgtgttggcatgcttgggagcatttaaggacctggcacatggtgtgtagacccatgtgtctgctttctttgttgtgtgtccctatttgaatctctgtctcacacaacatcctattcccagagtcacgttcaccgtgtgcctttgttttatctcttgtggtgtgtgtgtgtgtgtgtgtgtgtgtgtgtgtgtgtgtgtgtgtgtgtaagagagagagagagtatgtgtgtgtatgtgtgtgtgagtgtgtgtgttagtatgtgtgtatgtgtgtgtgagtatgtgtgtgtatgagtatgtgtgtgtgtatgtgtgtatgtgtgtgagtgtgtgtgtgagtgtgtgtgtgagtgtgtatgtgtgtgagtgtgtgtgtgctgtgtgtgagtgtgagttcatgtgtgtgagtatgtgtgtgtgtgtgtgtgagtgtgtgtgtgtgtgctgtgttggagtagggtgcacagagtgtgcttgtctgtggagatcagaggctgatataagaatagcttcctcaattgctctgcaccttgtgtgtttatgcactgtgtgcatgtgccatggtacacacaagaaagtcagaggacaacctgcaggggtctgttctctccttccaccatacaggctctgggatttgaactcagttagtgcccttaaaccccatgagtcttgtcactagtcctgcacctcattttttggaaacttcgtctttcacaccaacaggaactcactgattcgattagaatggctccacccatctgactacatcatctccccactcagggctggggttgcaggtatgtgcctgtgcacctacggttttttttttttaactacttgttttattttagtcttatttgtgcttgagcatgcattcgtggcgtgtgtgtgtgtgtgtgtgtgtgtgtgtgtgtgtgtgtgtgtaaatgtgcatgtaacacccagtctgactcagtgaaatagctctgttacttatatcaggatatatgcccacgctgagggcctttctcttccctgagtgtggtgtttgtgtggccatgcacatgggagtataacgggtatgtgtattgtgcgtgatgttggattgatggtgtgctaatctggacgttggtgttcttgtgggtccgaatccaaccccatcccctccaaagggttcatatcatcctggactgtgtcctgtgtggctagaatgtcctagaatgtccaacgctgggtaggcgttgcttgcacacttccattgactgttctctgtgctaaggtatgcagagtgtcaagtgcaccagtgtatgtcaggatcaatgtcaggtgtgtgtgtgtgtgtgtgtgtgtgtgagtcccacacacaatgatgtgagctagtgtgcatttcctgttttctgggcgctggatgacagtgtctgccaccacaggtgtttacacatatggggcatctctctgtgtttcacattcacacccccttgtgtgtctgttgacgcatgtgtgttgtgcctggtgattcttacaaattggtgtgctcagacctgctgtgtatttgtgtggctcctggtacatgtcccgtgtggtcgttgatgcttagctctttgtatcgtagaatattatagtgttttacttggttttggttttggaaacagggtctcatgtggcccaggcagaccttgaactcatagttgacaatgattgagacctgctgatcctcctggccccagtttcctagtaccaagagtcaggcatgcaccattgcccactttatgccatgctgggatctacctcagagagtctgtgattcaaaggagcccactaacagctgcactccatccctggtcccacttaaaaattatcatttaagatttatttttttttatgcgcatgcatgtatgtgaatatcagccacatgtgtcaggggctcccaaaaaccaggaaaagggcgtcatctcctggagttgaagttacaggtggtttcaagccacccacccagcaagtaggtgctagaaacggaagttatactcctctggagaggagcgctcactttcactcgctgtgcctgactttccagcccctcccccgccccactttgaatgtgtgactgcgtgagctcaacctttgggtggccccgtgtgcaatgggacgctgctgccctgctaagtgctggcgtgtgtcacaccatgtgtgtgtgtggtgtctgggtgtggctgtgggtttctgaactttcaggagtgtgagtcacttctgtggaggttgtgtggtgtgtgctggtgtgttgggctccgtctccggtctgtcatagggtgctctgtggtgtctgggtgtggtgggggttttaggtgtgtaccacagagtgcaaacggttggagagtcacaacctattgtgtcagtgtgtctttgcccacgtggatggactcttcttccttgcccggggccacaagacacaccccagcccctccttagtcttagaagggaatgggatagccagcctccccctacccagggacctccccgtccctccccgccctgccctgcctgctgcagttaccactccccagagggcacagggctaggctgtgccttccagcaaaagtcccagagtgagcagaacaggccgctggcctggaagccaagctggctgccatttgcgtactgagaggtgggggaccctgggcaggaagctggctgagccccaagacctcaggggccatgggcggggagctggtgactggcctgggggccctgagacggagaaagcgcctgctggagcaggagaagagggtggccggctgggcgttggtgctggcgggaactggcatcggactcatggttctgcacgctgagatgttgtggttcctgggctgcaaggtgagtggggccttccaccgagcagggaagggacggggagcctggtgtgagggaggagggctggggtctgcacccctgggtctgagggaggagggctggggtctgcacccctgggtctgagggaagagagctggggtctgcacccctgggtgtgagggaggagggctggggtctgcacccctgggtctgagggaagagggctggggtctgcacccctgggtctgagggaagagagctggggtctgctcccctgggtctgagggaggagggctggggtctgcacccctgggtgtgagggaggagggctggggtctggacccctgggtctgagggaggagggctggagtctgcacccctgagtgtgagggaaggggactggggtcttacacccctgagtgttagagagcaaagctaggagatcttatactcctgggcatgagggaggaaggctggcatcttccaccccggggtgtgaagaagagaggagagctggggtgtgagggagaaaggttggggtctgcacccctgggtgtgggagaagagagctggtctggactcctgggtctaagggaggagaactgaggtcttacacttcttaaggtctaagagaagaaggctgggtctggacccctggatgtgatggaggtagatggggggtctgtacccctgaaacctgagctagtgtgatatcgtcctccccccagctccccccaacctacacacacacacacacacacacacacacacacacacacacgcacacacacgtacgcacacatgggagacagttctcagtgttagcctttgggtaagtgttatcagacagaccactgggggtctgggccttgttgaggcccatacaaggctgatccttgatagcctagctctggtgaagggagggctggcaagggagaaagacgttgtcattaggcgtctccttgctccttatctagccactgccatttacccagtgccaccaggcagtgctctgaagtaactgacagaggagactgtggggagtggagccttcaccccacccttaccatacagaagtgccattacccccagaaggcaccactcaccagatagtggtctactgtggtttgaaatccttcatccctgtggaagaggagacttggggttcaggctcaagagtctgcaggaagagcctcaaaaaatctcaccaggcaatggatccaagcactagagaagtcaggggagggaggctggggggggggcggcaggcaagagaatcagaaggttaagcccagcctaagctacatactgagttggaggctagcctgggctacacagaccttatctcaaaaactgaaataaatccaaacaaggtgggggacggagagaacacacacaagagagctatcaatcgacctctggaagaccagggagtacaggcaggtcttaacaagccctggggatattcccaccctggtcagacttgtggcagaagagagatggagggcaaggttgggtgtgtggtttgagggggcagcacacttgcttgttcaacagaaaagttgggacaggagatgtgtgtgtgtgtgtgtgtgtgtgtgtgtgtgtgtgtggtgtgtgtgtgtgtgtgtgtgtgtgtgtgtgtgtgtgtgtgtgtttgcgtgcccgcaggtgggacattctttgggagaacttctcggccccggtgctcagccgctgtggagtaacagactggcaggcacatggagggtcagggcaggccagcttccttcagccaagtggccaaggagagggcagctactgcgagggggtggggccgtccagagccatgccaacaggaaacatggctggggcctgcccggcgctcccacgctcctgcaccacgcccagtaggagaggtgtggacctgggagcccaggcagaagggaaggagccagggggtctttctcatccttcatttctccttcttcactacctgcccaggccctttcctctgactgtgattcttgaaggaatggatgaggctctctgagcctcagtttcccgatctgttcaaacgtagccattagcacccttgcagctcttgtttgagacaagctctctggtagcccaggctggccttgaactggctaggtagctgagggtgacctgcctccacttccccatgtatcacaacactcagtttacaaaaggacaaggctcaaacccaaggctctgctaggcaagcactcttccaagtgagccacatccccaccctaagcccccgtccaatggctgccttggagacctccatgccccctccttccccaactccatctcaatctaacaaacttgtttttcaccaaaggaaggcacctgctcctcaggaggaagggcgggtgccaaggctataggaaggaagagacggctttggatgaggtgaagcagagaagatggggcggacagagacttgggggaagggaaagtcagtctacagagggaggggggagggagggagagagagagagagagagagagagagagagagagagagagagagagagagagagagagagcatatgacagaaacgcgcctccagagccactgagaaaccctagctggagagatgcacacagagagagagaaaggccgtgcatgcatggactgcccccacacaccccaacacacaacacacacacacacacacacacacacacacacacacaccagagctgggcagtagctcaattggtagagtacttgcttagcatgtgcaaagcccctgggtttgatctcccagcactgggctctgatgatgcatgcctgtgatcctagcacttgggaggcctagaagcagactcgcagagagaaggaagtaagagaccccagtctgggtggtagaataggaaaaggggacccacacacacacacctcgccatgggagacgtgaactgcattgtgggaaagtggctggtatctgagcaataggggctgagacaaactgaaaaactgaacggggaactgggtaagggtgaaggatgacgggggaggggaaggctgaggacagcagagccattgttcagacagaggtggggggaggccccccagggggcaggaaactggcctttttcccctgctcagaggcggggtgctggcgcgggcccagccagggaagctggcagagggccgcggaggaacaggtgcacggttcaaagagggaacccagacaagccctgccctgggacagcatctccccgtgggcatcggcccatcttaaggaactcagcagttctcactaacccccccccaaactctcttaatccttcctccctaaattctagatgatccctccaaggcattgccacacaaagagaggaagaaaaaaaaaaaaaaaaaaaaaaaaacttctggtgctttatgtaggccctgaacttcctcccgggtgccccgggcatccagccaggggaagtggtaggagaggggaagaaggggctcacaaagcagggcctggggctgggggtgtcttgaggttcgttcctccgattagagaagggcagaatgctgctctgagacctgagtgacagtctctcgtctttgctggaactggggttcggggaggctctgcttgctggagatggaaggggcaccctctggaagctgtatgtccttttctagacttcacgcatacacaaatgagaactacttttcatagggaaagaatgtgagtttcaaggctccccatggtaggagagtggagggtagtgaggaactgagacacggcttagacgatgtcctcctgtctcagcctactgaggactgggatcatacgggtgacctacacactaaacttgagaatggttctgagatgtgtcaggagggcctggttcgggagccaggttgttgggaatgtagagaccgcctttctaaaggaaaggaatgggggtgggcagactggaagcaccggcagctcactgtcttctgttcccccacagtgggtgctgtacctgctcctggttaagtgtttgatcaccctgtccactgccttcctcctttgtcttattgtggtcttccatgccaaggaggtccaggtaagctgggccccgcccctcagctttgctctctatgtatccttgttctccttccctgagatacctgagtctacacctctgcccgctgggatagaatgagccacagacagacaggcagattctgctgccgtagctgatccatcccccaatgtagcccccaagggcttccttgcccacttagagatggaggctatgcctaccctcccagctcccaggtccagagaccacttacgtttttaaaattaattttggtcctgaggattgaagtcaggaccttacaccaagccacgcccccagcccctcattgggggattctaggcaggggctctaccactgaaccacacctccagcccctcactgggggattctaggcaggggctctaccactgaaccacacccccagcccctcactgggggattctaggcaggggctctaccactgaaccacacccccagcctctcactgggggattctaggcaggggctctaccactgaaccacacccccagcccctcactgggggattctaggcaggggctctaccactgagccacatccccagcccctcactggaggattctaggcaggggctctaccactgagccacacccccagcccctcactggaggattctaggcaggggctctaccactgagccacgcccccagcccctcactggaggattctaggcaggggctctaccactgagccacgcccccagcccctcactgggggattctaggcaggggctctaccactgagccatgcccccagcccctcactgggggattctaggcaggggctctaccactgagttacatgcctagtttctttacaactgttattaatgacaataagagtgtgtacttaaattttttaacatttatttatttttatgggggggggaacacttggaagtcagaaaacaaattatgcaagccagttttccccttctaccatgtggggttcttaggaatcaaaatcacatcatagggtttggaggtaaaggccttggctcactgagccatcctacaggcccgaagcatgtgtattttaactgagtgcctctcaggtgccaaacacctcctagggtgttactgtacatggctgagaatcactgtcttgtatgggagtcgggagaagtgaaaatgggaacggcattgtgtctctgtgagaccagagttcaaagatggctaagaagagttgttgagtctggaggaggaaaataaacctcccattaggggtcggcactattgtgggatgttaagtgttaggtgacttgtgatttcaataggtagggaaatagtaattatagagtagagatctggaggtgtagcgcagaggtagagcccctgcctagaatcccccagtgaggggttgggggcccggctcagtggtagagcccctgcctagaatcccccagtgatttgctgggggcgtggctcagtggtagagcccctgcctagaatcccccagtgaggggctgggggtgtggctcagtggtagagcccctgcctagaatcccccagtgagaggctgggggtatggctcagtggtagagcccctgcctagaatcccccagtgaggggctgggggcgtggctcagtggtagagcccctgcctagaatcccccagtgaggggctgggggcgtggctcagtggtagagtgttttctttgcatactaaagagtggtttttaccttcacattgaaacaaacaaacctcacagagagcagttcatgctccgggccctgttcagttgtgagacccaggcctcaatttccagatttgtaagttgggagcgcttgtacatgaatctctgtgtatgagcatttattgagtcacatgtacaggggacagagcagtccccaaggcgtccaaatgctgcttagatggagctagatgtggcggcacctacctgtagtttcagcacttgggagtctaaggcaggtagatcgctcatttgagcccagcctaggttataaattacctggcgccacagtgtgcgcgtggaagtcagttctcctacaacgtggatgctagggatggtactcagggagtcagacttggtggcaaatgcctttattcactaagccatcccataggccctgacgattatttttgccagccgtagtatcccagggccataagtgggcagagccctcagggatgggcacacaaacactagaaggtcgatggttctgtctcagtagctacaaatcatagcttatagaacttgtcagtgcacacaagaggcactcagttcgtgtaggaggagtattccttccggaagtgggccagaactagccattagagttggagaaagtggagaaggtggagagaagacttgccggttcccgcctgcttccttccccagccccacgccccgtacagctatctctgtcctactttccaggcccagggcgtcctccgcatcttatctcggggcgcaggccgggtgtgccactgcctgccccgcacctgacctctctctgtgtctgcctcctccctgcagctgttcatgactgacaacgggctccgggactggcgcgtggcgctgacccggcggcaggtggcgcagatcctgctggagctgttggtgtgcggggtgcacccggtgcccctacggagcccgcactgcgccctggcgggggaggccaccgacgcgcagccctggccgggtttcctgggcgaaggcgaggcgttgctgtccctggccatgctcctgcgtctctacctggtgccccgcgcggtgctgctgcgcagcggggtcctgctcaacgcgtcctaccgcagcatcggggcgctcaaccaagtccgcttccgccactggttcgtggccaagctgtacatgaacacgcacccgggtcgcctgctgctgggcctcacgctgggtctctggctcaccacagcttgggtgctgtctgtggctgagaggtgaggggcctggaacacagggaggagacaccagaggctactggatatgatggggcaggctgcaaggctgggggccagccaacatcagggcaggctcacactttccatccttcttggctgagaaatctcaagtccttgaagtgattcccaacttctgagccacccagaacacacacacagagggaagagagagagagagagagagagagagagagagagagagagagagagagagagagagagagagagagagaacgcgcacgcaagcgagcccaggcaaatccacccttccggcccatagtaagtccagattcagactctggtaatagggctaatcctaataactaccttgttgaaaggaacagcttttccaaattagcgggtacagtaagtgcttgctgagtctggaaagcagacatttggaacatttttgctgggggaattccctgctggacctagctggtgcttagcaactgtaaacagatgggggcggggtggggggtggtagctactcgattcttacagatcctcagggtcccactaacagagaaatccagtctgtggcctgagagctggcaacagggccttggggcaacaaagccaaacctctggagctcaggctgcctccaacaccccagtacctcagcctcctgaatgcttgggttaccgatgagtgtcactgttcccggctctctacaagcttttttttttttttttttttttttttttaagagatgttaatcatttttatcttgatctcacttgaaggccatgtagtctctttgtgggtgttagatacaggtgtagcttcctctggatggttcctgcttcaggctgggtctcagccccatcttagccctcatccgcatcttagccctcatccgcacactcttgagtctagcagccctggttgcctcgctgagctcaaacaggctctagcgcaacggttctcatcctccataatgctgcgatctttttagtacagtcccttatgctgtggtgacccctcccaaccagaaatgtatatttcttcctacttcgtaactgtaattttgctactgttgtgaattgtgacataaatacctgatgtgcaaggtatctgatatgtagcccctgtgaacgggttatttgaacgccaaggggtcacgccccacaggttgagaaccactcctccaggcttgaccagacctaaacttgtacttttataacccagaatggttaagcatctgaaagaggccaccagaatttctggctttctatccagatgtttcttggtgttaagagtgtggctggaagaggaacagtatgggggggtgaaccccaccaacacccccaggctggggtttcagaactaagttctctttgcccataggcaggctgtcaatgccacggggcacctcacagacacactgtggctgattccgatcacattcctgaccattggctatggggacgtggtacctggcaccatgtggggcaagattgtctgcctgtgcaccggagtcatggtgagtactgcccccaagactctctcccggcccactgctgatactcatggctcaggaaaccatgggccaacctaggccctccctgacatccctgacaattgtgggtatctgggcactgccccactccccagcctcattctttactcaagacccagatctgccgggcacttgggaggcagaggcaggtggatttctgagtttgaggccagcctggtctacagagtgagttccaggatagccagggctacacagagaaaccttgtcttgaaaagaaaaaaaaaagaagaagaaaaagaaaaaagatatccagcccatttctttctcctcttcagcttcttccttcttcctctctcctcctcttcctcctttaagttaggagtttgctatgtactccaggctagccttgaaccctcaatcgtcctgcttcagctttgaagcatgctggctggatactacaaatgacctgttttgagactgttgtcccttagtcctagaacccaaggtccatatcctcagatccaggccccaacttcccagtcccgtttcttcctgagacaagggatagtctcccatcctcccctggggagaactgggtggaaagtcgccatctggagtatgttttggggaccaggcttcatagattcaagccccactttgtcccttgccagctatggagctcaggcaaaccacatgttgttcctgggccttggtagccccatttgtaaagtgggtgcagtcccagcatcctccttgtggggttgttgaaagggcaaatgaagaacttcatgttaagggttcaaacaggaagcacaggcactgctcagtaaaagcagcgggggctgggagcgaggtaatgaatcccacacatctgttctgaccccagcccctgagctctcagggaggaagtgggggttggggaacagttgttgtaatggatcccacgcgtttctgtagttcactgttcctacccttgctcctgagccctccaggcggaggcagaggctcctacctccaggctctgtccctcacctacagtcactctccttcctactacaaactccccatccagtttcttccacccagctcctttgccctctccgaggcccagccccaagtgccttggcctagcccatcccacaggggacctaagccaccagctcccagctctgatgctgccccaggacatgttggccatgagtccatgggtgagcaatggtgtagcaggcaagctggacacacacacacagagaaggaaaagctagaaaaaaatattcctgagccccttagggctcctcagggcccctcagggctgtgtcatttgacagaaagagaaatcgaaagtatgaactatgttatatagacacacacacacacacacacaccatgcctggctcagagccttcattaacacaatgagataatagcatctttttaatacttttaaattatatttaattatttatttaggggggtgttgcacatcaggaccctcgtgtggaggtccaagggctacttttagagagtgggttctctcctccactgtgagggtttgggtggggaatgcaacgtagaccaccaggcctggtggcaagtgcctcttaccctcagagtcatctcaacattgtttctatgttgtttgtttctgggcaggaggggatgacaaagggctcaggtagcccaggctggctccaagcctgccatagaacagaggctgatgatcctcctgcctcagtactgtcccctcctcccctggcactgggtctataggtgtgtgtcacagaccctgactctggagcagactggtcctctgtgccagtctctgctctgacattttccagtggcaactggtggcatttttacagatactgggaggacatgtctgtccccctagaaaggttgtcctctcgtcttctaatcagtcatttaagaaaagaggcatttgagctgcagggggagggggggtgtgacggatggagcatgcctgtgaatccagaactgggggattgatgcaggtttgggggtagcctgggctacatagaaagactttgtttattccacaagacaaacagggctaggaatttggcttgtccagcattcatgaagacctgggttagaccctgggtttggtactaactgggcatcatgataagtgcttgtaatgccagcactttggaggtagagacagcagatcagaagtttgagattgcccttggtcacatggtgaactcagtctagcctgacagatagttctgttgatggtggaatggcagtggctgaacctggcctctgtggcttcgagaagactgacactgtcacaaccaagtcccacagaatcacgttccttgcttggtgtgcccacagggggtctgctgcacagctctcctggtggctgtggtggctcggaagctggagttcaacaaggcggagaaacacgtgcacaacttcatgatggacatccattatgccaaagaggtgaggcttggctggggctgtacctcaatggttagacccttgcctagctcacattgagttcaactccaagcaccttgtaaaccgggcacggtggtatagacttgtaatctcagcattcagaagacggaggcaggaggatcaggagttcaagatagtcctcagctatgtagtgagttcaaggccaactgggctgcaggagaccacccggtattaaataaataaataaagccagttccccttaaagcgtgatggttcagtactcagaaggattagacaataagatggcagggaatttgaggccaacctgggctacaggaaaaatccagtcccccgacttctaagccaagtcttccagactcctgggcacccctctcccctgacactgtgtcttcccgtcagatgaaggagtcagcggcgcggctgctgcaggaagcctggatgtactacaagcacactcgaaggaaggactcccgggctgcccgcagacatcagcgcaagatgctggccgccatccacacgtgagggcctccctgggtccctgtgtgatccgcccgattctgactgtgactcaatgctagtggccctggattcccagggtccctcttactctgaggcagactgctccttcctgtcctggctctcctcccctcacccctaccctctgacttacccagggaccaagcctagaactgagttcacctccccacaggttccgccaggtacggctgaaacaccggaagctccgggaacaagtgaattccatggtggacatctccaaggtaccagggccctcgggaggaggtctcggggaaaggggcaaggtgggactgaggatggaaggcagggagatggacctgtgaaggatggactctcagacctagatatggtagttcaagaccagcctgggctacctgagacccatctcaaaaaaagcaggtggtagtggcacctgcttttaatcccagcacttgggaggcagaggcaggcggatttctgagttcgaggccagcctggtctacaaaatgagttccaggacagctagggcgacacagagaaaccttgtctcgagaaaaccaaaaaccaaaaaaaaaaaaaaaaaaaaaaaaggaaacagaaaggggagtcacctggagtggggggactgaaacacacaggtgtgcagtaaaggttacaggactgagaaaaaaagcctcccattcttacagaagatactggggccccttttagacttaagaaaaacaaaaagctaaaaaaaaaaaaaaaaccaccaaagaacgccaatgtttggtttcgaatcatctttattacttacatgtggacggatacaaatttccttccaggtgcgactcttatgcaaataaaaccgggcaaacttacaaagcagctcaaataccatcaacaaacccaacttaaaaaaataaattaagggacaccgtgacaggtgatgatattgtttcagcaaaagccagttcctgacactgttgtgaatcgggtgcccaagggcagagaggtccccttgctgcgaaggctcagagccttcgcctccaccatcgatggtgacgtcatgctcctttggcctgcctcaggcgagcccttctttatgtgtggccttttcttgttagcccagcacaattcaaacagccacccttggcactaaggccacggtaaacacagtcacagacacaggtccccagattacatgacacgtctccgaaaacagggtggttcgagtcagccagaataggtgggccactatggatgaaagttataggacctgagcacagaaatcgaaggttccccacaccaagctcacagacaagggtggggatacgtacttgcctggtgtgcatgaagccgccggttcaatccccagccctgcaaaaaccaggcatggcagtacatgcctgtaaacccagcatttgggaggcagaggcaagaagatcaggaattcaagctaattagggataaagagatgactcagcagttaagaccacctcctgctcttgccaatgaatgacccaggttgggttcccagctcccaaacagcagctttcatctgcctgtacctccagtaacacagtaaattcagttccagcttgggctacaagagactttgctccactccccaccccctaaaaaagaacagtcctccaggaccagagagggctcggcagtgctctgctatcccactctgtagagcagacagggctcttctaggccctcactcatgttcccctcccacccagatgcacatgatcctgtgcgacctgcagctgggtctcagctcctcgcaccgtgccctggagaagagaatcgacggtctggcaggaaagctggatgccctgacagagctgctcggcactgctctgcagcaacagcagctaccagaacccagtcaggaggccacatagctccacatggtgagtgggcagggacagggacaggaaaaatcccgaggaagagacaggccagtgcctgatgtggctgttgcctatagataaggccaccttttctcttaagctgtcccccacctcttagaactctgagtttagggctggactggaaaaaaaggggagtgattcctttttcacttgtcagcctcatttctcactcttttgtgcgaaggggcgtggccaaaggactggagatggaatctagggtcttgtgtattgtaagcaggggctctcttactgagccatgccccaagcgcctcactgggggattctaagcaggggctttactcttgagtcatattccctaacttgtggcttctggcttcccagccctctcctgcttttgattggtctctgtccccgtgcacacctgtactctcctctcctgggctttgacacccttctctctttccacctctagacattctctggcttctgccaacctccacctctggcatccctgctcctgtgttttctagccatttaccaatctaccatcttctcagaactcacagaagaaccaggctaagtacccaaggaccgagctcaaggacatgctccctgccaattccgaccaagccccacgataaatcacctcaagatgccaggacccaagtggatccacgttgaggtgcatggactctggtggtggcagccatgagtggacactgaattggacctcccacgtcaatgggaacatggccaccactacacatatgccctcatcagaagccctttctgctgtgctgctgttcaggaccccttaatctctgttggaggaggaggtgcctggggtctaggatgctaggaagcttcagttaaccgcgggcgggtctcgctgaaggaaccaggtccgagcgacgggaggtgctgccccctggtggacacctgggaagatgccgtttcctcctgattgcagagactgtgccagaagagggtacagggtgctgctcaccaatccaccctcacactttgtaataaatggtaaacgaagacagcagctgccatttctttccaaacacttcaaattttgctgcgggaggcacctgccctgtccccagtctccgtttccccaactgtagaggggtctggtggcatatgcttccccgtatagtctcacaactcaggaggctggtggactcaggaagcagatggactcgggaggtggaggcaggaggatctctgtgagttcaagaccagtataatctagtctacatagtgagctccaggacagctagggatatatactaaaacctggtctcaaaacaaccaaacaaaaacaaaattagtggaagaaggcaggaagaaattgagtttgggaatagcctcagctaaattgggggggggggtgctagcctcacctattttcccaacacttataaggtagaagcaggattaggagttcaaggccagcctcagccacatgagatcttgactcaaaaataacaaaatgggttggtgcaacggctcagtaggtacaggaacttgcagccaagcctgacaacctgagttcgatccccaggaccagcagggtaggtagaggagagacatgactcccacaagctatcatcctctgatatgtgtataatgccatgtcccacccgccacccaccaataaatacatgttaaaaagaaagaaagaaagaaagaaagaaagaaaaaagccaagtcccctgaagtacctgcccgcagctttctaacaccggagtggttgaaatcaacaccctgatagttctgaagccagagcaaagggtttgaattcaggcagacaggcatcaagatccttattctgccctctacttgctgtgtgacctggaaaagtggctgcccttctctgaacattttacttcacctgtgagatgtcgtgtctccatggaactgctgtgatggtgtaaggaaacagtgccacggggcagggggcggagggggggtcgtgtcagggttagtattgtcccgagcgtgagggatcatttggtccagtgttaatcatttccacactcggtgtgtggccaccccgtccttcttgacttctccctagtcattcacacctaccctggtcctagcctccaagtcacacaccgagagatgagcaagcacccacagggcggcacacagcaatgtcataaccgctcagtggagctggctgggtcctgggatggcagagcacctaccgtgtgcccatatttttgagccccacttttctttttgtagtgttttggttttgttttgttgatgtgtctctgcgtatgttctggagtacctatgcacgtggaggcacgggtcaagcttgggcttgatcctcagactctagtccacctttttttttttttttttttttttttaatctgtttctgaggtctcaccatggagccctggctttcctggaactcattatgtaaaccaggccaggcactagatccacctgcctctgcctcccaagtgctggggttaaaggtactcatcgctaggtccagcccccacctttcttttctctttcttttgagccaagacgtgtcactggaatggaacacaccacacgattcatggtcagagagcagcaggcattagcctgggcctgccttctcgggcacccgcagcctggctgttctcacatgggttcagggacccatgcctcgtgcttgatcccatgcactgtgccagctgagggagctccctagccctgctgttgtacttgagacagggtctcattatgtcaccctggctaccctggtactttgtagtccaggccaaccttgaactcaatccttgtgcctcagcctcctgagtactgggattactgtcatgtatgacctctggctaagtattttttaatacatcatgtgtgtgtgtgtgtgtgtgtgtgtttcacgtgcacgtgtgcatgcgtgcacccaggtgcatcatgggcacacatggagatctgagggcagcttgccatagtcagttctttccttctactatgtaaggcttggtgacaagcgccttggctcatgaggtctcttgtcagtccagccaccttgctctttgtaaaccctcagccgccgccaccaggcctcaacttccccatttcacagatctagaaattgagtttgcagggcatgcaggcctggtccaaggttctagccaggaagccacacatccggctgcagagcccaacttcccagccgtcctgtcccctggctggtctgcctgcctgccctgccccaagtgagtcagagaccagtggccttgggtctggggcccgggcctgcattcctgctccccaggctgactcatcctggcttggaaggggatgcccaggcttcgagtcattctggctgagctatctttggatttccctccaagtcctctgtcagtctcgtccctgtgctaaattggactgtctaccacccactgcctccgctgtcccttcctctgattgccggctcacctggaggccaagcagtggttccagaaagagactggaggggttccaaagttgtctgtcccctgagagaagccctcaggcctaggccatgtcttgtcgactcctttggaagcactgttcccctccagattgccttcagctggctactcctcctttagggacttagatgtcctctcctccaggaagcccgctctggtatcctgtcctgtcataataatattgattgggccaaacaccatgttaaactctttatgtggctctcaaacagagggaaagaggacacgttagggtgtgagtttgtcacatgagctaactgactcacagacagattaataaatccgcacaggccagagttgtagctcagtggaagagtgcttgcttagtgtgtgccaaacccagggttcaaattctgacactagacaaaaatttttggaagtcaaaaaaaacctgtcgaagccatagcaaagagagaggggaagatggaggtacatgcctgtaaccccagaagttagagggctggaggaggaggaggaggaggaggatcacaagctgagggccagcctgtgctacagaatgagattttatctcttaataaggaaacaaggggttatggggatcggggatgtggtcctgcaccccattgctttgccaagcagttgctctgtcagctagtagattatattttagtgttgttcattctctgtgctctgcttctggactctttaactcgggagatgggaacaagtgcctcctcacccccatcccaggatgccaatgataaaccacagtatgagcctgccaaggtccaactggggaacccgtgagtttgctgggtttattacagggcctgaatgggggcttaatgtaggggtgtgggtaacccaaaagcagccatgccacttgggggggggagtctagtcccagctcaaaggatggcttcctcacaactccacagatggggtatcctttcagccagccttccccagtctgtactcctgaggccataaggtcctgtaccattagggcagaagtacagatggccagaggtacagcacggggaggctgggatttggggtgagggtccagtgcgtggctccaagcctccttctatggggcgacagacagtgggaccagtctccagggccttcagcaagtgttcagagctgctctgctcaagaaagggccattatgcttggagtctagctggctttctacaacatttcccagcatatcagggccctcagtaaatgtcccccccccaaaaaaaaacccacattttatatatctgggtagccaggagcatgctgccttcagagaaatcagatgaggaggtgggatggggaaacagctcagtggtacagtgcctgcctagtgtgtgccaactcctggattccatccacagcagcatacccccatgtatacacatacacacacctggatccctccacatcaacacacccccatgtacacacacacatacacacacacacacacacacacacacctggatccatccacagcaacacaccctcatgtacacacacacacctggatccatccacagcaacacaccctcatgtacacacacacacacctggatccatccacagcaacacaccctcatgtacacacacacacacacacgtgcatttgtaaactggcacacgcacacgtatacactcatgtaagcatacccatgtacatgcatgtgtgcacacgccacacatgcacacactcatgtgcacatcttttttagtggttttgacagaaacatgggggcttttgatgaacaacaagagttcccacaagagatcccaaatcccgctgtatcttggatctgtccctgtcaacctgtccctgatctcagtggggctcagacctgacacccagtagcattccccttccctgtcatcaaatcaatgcttccgaaaagcccagcgccaggcaagagctgagctgggacggacggacgttgattcagaggctgctgacctccaagactctgcctggctacttgagttacttccctctctcatttcacttctgcctgcactcccacaaggatgtgggggcgcgtggaggggaacagggctcagagaggagtaagggggagcgagggccagtctccctccctaatgtatgccacactgagtccctgaggactttcctaacatccagcccgattgcacccctccctgctcaaaatgcaccgtggcttgtggcttccacagccttttctgtcaaggcttagcacaaagctcttcctctgtttcctagttactgtgtggtactggaggccgaactgaagacatacgccctagacggcaggctactgttacactctatctccaccctcactattagatgcaattctaggcaacattctaggacttgaaccacacccccagcccctcattgggggattctagacaggggctctaccactgatacatagtgtcagctctgagtgtgtgtgtgtgtgtgtgtgtgtgtgtgtgctggtttgtgcagaattcggaggtcaacctcaaggtcaaccttcagggacaacctaccttcgtttttgttttgttttagccagggtctctcactggcctggagcttgctagtgagattatgtcagctggatagtgagtccctgcctctggctccccagtgacaggattacaagactcgtatctggcttctgtacgtgggctctggtgaccagactaagttcctctggctcacacagtaagctctttaccaactgagctagctctgtagatgtcttatttggattttaaagacaaatcttactacgtaaacccaggctggcctggaattcactatgtagccaggcaaggcgtaaaccactctcaataatcctcctgaattctggaattacaatcatgagccattgcacacagatgtttttttctaaataactgagaattattttcatacagatgaacaaatattaatctccatcttaacgcacccttgatgatgtttttgtgtgtgcgtgtgcacacatgtgggcacgtgtatggcagctgcaggacaacttgagggacctggcttgatcgtcctgtcatgtgagacccagggttcaggctcagaccgaatgtcatcactgtggcaagccctcctgcttgctaagctgtctcacggggccctcaggcaaattttgacagatacattcacgtggctgctcaccactcaacccaaatgagaagtcaccacctccccaagctccctcagcctctgtactcctccacccccacccacccccacccccccccccacccccggcacagcagtcctggtttccaacccattcctgggatcgcctggtatccaagggcttcaccagtcgacctgcggaggaccagtttcttcaggtctgggaagtgaggggggattgtcagcagctggtatgtccctagggctgtggtgttccgggggtgtcacagtgtccccaggagcctccacttggagtttcttcaatgcctggccctttccctgccccctgttctgcattctcttggcccgcccctattctcccctccctccggctccctccccttagaacagatgtctccagtattggtgctgtgatttattaccactgtaaacatccaggctcagctggctgtgcagagacctgcttggaacctttgtgctggggactctgccaacatcccacagccaggcagtgctttttatggggcaaagatagtgcagaacggcaaaaccttcccactcttatcaagataagatggcacttcattccttgtgtaccctctctggcttcctcatgaacagacagactcgagcactatgatgctcagtaagcggaggcagagggatccggcattcaaggttatcagcagccagagcccagaatatgtgagactcccatcttttaaaaaaaaaaaaagacaaagggagagaagcaaggaaggaaagggggaaggaaggggagaaggagggagggaagagaaggaaggagagaaggagggaaggaaggaagggagggaggaagggagagaaggagggagggagggaaggaagaaaggaaggagggagaattagcctgacaagtcacaggactgggaaagttactccacactattgtaagaatgccatctgccttgtgtccttcatatttactgagacagggcctcactatggaggctgctggtgactctcctgccacagccttcagagggctgtgataagaggcatgtgacaccacacttttttttcaataggagacaggatttctctaactgtcctcgacttgatttgtaaaccaggctggcctcaaactcacagagatcctcctgcctctgcctctgcctcctgagcacagattaaaggcatgcacaatcatacccggctagacaccacactctatgcactttctcaacagtttaatttctcccaagaaggacagacaagtactgacaaacctctccacagaatatgtactttaattttgagaaatcttcatagtagagttagactatgagccttgccttggctggtgacacaggcctgtgatcacaattccttgggacgcctcaaaagttgaaggactgttggagcaacaaatacaaagtgaactctaggctagcctgggttacttagtgagacactgtttcaaaatgaaaacattaaaagaggggctgggggcgtggctcagtgggagagcccctgtctagaatcccccagtgaggggctggaggcgtggctcagtggtagagcccctgcctagaatcccccagagaggggctgggggcgtggctcagtgggagagcccctgtctagaatccccccccagtgaggggctggaggcgtggctcagtggtagagcccctgcctagaatcccccagtgaggggctggaggcgtggctcagtggtagagcccctgcctagaatcccccagtgaggggctgggggcgtggctcagtggtagagtatttgcctagcttatccgagaccctggactcagttcctagcatcatatacagaccaagaagtctttgtctttctcccggtggactccaggttcacccactacactagctcatcaccttctccttgaagccctttgttcccatggctccaagtcatggcctccataatgaccttgctctttggcctcttcccagcactcagctcctttccttatcccaagttcaaaagactcagtctcacctgtcttctccagccactcagactagatgaccacagcaggtttcaggatttgaaatatcagctacatgtaaatttagcatacctgtataattattggtaagagaccaaatacctgtcatgtgtgtaagacaaacaaaatccagaaggaaaatacattagttggcttctctgctgctctgatactagaaagttggctcagtggttaagagcactggctgggtttggctcccagcacacaactgtgtaactccagttctaactcctctctgacctcagtgggtactgcacatatatggagcacagccacacttgctggcaaaacatccatgtgtgcataataattaataagtctcaaaaacaactctgaccagaagcgactggggtgggagttgcactccattatgggtcagtactcagtgacggatgtcagggcaggagctgaagcagaggccatggaggaactccgcttactgccttattcctcaaggcttgcaggatgacctgcttagggcaggcaccgcccacagtgggaagggccctcctccatcagtcagcaattaagacaatgcttcacagacatgaccgcagaccaatgtgatagagccaactgcttacctgaggttccctcctcccatagtgttaaactggcaaccaagcttagccatcacagaatacacgcatagctggggcgagggtggaaatagcatggtgagatgcctccatactgggcagtggacatgtgggagacctttatgccataataccctttgtatgcttcagatttatttaatgaaaaggaaaaaaagtgatcttcaaaccccaatttctctcccagcatgatcttgctatgtagctcaggctagccatgcattcaggattctcctgcatgaacctccccggggttagagttacagatgtgcaccatcgtgcctggcttttctgtcaacctcaaggtttgtccagctctgtccttccccctgggccagttaagagcgagcatcattcatccacttaaacacaccccaaatccacagaacgaactgtctgtcaacccagcagctggtggagagtggtcacgagtttgagccagcctgggctacaaagcgagtgcaaggccacccagggttaggagactgtcttcaaagactgccgtgcatcaaaactttctttaaagaaaaatacatttcttagccgggtggtgatggcgcacgcctgtaatcccagcacttgggaggcagagacatgcagatttctgagtttgaggccagcctggtctacaaagtgagtttcaggacagccagggctacagagaaaccctgtctcgaaaaaccaaaaaaaaaaaaaaaaaaaaaaagaaaagaaagaaagaaagaaagaaaggaaaagaaaagaatacatttcattaaaaaaaaaaagaaagaaagaaaaataaaaatacatttctttatgtttttgagtacatatgtgtgcctgagtttatgtgcatcacgtgcatgcagctctgtgtggccagaggacatcagatctcccagagctggatttgcaggaggttctcagctgtctgatatgggtgcttgaaactgaaccaggctctctaaagagcagctggacttgaaccgctaagccatctctccagcccccttcccaaaagaacttttaaacatcatgcctggtaatagaatagcatccacatacacggtagaaaggcttacttgtgcccatatgcactaccttggcacctacattcttgtgtcgtgagaacctctgaagtttctctcagcaaactccacacatttcctgcgcagttatcatctgtagccatcacgttgctcggtggatccctaagataactgtctgtcacccctgagtcatgcttccgtttgccctccatacctctgctcaactttgcagctgtgttccagctcttcagacctctcaatcagcatcgctatcttcccgagtcatccaggggagtcctgcctaggcaggcccaggagcttccccatgccctgcttggctgcaggcctttctgccctagacgcccagcaatggtttcacccttgcgcctcactactggtcacatgatagaaaacccagtgcatacccaagtctccccctcagtcctgacttgctcatgtctctcacctgtaccctccgggcaaccactgaggcatctggtggttcactaggaaaatattgtcttaaagtagtaacagcaataaataaggcacagaacaggctaagccttgttctcattaacagccggatgtcataaatccttaccgtgactcaggaaggcgatatcggagctgagttctgtcccagaaacctgatgttgtcccctgatctccacatgtgtgct

SEQ ID NO: 1008 - DNA, 1105 bp, Mus musculus
gtgccttccagcaaaagtcccagagtgagcagaacaggccgctggcctggaagccaagctggctgccatttgcgtactgagaggtgggggaccctgggcaggaagctggctgagccccaagacctcaggggccatgggcggggagctggtgactggcctgggggccctgagacggagaaagcgcctgctggagttcaacaaggcggagaaacacgtgcacaacttcatgatggacatccattatgccaaagagatgaaggagtcagcggcgcggctgctgcaggaagcctggatgtactacaagcacactcgaaggaaggactcccgggctgcccgcagacatcagcgcaagatgctggccgccatccacacgttccgccaggtacggctgaaacaccggaagctccgggaacaagtgaattccatggtggacatctccaagatgcacatgatcctgtgcgacctgcagctgggtctcagctcctcgcaccgtgccctggagaagagaatcgacggtctggcaggaaagctggatgccctgacagagctgctcggcactgctctgcagcaacagcagctaccagaacccagtcaggaggccacatagctccacatgaactcacagaagaaccaggctaagtacccaaggaccgagctcaaggacatgctccctgccaattccgaccaagccccacgataaatcacctcaagatgccaggacccaagtggatccacgttgaggtgcatggactctggtggtggcagccatgagtggacactgaattggacctcccacgtcaatgggaacatggccaccactacacatatgccctcatcagaagccctttctgctgtgctgctgttcaggaccccttaatctctgttggaggaggaggtgcctggggtctaggatgctaggaagcttcagttaaccgcgggcgggtctcgctgaaggaaccaggtccgagcgacgggaggtgctgccccctggtggacacctgggaagatgccgtttcctcctgattgcagagactgtgccagaagagggtacagggtgctgctcaccaatccaccctcacactttgtaataaatggtaaacgaaga

SEQ ID NO: 1009 - protein, 157 aa, Mus musculus
MGGELVTGLGALRRRKRLLEFNKAEKHVHNFMMDIHYAKEMKESAARLLQEAWMYYKHTRRKDSRAARRHQRKMLAAIHTFRQVRLKHRKLREQVNSMVDISKMHMILCDLQLGLSSSHRALEKRIDGLAGKLDALTELLGTALQQQQLPEPSQEAT

SEQ ID NO: 1010 - DNA, 461 bp, Mus musculus
caggccgctggcctggaagccaagctggctgccatttgcgtactgagaggtgggggaccctgggcaggaagctggctgagccccaagacctcaggggccatgggcggggagctggtgactggcctgggggccctgagacggagaaagcgcctgctggagcaggagaagagggtggccggctgggcgttggtgctggcgggaactggcatcggactcatggttctgcacgctgagatgttgtggttcctgggctgcaagtgggtgctgtacctgctcctggttaagtgtttgatcaccctgtccactgccttcctcctttgtcttattgtggtcttccatgccaaggaggtccagctgctcggcactgctctgcagcaacagcagctaccagaacccagtcaggaggccacatagctccacatgaactcacagaagaaccaggctaagtacccaaggaccga

SEQ ID NO: 1011 - protein, 104 aa, Mus musculus
MGGELVTGLGALRRRKRLLEQEKRVAGWALVLAGTGIGLMVLHAEMLWFLGCKWVLYLLLVKCLITLSTAFLLCLIVVFHAKEVQLLGTALQQQQLPEPSQEAT

SEQ ID NO: 1012 - DNA, 1889 bp, Mus musculus
tgcctgctgcagttaccactccccagagggcacagggctaggctgtgccttccagcaaaagtcccagagtgagcagaacaggccgctggcctggaagccaagctggctgccatttgcgtactgagaggtgggggaccctgggcaggaagctggctgagccccaagacctcaggggccatgggcggggagctggtgactggcctgggggccctgagacggagaaagcgcctgctggagcaggagaagagggtggccggctgggcgttggtgctggcgggaactggcatcggactcatggttctgcacgctgagatgttgtggttcctgggctgcaagtgggtgctgtacctgctcctggttaagtgtttgatcaccctgtccactgccttcctcctttgtcttattgtggtcttccatgccaaggaggtccaggtaagctgggccccgcccctcagctttgctctctatgtatccttgttctccttccctgagatacctgaacaggcagattctgctgccgtagctgatccatcccccaatgtagcccccaagggcttccttgcccacttagagatggaggctatgcctaccctcccagctcccaggtccagagaccacttacgtttttaaaattaattttggtcctgaggattgaagtcaggaccttacaccaagccacgcccccagcccctcattgggggattctaggcaggggctctaccactgaaccacacctccagcccctcactgggggattctaggcaggggctctaccactgaaccacacccccagcaggctgtcaatgccacggggcacctcacagacacactgtggctgattccgatcacattcctgaccattggctatggggacgtggtacctggcaccatgtggggcaagattgtctgcctgtgcaccggagtcatgggggtctgctgcacagctctcctggtggctgtggtggctcggaagctggagttcaacaaggcggagaaacacgtgcacaacttcatgatggacatccattatgccaaagagatgaaggagtcagcggcgcggctgctgcaggaagcctggatgtactacaagcacactcgaaggaaggactcccgggctgcccgcagacatcagcgcaagatgctggccgccatccacacgttccgccaggtacggctgaaacaccggaagctccgggaacaagtgaattccatggtggacatctccaagatgcacatgatcctgtgcgacctgcagctgggtctcagctcctcgcaccgtgccctggagaagagaatcgacggtctggcaggaaagctggatgccctgacagagctgctcggcactgctctgcagcaacagcagctaccagaacccagtcaggaggccacatagctccacatgaactcacagaagaaccaggctaagtacccaaggaccgagctcaaggacatgctccctgccaattccgaccaagccccacgataaatcacctcaagatgccaggacccaagtggatccacgttgaggtgcatggactctggtggtggcagccatgagtggacactgaattggacctcccacgtcaatgggaacatggccaccactacacatatgccctcatcagaagccctttctgctgtgctgctgttcaggaccccttaatctctgttggaggaggaggtgcctggggtctaggatgctaggaagcttcagttaaccgcgggcgggtctcgctgaaggaaccaggtccgagcgacgggaggtgctgccccctggtggacacctgggaagatgccgtttcctcctgattgcagagactgtgccagaagagggtacagggtgctgctcaccaatccaccctcacactttgtaataaatggtaaacgaa

SEQ ID NO: 1013 - protein, 167 aa, Mus musculus
MWGKIVCLCTGVMGVCCTALLVAVVARKLEFNKAEKHVHNFMMDIHYAKEMKESAARLLQEAWMYYKHTRRKDSRAARRHQRKMLAAIHTFRQVRLKHRKLREQVNSMVDISKMHMILCDLQLGLSSSHRALEKRIDGLAGKLDALTELLGTALQQQQLPEPSQEAT

SEQ ID NO: 1014 - DNA, 1950 bp, Mus musculus
gcctgctgcagttaccactccccagagggcacagggctaggctgtgccttccagcaaaagtcccagagtgagcagaacaggccgctggcctggaagccaagctggctgccatttgcgtactgagaggtgggggaccctgggcaggaagctggctgagccccaagacctcaggggccatgggcggggagctggtgactggcctgggggccctgagacggagaaagcgcctgctggagcaggagaagagggtggccggctgggcgttggtgctggcgggaactggcatcggactcatggttctgcacgctgagatgttgtggttcctgggctgcaagtgggtgctgtacctgctcctggttaagtgtttgatcaccctgtccactgccttcctcctttgtcttattgtggtcttccatgccaaggaggtccagctgttcatgactgacaacgggctccgggactggcgcgtggcgctgacccggcggcaggtggcgcagatcctgctggagctgttggtgtgcggggtgcacccggtgcccctacggagcccgcactgcgccctggcgggggaggccaccgacgcgcagccctggccgggtttcctgggcgaaggcgaggcgttgctgtccctggccatgctcctgcgtctctacctggtgccccgcgcggtgctgctgcgcagcggggtcctgctcaacgcgtcctaccgcagcatcggggcgctcaaccaagtccgcttccgccactggttcgtggccaagctgtacatgaacacgcacccgggtcgcctgctgctgggcctcacgctgggtctctggctcaccacagcttgggtgctgtctgtggctgagaggcaggctgtcaatgccacggggcacctcacagacacactgtggctgattccgatcacattcctgaccattggctatggggacgtggtacctggcaccatgtggggcaagattgtctgcctgtgcaccggagtcatgggggtctgctgcacagctctcctggtggctgtggtggctcggaagctggagttcaacaaggcggagaaacacgtgcacaacttcatgatggacatccattatgccaaagagatgaaggagtcagcggcgcggctgctgcaggaagcctggatgtactacaagcacactcgaaggaaggactcccgggctgcccgcagacatcagcgcaagatgctggccgccatccacacgttccgccaggtacggctgaaacaccggaagctccgggaacaagtgaattccatggtggacatctccaagatgcacatgatcctgtgcgacctgcagctgggtctcagctcctcgcaccgtgccctggagaagagaatcgacggtctggcaggaaagctggatgccctgacagagctgctcggcactgctctgcagcaacagcagctaccagaacccagtcaggaggccacatagctccacatgaactcacagaagaaccaggctaagtacccaaggaccgagctcaaggacatgctccctgccaattccgaccaagccccacgataaatcacctcaagatgccaggacccaagtggatccacgttgaggtgcatggactctggtggtggcagccatgagtggacactgaattggacctcccacgtcaatgggaacatggccaccactacacatatgccctcatcagaagccctttctgctgtgctgctgttcaggaccccttaatctctgttggaggaggaggtgcctggggtctaggatgctaggaagcttcagttaaccgcgggcgggtctcgctgaaggaaccaggtccgagcgacgggaggtgctgccccctggtggacacctgggaagatgccgtttcctcctgattgcagagactgtgccagaagagggtacagggtgctgctcaccaatccaccctcacactttgtaataaatggtaaacgaa

SEQ ID NO: 1015 - protein, 421 aa, Mus musculus
MGGELVTGLGALRRRKRLLEQEKRVAGWALVLAGTGIGLMVLHAEMLWFLGCKWVLYLLLVKCLITLSTAFLLCLIVVFHAKEVQLFMTDNGLRDWRVTRRQVAQILLELLVCGVHPVPLRSPHCAGEATDAQPWPGFLGEGEALLSLAMLLRLYLVPRAVLLRSGVLLNASYRSIGALNQVRFRHWFVAKLYMNTHPGRLLLGLTLGLWLTTAWVLSVAERQAVNATGHLTDTLWLIPITFLTIGYGDVVPGTMWGKIVCLCTGVMGVCCTALLVAVVARKLEFNKAEKHVHNFMMDIHYAKEMKESAARLLQEAWMYYKHTRRKDSRAARRHQRKMLAAIHTFRQVRLKHRKLREQVNSMVDISKMHMILCDLQLGLSSSHRALEKRIDGLAGKLDALTELLGTALQQQQLPEPSQEAT

SEQ ID NO: 1016 - DNA, 34998 bp, Homo sapiens
tgagactccatctcaaaaaaaaaaaaaaaaaaagtaaaataaaaggcttcatttattagcaaggatgtggagctactgggattctcacatccaagtagtatgtgtgtaaaatagaacaaccactttgaaaaactatttttcagtacctacctgtgtttaaagtgtgaggaaagccagaagcagtggctcactcctgtaatccccgcactttgggaggccaaggtagaaggaacacttgagcccaggactttgaaaccaacctgggcaacatggtgagaccttatctctacaaaaaactaaaaatattagtggggcatgatggtgcatgcctgtggtctcacctactagagaggctgaggtgggaggattgcttgagcccaggtatttgaggttgcagtgagctatgatcgctccattgcactccagcctgggcaacagagtaagacactgtctctatttttttttaagtgaagaagatgtgaatgaagatgtggcagtgcccctgaagggcttacaatgtcaaatagggataacattttctgaactttctcctacagccaatggggatacatggactgatatagagaaggggcgaggcatggtcaaagccaggtgatatgaggctctccctgtggccatgcaggagacaggcccgagggagtgagattggaggcagggagaccagggaggtggatggtgagagggcctctcatgctgcctggtttccagagtcaagggcaatttaggattaaaaggctggaggcagaaggaggaactgagaaaccagagtgtgagtgttatggtctacgaggagttaaagtcccttctaagtgagggtagtggtttcctctggaggttgggggttcccgatcataaaggagcacataaggagattccagggaatgcaaatactttctcttggtgtgcctttgattttatggaggttcacaatacatcatttgtccaaaatgtaccactatgttttatgcacttttggcatataaggtatattttatttatttatttgtttttgttgtttttattttttgagacagagtctcgctctgtcgcccaggctggagtgcagtggcacaatcttggctcactgcaagctccgcctcctgggtttacgccattctcctgcctcagcctcccgagtagctgggactataggcgcccaccaccatgcccggctaattttttttttgtatttttagtagagacggggtttcaccgtgttagccagggtgttctcgatctcctgacctcatgatctacctgcctcggcctcccaaagtgctaggattacaggcttgagccaccgcgccagacctattttttttttaatgtcaaaagcaaagacatggctagagctcaggtctttggacatccatattagagctttttaatctttggtgatagggattcagaatactggttatctctggtgtatcagttgggagggttacaagagagcctcttgtggtgatggagatagcttgatagagatggtggtcacacatgtctgtatacaggtttaactgaattaatccatacacttaagatctgcggacttgcaatgtgtaagtctgtcttaggtcagtcctggtggctcacgcctgtaatcccagcactttgggaggtcgaggtaggaaaattgcttgaagccaggagttcaggaccagcctggccaacatagagagaccctgtctttactaaaaattttaaaagtaactaggtgcagtggtgtgcgcctgtagtcccagctacctggaaggctgatgcaggaggatctcttgggggcaggaggtcgaggctgcagtgagctatgattgggccgctgcactcagcctgggtgacagagtgagaccctgcctctaaaaagaaaaagaaaacaattttaaatgccacatatgattaaatggtattacctctaggttttacactgaaataacataggaagtgaggaagtaaatggaagcacagatgaaatgcaattgaccacgaattggtatttgttaaatagatacatggagatttattatactcttctgttcacttctatatgtttgaagttctcgataataaatatatatgtacacatatatgaatatgtatgtatatatgaaaaggtagataatagatagaactaatacctatttaactcacagtgacccatacacccacttgggaacccagacatctctcttcttctggtaatgcagataatgattatttaatgtctggattttacatacaaccttgccccttcccaagattcccccaccctcccaagcttaagcggaagtggaagtccaggtcagcaccaaggacagatccacagtattgggtctcagaaccacagacagcaactcaactaacggaggacaaaagacagggaaatgaagaaataccatcttgaacagtgtggaacaggacaagaggctagagtcaaaaaacgcctatcagtatcattgaacaagagcattccttcaacaaatattcattgagcatctgctatgtgccaggcactgttctgaacacaggatggccaggttcctgtccttaaacaatgagacagataaaatgagatcattttatatagtcataagttctatgataaaatataaagcagtgaaataagatgtaggatgattgagggagatggaagagaccgtttttgaagaggtggttaaggcagagattatatttgagcagagtggctggatactgtggctcatgcctgtaatctcagtacttcaggaggctgaggaaggaggattatttcagtccaggagttcaagaccagcctgggaaacataggaagactccttttctagcaatttttttttaatttgctaggcatggtggcttgtacctgtagtcccagctacttaggaggctgatgcaggataatcacttgagcctgggaggttgaggctgcagtgagctatgattgtgccactctactccagcctgggtgacagagcaagaccttgtctcaaaaaaatttaataaaataggaaacaaaaattatatataaatatatatgaatatataaataatataaatttatataaatttataaatataaataacataaacataaatataaatataaatataatgatatatatttataatataaatatatattttataatataaataatatgaatataattatatgtttataataatagaaatataaataagtatttataataatagaaatataaagaaatatttataatattataaatataaatatttataatattataaatataaacaaatgtttatgataatataaatttatatatattatataaattataattatttattagatattatatataaattatatataatatataaatataatatataatatatttataatattatatgattatatatttatatattattgatatatgtattatttttattatatgttatatgatattatatattgtatactattataatatatataataatttatatatatatttgagcagagaactgaatgaagtgagggaatgccccatgaagagagtggaggtgcaagcattcaggaagagggaacagaaaatgctaagacccagaggcagaaaaaagcttggtatgtttgagaatcagcaacaaggccaatgtgataaagcaaagtaaatgcaaaggaaagtgatgggaggagtttcgccaagataggaatagacacacagaaagaaagcaatagagaaagacagacaagaaaattgagacccaagctgagactgaccaagaaaggctcataggcaaaaaaattaggagcaaaatgatgctagctgcagtgtatggagtgcaatttgcattatacattttattattttattatctattcacatatacatacatatgcatatacttttttttttttagttgaagtctcactctgtcacccaggctggagtgcaatggcacgatcttggctcattgcaacttctgcctcccaggttcaagtgattctcatgcctcagcctcctgagtagctgggattacaggtgcccaccaccacgcctggctaattttttttgtatttttagtagagatgaggtttcgccatgctggccaggctggacttgaactcctggccttaagtgatctgcctgcctcagcctcccaaagtgctggaattacaggcgtgagccaccatgcctggcccatatatatatattttttattatggaaaacttcaaacatgcagatatgaacataagggtataataatctactttttattgtgtaacaacccgctccaaaagttagtgtcttaaaataaacaatctcatgattgaggcttgactgggcatttctgctggtctctcctgaagtcattcacatggttgcattctgttaggacaggactggggctttagccaagatagcttcattctccctgcatggcctctccatgtgactagcttgggcttccttacagcatggtggtcttctagttctaagggtacaaaagcagaagcttctagtttccttaacatctggacctggaactggttcagtgtcatatttgccacattctattagtcaaagcaagtcatgagccagatagactgaaggagaaggaacatactgttccttttcgtgggagaagccacctgccagtgcagggaagggaggagtcactggcaggcaacttgggagacaatgtatcacaagactttaacatagaccaggcctgctgttagggctccagacattctctctcacctaagcctcaagcagccctgtcacataggaaacataatccctcttttacaagtttcacagagcacacaactatggatggcaactaggtttgaactcaggtttgtctctaaaccaggctgtacgtataacatattccatacaaaaataaagttaggccgggggtggtgtctcatccctctaatctcagccctttgggaggctgaggcaggtggatcatctgaggtcagaagttcaagatcagcctggctagcatggtgaaaccccgtctctactaaaaataccaaaattagcctggtgtggtggtgcatgcctgtagtaccagctacttgggagtctgaggcaggagaatcgcttgcatccaggaggtggaggttgcagtgagccaagatcgtgccactgcactccagcctgggtgacagagcgagactctgtcttgaatgaatgaatgaatgaatgaataaagtcagtggtcacatcgaggcttaaaccgaggtctctagacttccatattgtgagatatagatatctgtatatcatatacatctgtatacactatacatctgtatactatgccatatactatactacatatctgcatatactatatatagagtgtgggtgtatgtctctgtgtaataacataatatacatacatttttaactggcggggaacacagagatacaaagaagaaaataaaagcagaaatgaagaaaaaaggagaaaggagaaaagcatgcacttggagactaagaccaggagatagaaacagagaagcaagacaaggcgcagtggctcacacttgtaattccagcaccttaggaggacgaggcaggaggatggcttgagaccaggagttcgcgaccagcctggcaacatagtgggaactgtttttatgaccaaaaaaatgttttttaattaaaaagagagagagagaagaaagaaagaaagaaaagaaaaaagaaagagagagagaaagaagaaagaaagaaaaagagaaagaaagaaaaaacaaggacaatgatatacagagagaaaaatgaagactgagagcaaagaagagactgagattgatggaaccacgaggtctccctcctttagcctggaaactccacaagagcaagaattttgtccatttttgttcattacatatcgccaactccttgagcagtgcctggcactcagtaggtgttttgctctatgttggcaagaaaccaggctggacagggagagtgtctgcagttgcctaagtgaacactaggtgacagtatttataagccctggagcttccaggctccaaggtcccagagatggcggtggaggatttgccgccactgacctctgactttcaggatctcttcctcggggctcagccctgcctttccctgcacaagccttgggcgatgaatgacctttccgcctgagacaccctcttcactctccttcaccagcctgcccagttaaacaactctttgtccctggccccttcctgctgggccccgaggcacctgggttctttccaggcccggagatggggctgcgacagaggtggtgcagctgggacaaggccaaggaaaaatcctggagactctggaatcagttcttccagtgtatgagacccagcccctcctccctcagacccaggggtccagaccccagcacctcctccctcagaccagcagtccaggccccagccctcctccctcagactcaggagtccagaccccagatcctcctccttcagacccaggagtccaggcctcagcccctcctccctcagacctaggagtccagatccagcccctcctctctcagaccagcagtctagaccccagcccccctcctccctcagaaccaggagtccagaccccctgcccctcctctctcagaccagcagtccagaccccatcccctccttcctcagacccaggagtccagaccccagcccctcctccctcagaccccctcctccctcagaaccaggagtccagacccccagcttcttcctcctggacccttcctcttaggcattttgaggtcctctactattccctctccctctcttttacacaaacccctctctccctccactccccattctaggattgagaccaagggtgagtcacaagaagccctgaggccctgagtcacctcgccctccccccttggcccctccctgggctggaggcagctggctgaggagtgaagcagtttcctaggactgacccctgcatcccaggactgcagtttgaaggcaggtgcccttcccactgtaaccccatcactgccacccaggcatgtccatgcccatcctttgctgtttttctctttcagtcatggcctatttggagacaaaatttctctgtgctctaacttccgtgtcttgattgtgttttccggtttctctgcacctgtgggtctctttgattttttttaatacatgcccccaccatccctggctgaatgcctcgaggtctctctgattatctctctctccctctgtgtcagtctctgtctccgtttttcacaagtgcctgaactggggcacagatgccatggcatggccgcagctggagcgctatttagtggcttctgacccttgggtggccacagtctctggatcactggccctcaacccctgagtgggactggggtagaaccggaaggaaccaggctgtccgtagatgtgccagtgaacagcagagagaaactgaggcagagacaagcatagagaggcccggagagagagagagagacccaagaggagaccaggaggcagggagagagtgaaacagagacggagagaaacaccgattcagcaagagacagacaaaaacagagggccctagagacggagagatggagacagagtgagacacgatgacagagacacaggcaatgatgaacacagagagagacatgacagagagacagtgacggggaaagaaggaaacagaggagcagagagggacacgaagatggagaaagggacagagcgatgagagagacacagagaggctaagagaggcagagacagagagacagagtgaagagagacagagagagacaaaggtaccaggagagaagaacagagacagagataaagacaaacctggccaggcacggtggcttacgcctgtaatcccagaactttgggaggccgaggcgggtggatcacctgaggtcagaagttcacgaccagcctggccaacatggtgaaacctcgtctctactaaaaatacgaaaattagctgggtgtggtggtgcacacctgtaatatcagctactcgggaggttgaggtaggagaattgcttgaacctgggaggtggaggttgcagtgagccgagatcgtgccactgcactccagccatgggagacagagcaagactctatctcaaaaaaaaaaaaaaagacaaacgcagaggtttccagatcaggagagactgagacaggaagcaagtcccaaagaaccagagaaagagccggagagggaggagagagacgcagcgagccgggcggccagtgggcaggggtgcccaggctgcaggctcaggagtgcccggcggctgcactttccccaagtggacgcatgtgtggtgtctgggcgcgcccgggtgtgtctccagccctctcccgccaagtctcgccgagtgggtaatcatgtgtgtgccgaggggcggagcccccgcaagggttgtgtttttgccactgggcgtgtccatgtgtatggtttggtgtctctgggtgtgtttgtgtgggctgccttggtgtgcagtcagacatgtctgtgcgtgtctcgcttccctggggctggtgggtccagggtcccacacgacctaggacacaaggagggggagggttgtgtccgcaggttccttgcagaggggtgtgcatgaggccaagggcagtgtcatcagttcagtgcatgatgctgggaggtgatgtgcgtcaccaggtcagtgcatgcctgtgtgtctccacaggagggtttgatctgtgtcggagcgtatggtgtacagatccatgagtggctcgtgctgcgacacatggagatgtcctatgttgtgtgttgctctgagagtcaccgtgcacattccacactggcatttgctgtatctcacgtcagggtccatatccctgttgggggcctcttccttctcagcccccagcacccaccctgagtgccaaccaccccaagtgtcttgtgtttgtgtagctgtgtgttatgttgtgtcggaggatacacccccctcccccgatgctggtgttgtgtgggtggcggtagacctcagtgtcagtagtatcagtgagtggtgacatctggtgttttatgggacatgtggtcgtttgtggaaggttgggtgtgttggaaaacattgtgtctatgtgttttgcgttactgtgtgctggtgtattactccgtgtatgttgttgtgtggccacgcatgttggaatataacgtgttgggttgtgtggaggtattgtatgtcatgtttgggtgtggctcatggctcagaggtgatggtgtatgttgcgtttgtttttttgtttttgcttgttttagagataggatcttgctatgttgcccaggctggtctcaaacccctgggctccagcaatcctcccacctcaacctcccaaactgctgggattacaggcatgagccactgcacccagccgtatgttgcatttgggcactggggtctatgaaggtccaaccccatccccttcccccagggcatcatcctggatgttgtcctgtgtggccagaatataccagaatcatcttgcttcaggcatgtgcttcttgggtttctccgtgtgtcgctgtaccttgtaggtctctgcatgcatccactcagcttgtcctctgaccatacatttgaatcgcaccacacatcagagcatgctgaatcagtgcgtgttttgaatcatcactgcgagcacttgtgttcgagtcaacaggcgccacaatgtatgtgcaattctctagctctgggtgattgggggctactataggtatgtccctaaatgttgtgtgtctacacgtattgggtttcgttccaagggtgtgtagtgtttaggaaactgggactgcacagtgtttgtgtcggtgtgtggtgtgtggcatcagggcgtcactactttaatatatattgtgtgtttgtgtaacacctggtgtatgttgtgtttgtgtggccacagttgtgcatcgtcctatttgtggtgtttgggtgtggctctttgtgtcagagaaagttgtgacaactttgagtgtaatatttgtgcctgtgtgtggacggtgtttgggtggctgtgtgtgccacgggatactgcctgcttgctaagtgctggtgtgtgtcacaccatgtgtgtggtgtctgggtgtggctgtgggtttcagagcttgctgggagttgtgagtcactctgtgtaggttgtgttgtgtgccctggtgtgttagtctccgtcttgggctgtggagtgtccttcggtgtctgggtgtggtgagtagaggtgtgtgtcacaaagtacagaccattgtgtgtgacaaagcccatcgtgtgtctgtgtgtgtctttatccacgtggatggacgtctctttcttgctctgccccaagacacaccctagcccctccttattctcaaaagggggagctggggagcctccccctaccctggggcctcccctgcccctccccgccctgcctggccgtcaccactccccagagggcacagggctctgctgtgcctcagagcaaaagtcccagagccagcagagcaggctgacgacctgcaagccacagtggctgccctgtgcgtgctgcgaggtgggggaccctgggcaggaagctggctgagccccaagaccccgggggccatgggcggggatctggtgcttggcctgggggccttgagacgccgaaagcgcttgctggagcaggagaagtctctggccggctgggcactggtgctggcaggaactggcattggactcatggtgctgcatgcagagatgctgtggttcggggggtgctcggtgagtggggcatggtggctgggagctgggactcctaggtctgagggaggaggggctgggggtcaggactcttgggtctgagggagggggggctgggggtcaggactcctgggtctgagggaggaggggctgagggtcaggactcctgggtctgagggaggagggactggggacttggactcctgggtctgagggaggagggactgagggcctggactcctgggtctgagggaggaggggctgggggtcaggactcctgggtctgagggaggaggggctggggtctggactcctgggtctgagggaggaggggctgggggtcaggactcctggatctgagggaggagaggttgggggcctagactcttgggtctgagggaggaggggctttggctgggactcctgggtgctcccaggagacagttgctggggtccttctctgcaaaaggaagggaatatttgtttcagtgtttcagtctttgaagatgttgccattagacggccagaggtccaggacccctggaggccagagggtggctgatcagacactcaagccccccaagagccaataaggggagaggtagccccaggtttggtgaagggagagtggaggaaagacaaagttcttccagtaggcggcagctctttggtccttgtctaacctctaatgtttacccagtgccttagatgcaaaggacagaaaaaactgccttgggggtggggatgggaaatgggaaacaaacctctcccccgacctgcctccccacaccaaccccaacccagtctccactgttaacaagctcaatttctccccaaatctgcatgctgattagtcagggaaatagtggagaggtaggcttacagtggcctggactcctaggtaccaggagaggagggggctgggtcctggattcctgagtcttaaggagaagggggttttgattgcttttggggaagaggggctgactccgaagatgagtggtgagtagggaagaaaggggaaagtggggtcagggcaggtctcagcaggctcccgtcacattccagccctggtcaggccagtgatggggcagatcaaggacaagggttggaataagtggcttgaggggagaacagacttgctcaacaggaaaggaggggctggagacctctctggcagaagggttgtggaactgggctggtagggccagatgcggacactgatatgaagattgggtagattcctgagggtctgatgttccgacttggatctggagggggtggtgggcagctctgaagtgaccaggagccacatggagggtcaggcatgcagcttcctctggcaggcggcgggcactgagggggtggggccgccgaagtccatgccaacaggaagcatggccggggcctgcccgccgctcccacgccgaagcaccgcacccagaagccgaggtgggaacacagtgaccctggcagatgggaagagacggggtccatcctaccccacttcacccctctgctttctcacccctcatttcttccttccctccaccatggccaggccactgcctctatcagtgggaccttggggaagctgttacaaccctctgaacctcagtttccccatctgtaaattggggtgagggttaaaatacatgaccctaagggtcaccctccaccctttttattttatgtagagatgggaccttgctttgttgcctaggctggtcttgaactcctggactcaggcaatcctcctgcctcaaagtgctgggattacaggcctgagccacagctcctcagtccccttttgaggactctcttaataacatccaccgcccctcaccacctccatctcaatctaatgagctcatttctgcaaaggacccagacacctgctccccagggggaggggctggcagagaggcaggtgcaaaaccctagggagtccaagggaactggatagagatatccaaaagcaccaggtggggtggaggaggagggatggggagaggtaccgagagagacagagacacagagatacatggagagaaaaagagagatggagacaaaaatgcagaaagatagagaagtacagctaaagagaaagacaaatagggctatcaagctactgagaaatccaccagtgagagatacacacacagcgttagaaaagacaatagagggccgggcgcggtggctcacgcctgtaatcccagcactttgggaggccgaggtgggcggatcacaaggtcaggacatcgagaccatcctggctaacacggtgaaaccccatctctactaaaaacacaaaaaattagccaggcatggcggcgtgtgcctgtagtcccagctactcaggaggctgaggcaggagaatggtgtgaacccaggaggcggagcttgcaatgagccaagatcgtgccactgcactccagcctgggtgacagagcaagactccgtctcaaaaaaaaaagagacaatagaaacaaagaccctcaaaacacatagaaagacagcaacaaccatccctagagacagggaaattcagagaacagagtacaggcccaagtgcagacaggtccgggatttgggggaagaggaaatggaaaagtagagaggaccaccagagaagcaaattgcagtgtgaggagggagcttgttgtctagtggtgtgggcagttaagacagactgaagaaagaggcagggaaccagggagccatagaaggtgggggagggctggtgacaacagcactattgttctgatagggggttggggagcaggcccctggggcaggaaactggccctcttcccctgctcagaggcgggatgctggcccagccaggggagctggcagccctcttaggagaaacaggtgcaatgctttgtaaggacgcccaggtggtcccctccccctgcaaatacccgccaggcagggaccaacccctcttaggaaatccaacagtcccagtcccctctaaatccctctctccagaattctagattcctccaaggttgtgccacacaaagagaggaaaaaaaaaaaaaggaacaatttctccgtggtttctggaggccctgtgcttccggccagatctgccctgggcttagagccagaagagaggggtggcagtggggagctgcaggggggcagaaccgagggggctgtctcagagctgaggctgggtctcagggactcagccctccggatgagagcagagaagggtgtgactcagtctttgaggattgaatggtagtttctacattcttccagatctggggttggggttgattgaagttggtttctagggcaacaccaggtgggtaggaagggaaggggagggggcactctctagaggctagatgtctttttctagacaccacacacacacacacacacacacacacacacacacacacacctgaagaactatttttgatgtgaaatgggacaggaataagaaggaatgtgagtttcaaggtcccccttcatgggtatgggtcttgggagaagagctgaggaagagggtagacaccagcatctggacagggttgtcctgttggggagaaagagagcattcctggggaccagatgatggtgtttttttgtttgtttgtttgcttgcttgcttgtttcgagacggagactcgctctgttgcccaggctggagtgcagtggcgcgatctctcagctcactgcaacttccacctcctgggttcaagattctggttcctcagcctcccaagtagctgggattacacacccagctaattttttgtttttttagtagagactgggtttcaccatgttggccagggggtctcaaactcccgaccttcggtgatccacctgcctcagcctcccagagtgttgggattacaggtgtgagccaccgcactgggcccagatgatggttttgagacttctccagaaccgacacatcaagagggactgatttgcaggggaaggaggctaggaaaattgggaatcaaaaaaaaaaaatggtggttttgaaggaaaggtggagggccaggtggagggagacctgggatctcacaccgctttttccgtcccccctgacagtgggcgctctacctgttcctggttaaatgcacgatcagcatttccaccttcttactcctctgcctcatcgtggcctttcatgccaaagaggtccaggtagggcaggccccgcccctaagccttgctccctccaaccccctcagcgccctgtcagctcacactttccaccctcctcctcctcctgatctgagtaatgaagttcttctgccctaggtgctgcgtccacaccctcacctacccagatgggatgaaccatgagcagacaggcagagcctcccccaccagctccgccttcccctgtagtccccagcccccccttgcacactcacggatgctgagagtgcccttgcagccctgcttccgcccccaggcctctgtccactctgctcccaggcactcagcttcccagatctctgtgctccgacatggcatccccaatccagtcctcaagcaacctaaggtcctagggctgcccactcctttttttttttttttttttttttttttttgagacaaggtcttgctctgttgcccaggctagagtggagtggcacgatctctgctcactgcaacctccacctcctgggttcaaacaattctcatgcctcagcctcccaagtagctgtgactacaggcagatgccaccacgcccagctaatttttttgtattttagtagaaacggggtttcactatgttgtccaggctggtctccaactactgagctcaagcagtctgcccaccttgtcctcccaaagtgctaggattacgggcttgagccactgcacctggtccggtcccaggggtgcccactcctaatcaccctatctctgtgccaataacctccctcttgccccagacccaggagctctccccatccataccccaccttgggtctcacccagacacatcccatcccctattgtcccattgccccagatcctgttgctccattccctttcccctcttccccctctcctatcataactttgcatgtaaaatggggattattggccatgtgtggcaattctatgagcagtgcctggcacataagaggtgctcagtaaacagtgcacattatcatcttatcatagagtagctaagtagcctgtagcccagtgcgccattgcccatggaagggacctgggcctcagcttccacatctataaaatgggggcaataataatatcaatctcactgggttgtgggcatttactaagtcacaatatgtaaacgggatagagcagtacctggcgtatccacggtgcccagtacatgctgattttgttattgttattgttttgtttattttgagatggagtctcgctctgtcacccaggctagagtgcagtggcatgacctcagctcactgcaacctctgcctcctgggttcaagtgattctcctacctcagactccccagaagctgggactataggtgtgcgccaccatgcccggcttatttttgtatttttcagtagagatggagtttcaccatgttggccaggcttgtctcaaactcttgacctcaagtgatccacccaccgcagcctcccaaagtgctgggattacaggcgtaagccatcgcgcccggcccatggctttgttattgctgatattattattacagttattacgcgtgtcaaccgaaaggggagtaggagcgagctccaggcatgtggaatgcaagctctagggaggcaggggggtctgttgggttcactgtgtatccttagcacatagaacaatgtcaggcacacagtcggcgctcagtcagtgttcaaaggctggaagtgggctgaaactagtggggtgggtggtggggaaggaggaaaaagtggaaagatgtcttcctcaagtcctgtcccgctccctccctatccctctcccgccctgcactccctccctcctggccaggcggcacaccccacttatctcagggcgcaggcaggcgcgggccgccgcctgacctgcgcctgacctgctcctgacccctcccttcttggccccctaccggcagctgttcatgaccgacaacgggctgcgggactggcgcgtggcgctgaccgggcggcaggcggcgcagatcgtgctggagctggtggtgtgtgggctgcacccggcgcccgtgcggggcccgccgtgcgtgcaggatttaggggcgccgctgacctccccgcagccctggccgggattcctgggccaaggggaagcgctgctgtccctggccatgctgctgcgtctctacctggtgccccgcgccgtgctcctgcgcagcggcgtcctgctcaacgcttcctaccgcagcatcggcgctctcaatcaagtccgcttccgccactggttcgtggccaagctttacatgaacacgcaccctggccgcctgctgctcggcctcacgcttggcctctggctgaccaccgcctgggtgctgtccgtggccgagaggtgagggtgatggaggcataaatgcgcaggggggaaccccggacagccacggcggccgtcctgtgccgcggtgcaggttgaggccccctaggaccaagcagtggagaaagttcacactttgaccccttctcctcttgctggctgaaatttgcccacactcccatcaactggggtgagaggaaccaacagacaagcccccagccaatcctccacctgcagccttcagtctccccaaacgcacacacagaccctagaaagcccctcccttccggctgcctgacctctgcctcaggtttacaggccatctgttcggtctccgaacctatctctgggacctgcctaaagggttgcctctgccttggaggaaggagacatattttcccaattagcacggaatgcactgtaggtaggtgctttttgtgatcctaggaaggggatgatttggaactgctctggaaaataattccaagcagggaattggaactagatcctggttgccagctagatactgtgtaacccgatgccgcgcctcaatttctatccctttcagagaaaaacgaggttgggagtgatctcagccagtggtcctcaaagtgtgatttcaagaccagcagcatcacctgggaacttgcaaatgaaaactctcaggtcccttccagacctactgaatcctggagggtagggccagcaatccactttagcaagccttccaggtgattctatggcccaaccaaggttgagaacctctggtctagtgtatgtggcaaagatccttcagggcaggaggagaatgagaagatctggctttagatctctcctctctgagcctcagtttcctcatctgaaaaatgcatgtcacgttccaccatctgtagtctccctggcagttcttgttttttgatctggagtctcaattatccaggctagcgtgcagtggcacaatctctgctccctgcaacctctgcctcccggcttcaagcaattctcatgcctcagcctccctagtggctgggattacggatgtgcaccaccatgcctgactagtttttgtatttttagtagagaccacgttaccgtgttgcccaggctggttttgaactcttgatttcaagtgatcctcctgcctaagcctcccaaagtgctgggattaccatgcccgccctctgtcatgagtttaaactccttcaccttccaggatcttagttttcacaattgggaaattggtcagaatcaggattaatgaatgatccccccaccatgtttctcaattgaatgatgggagaatggggaggaagtcaaagttccacattccaaggcagaagtcctgaaactagaatgtacttcggaatgagggggtggggtttgtgaacagtacagattccatcttcgctcctagaaactccaacccggtgggtctggggtgtcaggggccctcatgaatgaagctttccctgctggtcctgcggcaaggggcctgtggacaaagttagacaaatctcaatgtttcaaccccttccatggctggacttaaatgtctcctctgtgaagtgagaggaaaggaaggccgagtcccaccaagcctttttagagtcctttttggtcctgatagggccacttctggaccacacagcatctttgtggaaattagaaaaatataccccttcctctgggtggatgtagccaccagtcagggtctgactgggttttggccccctctagactctccaccctcaaccacacgctctgaatgctacagtagcccgggtagcctagctgagaccataccggcattgggattggccagacccagtctcaaatcccagagtggcttagcaacttgcccaggtcacacagcagagaggaggccatgcaggctttccaaagctcagaacttaatggctttttgtccaggtgattcttaggactatgggtgtatactgggaggggaagggagggaaccagagggaaggggacgggagggtatagagggaaggggagtgaatatcatggaaacctctatggtggggttttagaactaacctacccttccccataggcaggctgttaatgccactgggcacctttcagacacactttggctgatccccatcacattcctgaccatcggctatggtgacgtggtgccgggcaccatgtggggcaagatcgtctgcctgtgcactggagtcatggtgagtacagctgccttggggacatgatccctatcccaaactggtcatcctctggccccaggaagccatgattaaatgggttcaacacaggctctcagggacagctcctgagaaacttgagtgtctggggcccccagagccccattctctcttcaagaacaagatactcacctgtaatcccaatattttgggaggccaaggtgggaggatcacttgagcccaagagtttgagggtacagtgagctatgatcatactgctgcactccagcctgggtggcagagtgagaccctgtctcttaaaaaataaaataaaaaatcagacctaggaatccagcccctaagtccttgctctctctagaacctagggccccagcccttatcctcctcagggacccaggctcctgacttcgcagccccattttcttccagaactgggaaatcgtctcccagcctccatcaagggtgtagagtccagttatcaagtgcatacctgtggggccaggctacctgggtccgaatcctgcggctgccacttcctggctggggagctcaggcgagccacgtgatctctcggggcctcactttcctcatctataaaatggggatgctgatgctcctcatgggcttgctgagatgattaaatgggtccaactacgtaaagtgcttccaacagtgcccagcccacaggaggtgctcagtaaacaggtctaggggtggccaggcatccagccaccccacaccagctcctgttgccctcaaggatgaggcagaggctctgtagcctgagtcagcctcttcctgaaccctgacatccacctccttccctccatagacccagtcactcaggtcctcccacccagccctggccccctctagagactagcacctaatgccttggccttcacctccctacaagatcgggttcccctcaccctcggggacctaagccaccagcacctagcccagatgtgggcctaggaaggacatattcatcccccaatccctaggtgcacaggtgaaggatgtggtgacctccactcccccagtggtgagtctttggagcaagggaagaggggcagagactcagttagggacctgcagcaccgctcaggacctcctccctcatttgacaaaaggagaaacagaaacctagagagatagggtgatgtgcacttgagctcacagcctgctcctggaagaaaggctccatggcatggttgggccataaaagcttacttttccggagcacatactctgtgccagtctctgccctacacacttgccaggggtaattcatgaaatccacctagtaaccctgtgaggccatttcacagatgagacactgaaatactgagagattaaataacttgctcagagctgggcttggaacccaggcagtcccctggagccagcgtttgtgactggaagttgttctgagtgatcaagagctgaaactatagggttggggatgcttcctaggaagattccttctaacttggggacaggtgagcagatgccacaagcagctaggaattgccaaggccttgaagggccaggagcattgggagaaggaagggaggagaatgagtgttcggaggaaggtgctcagggagggcaggcagcatggagccagggctgagttgtccaggtgggaggcatagaccttggaaggccttgggagccaggctgagacgttcaggccagtggaagcctgggagattagaggggaccaagggggttaggggaggatgagtgggaggctggagacggtccaggagagagaagacagggctggagctaggaagaagttgtgggagtgggagaaggatggtcgccctccacagtgcaatggctgaccacatgagcactgaggacccagaggcctgcccctggctcagaacccagccttcctctcactcctccaatcctatccttcattcaagaggccaccctgagggtgtgaatgctatgcatcaaatttgggctcggacgtatgcgatttatgattctagctccaccactctgagctgggaccttggctctcctctctgagcctctttgcttgtctgctaactggggatggtcgtgcctaccgtctgtggctgttgggcgggttcaaggagggagtcggtggcacagcctcatgccacggtgcctgctgtgcccacagggtgtctgctgcacagccctgctggtggccgtggtggcccggaagctggagtttaacaaggcagagaagcacgtgcacaacttcatgatggatatccagtataccaaagaggtgagatgggcatatggcacccatgggacacccctcttccaagaagcaggagtccaggcgcccctgcttcccctaggacccaagagtcccagccctagccctgccttcccagaaccgtaagggtctatctccacggacactgtgccacccacccccagatgaaggagtccgctgcccgagtgctacaagaagcctggatgttctacaaacatactcgcaggaaggagtctcatgctgcccgcaggcatcagcgcaagctgctggccgccatcaacgcgtgagggccgctttgtatgcacacgtgtccatgtgcacccatgtccaagtcacctctctgcacggctgtgtgtgtgcatgtccatgcctgtccaggtcaggacacccaggtgtggtctcactcaacatccaggtctcacctggatctgaccgtgcatgactctatgtgtctgtgctggtttgtctccgcatatctcggtgtgtctgcggacctgggtacctgggtttctactggggatgggggctcgtggggaggcagggtgcatcccctcccactctttcagctcttcgacaactttgtttctttgttttgtttcttcatgtgcctctcctcccttcattcctcccctgagctacagctacattcagggaccaggcttgtaaaactgactccccacttcttcccacaggttccgccaggtgcggctgaaacaccggaagctccgggaacaagtgaactccatggtggacatctccaaggtactaggatcccgtgggaggaggtcttgaagaagggggaggttggggccacagggagggaaatctggccctagaacagggaaccttggcaggggcctggcacacacagcctgtcagtaaaggtctgtggttgaatgaaggaaggaaggaatgaatgatgcaacacagagcttcttacattcatgaaaggcacagatcccttacaaactgaaaaaaaaaaaattgcacaaagaaccccagtgtttggtttcaaattatctttattgttaagttacttacatgtggacggatataaaattccttccaactacagctcatacaataaaaccaaagcaaatttacaaaccaagcccatagacggcaaaaccaatacaattaaaatgaacaacactgacaaggacacaggtgacattgtttccgtaaaactcaatctctgctgctcttgtggaggggtactcagggcaacagggacgtccatgcaagtttgcctggccaaggcgtgactcagctacccgcccccttcttctgctgagaccatttgatttcgccagtgcttagggacaatgatgtcacaacacccccttggcctggctcacagcatcttctgcttatctggtggcctttgctttttctcgttagcccacgacagttcaaacagtggcccctggcagcaatgccatggtaagcacggtcacagatgcaggccccaaaaccgcatggcaggtctcagtgacgaggcagtggcccagatctgcaggaattggcaggtggtaatttctgaaggttatcaagccaaaaacacagaattcaagaatttccatagaaaatccacaaaccctcagggatcaactagtgaatcctagccagagaatgcagtaaaagactatgtggatttggaagtcaggcatcatccatgctagaaatatttaatgagcacctgctatgttctaggtcttatttcaggagctgctttgggcatgtcatttaactgttccatgcctgtttcctcagctgtaagacaggaacaggattcccactccctgtggcttttgggaggattttaaaccatatagggaaacacctgggcaggtagctgggaagtggtaggtggtcaatacatggtaacagttattgtcgagggtaatcctcagaggaccataaggatgtggtcaatattggttccattgccttacgctatggagtaggtgggggtcgaccccagccccgacacctctgatcctctcctcccacccagatgcacatgatcctgtatgacctgcagcagaatctgagcagctcacaccgggccctggagaaacagattgacacgctggcggggaagctggatgccctgactgagctgcttagcactgccctggggccgaggcagcttccagaacccagccagcagtccaagtagctggtgagggggctgggacttgggcaggaaggcatcctggaggaagggttcctgtggccagcaccctatgtggctaagggggcgggggatggctgggagacaaggccgccttttctcatcagctctggcactgtctggaggaaaggactcagttcggggctggactggcagtgaaggaagatggtgtaccctctccccttcactgacccttgatggccttctccctctttgcttggtctctctctctctctctgcctgtcctgggcacattgtctggctgtccatccaatgtctctgtctaaatgccctcctgccccctggcctcggggcccggaaacacctgccccctgtctcccacttctgcccaccggtttctgtctgcacctcggtgtgtcccactctcactctccctcttcctggcctgcctctccatcagtctctctgtctctccaggacccacgaggaggaaccaggctactttccccagtactgaggtggtggacatcgtctctgccactcctgacccagccctgaacaaagcacctcaagtgcaaggaccaaagggggccctggcttggagtgggttggcttgctgatggctgctggaggggacgctggctaaagtgggtaggccttggcccacctgaggccccaggtgggaacatggtcacccccactctgcataccctcatcaaaaacactctcactatgctgctatggacgacctccagctctcagttacaagtgcaggcgactggaggcaggactcctgggtccctgggaaagagggtactaggggcccggatccaggattctgggaggcttcagttaccgctggccgagctgaagaactgggtatgaggctggggcggggctggaggtggcgccccctggtgggacaacaaagaggacaccatttttccagagctgcagagagcacctggtggggaggaagaagtgtaactcaccagcctctgctcttatctttgtaataaatgttaaagccagaagttgccatttctctctaaacatatctacactcctaactggcagaccgtccagtggaagactgttgccttgtctgaacctgtctcagaggccttctcctgtaagtgccctcccaactctgtaggctgggcagtcctcagcaacagtcccctgcccagatctgaggcaaagagcaacagctttgaactcagacagatcagggtccaaatcctggttctaccatccactggtggtgtgatcttgggtaagtggcttcacctctgaacagtttacctcacctgtgaaatgggactgcctccccatggaactgctgtgaagattaaaacatggagtagcccagaggcatttagtaggaaccaaatatgtgagagagaatcttttttttttttttttgagatggagtcttgctctgtcacccaggctggagtacagtggcgcgatttcggctcactgcaacctccgcctccagagttcaagcgattctcctgccttagtccccaagtagctgggattacaggcacctgccaccacgcctggctaatttttgtatttttagtagagatggggtttcactatgttgcagatgctggtcttgaactcctgggctcaagcaatctgcccgcctcagcctcccaaagtgctgggattacaagcgtgagccactgtccctggccaagaatcatttttattattgtttttgattttcacacacaatgcgtggctgccctttttctgattttttgttgcttttctccctctattcatgccttaccagaatctagatgacaactcactcatcaagagactaacagaggccccaaacctccccaaaccacccacatacccgtttcacatccgctcaagagaggatgtgaaagggaagggggcaaaggaggggggctggcacttccagaggccctactgtgtgcccagctctgtttataagtcaccataaccactctcctgaccctcgttaccccactgcacagatgtagaaaccgaggtttcaagaggagccaggcctcccctcaggcccccagccggaagctaggaatccgggctggagagcccagattcacacccatcccgccccactgcaaggtgagtcagaggcagagtggccttgggccacaaaccgaggactgacttcccgccgcaacttcattccagcttgagaggctgattcattcttgcttccctcctcttgaggggaagatcaggctgcgagtcatccttttctgttgagctatctttggatttcccttaaagtccacagccagcctcgccccttcatccctgagagctaaattggagcctccgccacccactgccacgaactgcccttcctctggaggccagcccacctggggagtaaaggcggggactcaagaaaggaactggatgagacctccagatattgctgacacccttcccctgcaagaagctctcctggcagtgttgccaaagcccctgccaaactcattcttctgggacctctctttccttgcctccactcccttttagctggcaaacactccttcctacgcctcctgtaggcctcggctaatatgtcccctcctccaggaggccctgtctgatactcctatagcctcataaacctatccctatcacgataataatattgggtctggccaggcatggtggctcacgcctgtaattccagcactttgggaggccgaggcaggcagatcacctgaggccaggagttcgagaccagcctggccaaaatggtgaaaccctgtctatactgaaaatacaaaaattagccaggcgtggtggtgtgtgcctgtaatcccagctactcgggagtctgaggcaggagatcacttgaacccaggaggcggagtttgccgtgagccgagatcgtgccactgcactccagcctgggtgacagagcaagactccatctcaaacaacaacaacaacgacaacgacaacaaattagccaggtgtgggggcacacacctgtggtcccagctacttgggagggtaaggtgggaggaacacttgaagaggctgggaagtcgaggctgcagtgagctgtggtcgtgccactgcactccagcctgggtgacaaagtgagaccctgtctcaagtagtagtagtagtagtaataataataataataataataataataataataataataatgggtcaagcaccacgctaagcccttttaataagtgacctcacaaaaggaggcaaggtaggcaatgttggtcccattttacagatgaggtaactgcccgaagccatagcaaagcagtttggagccaggatgtgacccaggcagcctgaccccagagccccagcacttagccacctggcgcattcagacactcaggagaccatcacattgtattttcatttttgttcatgattgcgtcttcaacaccaagggcctgacatagacagggcctcagtgaatgtcattaaacgaaccctctgaatgcctgggatggcctgaagccaccccatgttggtttcagctgagccatcccatgttgatttcagctgaggcaaggtcagaaccagtgaaaaggggcttttgactaagaacctaggagaacatacaagagatcctgtgttctgaattatcttggatctgccctggcccgcctgccctcattctccactgtggggctcaagcctggatgcccccacttctggcaggttttgcacccccctcaccaaatcaacacttcctgaaggccctgagccaggagctgggctgcagacatgaatcagagggctctgtcctccaggagctgagtctcatggtgattttggctccttccttctcctatttctgttctgcctgcactctcatgaggactgggtgggggaaaggcggtccagagagggcaggggcttcccagggtcatacagccagtcacgggcctttccccttcataaatcccccaactgcccttgaggacctttctaacacccacacacttcccattcctcccactgccctcctgtcaaagtctagctctgagtccagctcttttttttttagagacagagtcttgctctgtcacccaggctggagtacagtggtacaatcgtagctcactgcagcctcgaattcctgcactcaagtgatcctcctgcctcagcctcccaagcagctgggactacagctgtgtgccaccatgcctgccccctttttttctttaactgacatatattttaacatacaataaagtacacaaattttaaatgtaatctcaatatatttcttcaaatacattcacctgagtagccatcactcagatcaagctagaagtgtctagccccctaaagctctcatttccctcccagccaacagcccccttcatcccaggaaccaccatcctgacctgtcttgattccttttgttcaactttgaactttggaaggaaccctgctgcacgccctggtgtgtatctgtgtcttgggctctgcagggtggtggtgagattcagccatgctgctcatccttttcattacacagtagtattccattgtgtcagtatgcccacaagcctcacccgggggactctgcaagctcagtctctccccgtcttctggcctccccttctcctccctgtcctggctgctcaggccactaggctcctcttccttcccaaactgcctgctgctctcccctccttcttgccccatccactcagaataaaaataaacatcactaacatttattcagttctttgttgtagagacgggggtctcactatgttgcccaggctggtctcaaactcctgggctcaagagatcctcccaccttggcctcccaaagtgctgggattacaggcaggagccaccatgcccagcccagctatttattatggtccataaaggaagctgtatcatcatcatcaacaccagactggcagtccaaaggcatgctttaagcttttatgttgtgtggaatagctgctaacatatacaaaccaggagagtgctttttataatttggagggggtgtcaaatgataaaactttcctttctttttccaggatgagctggcccttcttcaagtcaagtctagccccctcaccctgtccacacctcctcaaaaaacagctccaaagtctcctggtctcttttccctctatcattcccatctgcacacaaacatgctataatttctcccatcttataaacatcccactggaactttcagaagcattttagattctccattttccttaaagttcactattcaccaaactgcaaaatatctgtcgctctgtcacctaggctggagtgcagtggcgtgatctcggctcactgcaacctctgcctctcagcttcaagcaattctcgtgcctcggcctcccgagtgtagctgggattacaggtatgcacctccaccacgcccagctaattttttgtatttttagtagagatggggtttcattatgttggccaggctggtctcgaactcctagcctcacgtgttctgcctgcctctgcctccgcctcccaaagtgctgggattacagatgtgagccaccaagcccggccataaagttggttctaaactcctgctacatagaatgacataaaagactttgccagacataaagagctaaagatgccagacacacggaagacatgctgtaagatttcattcgcatgaagttcaaaaacagacacaacgaatctctgtgcctgtttttgaaaggcattagatgggtggttgcttctggagcaggggaattgacagggaaagagcacaaggaagacgtctgggtgctggaaatgttctctgattagcggttacatggatgcataaatttgtgaaaattcattacctggtacacttaagatctgtgccctttatatactttaccacacttaagttatatgtcacccaaaaagaaaataaataaaaataaagaaaaataagtacttatacatttttcctgatagatactgagaaggttccataacacagttagatgggggatcaaaagtcatgtcttttccatggtggaccccacatctgcctccagctgctgccccgtgtctctgctccttagtccattatcttctctttggaaccctttgatcccatggcgccaggtcatcccctctcctgacactcctggctccatctcagcccctctccaggatcctggcttctacatgcgggatgctcaggcctagtccctgctctcttcaacctctcagcctagatgatctcagcaaatcatagctttaaatatcatctataaataggcagctccaaaatttagcatacttgtatagttattaacaaaatgacaggttatctgtgattttcttaaaacaaacaaaactccagggggtggcgggaagtatgcttatatgtgggagggaaaaatagaagacataagacaagaaaaatgcagatgtctgtcaatattgggcgatgggtacgtgggagtctcttcataccataacatctttgtgtgtatttttaaaactctgtagtgactgtaatcccagcctttgggaggctgatggggtggattgcttgaacccaggggttcgagaccagcctaggcagcatagtgaaccctcatctctaaaaaattagccgggtgtgctagagcatatgtggtcccagctacttgggaggctgaggcaggaggattgcttgagctcgggaggtggaggttgcagggagccaagatcgtgccattgcattccagcctgggtgacagtgcaagactttgtctcaaaataaattaattaattaaactaaattctgtgacgcaaagtcagaaagtctttatctacaaaccccggctttttcccctaactccaaccacttatttgatgaccaacgtgcatctcaaagttaagaatttcaaagcttgttgatttcccatcaaaagtacttttcctcatcccggtaaaaagcctcagtcttaggccgggcgtggtggctcacgcctgtaatctcagcactttgggaggctgaggcgggtggatcacgaggtcaggagatcgagaccatcctggctaacatggtgaaaccccgactctactaaaaatacaaaaaaattagccgggcgtggtggtgggcacctgtagtcccagctactcgggaggctgaggcaggagaatggcatgaacccaggaagcggagcttgcagtgagccgagatcacgccactgtactccagcctgggcgacagagcaagactccatctcaaaaaaaaaaaaaaaaaaaaaaaaaaaaaagtctcagtcttcaggcagttggccaggaccaaaacctctcgaactttttttttttaattattattatactttaagttttagggtacatgtgcacaatgtgcaggtttgttacatatgtatacatgtgccatgctggtgtgctgcacccattaactcgtcatttagcattaggtatatctcctaatgctatccctcccccctccccgctagaactttttttaatgctgcaaataacatgatgttttaatatatgtacacattgtggaatggctaaatcaagctaattaacatatgcattatttcacatacttatttttttgtggtgtgagaaaacttaaaatctattattttagtaagtttcaagcatataacacattgttatgaatgagagtcaccctgttgtacaacagatctctaggatgactttcaagtcacccctgattcatgcttcctctcacaccccatgtttaatttcttggcgctaccttcaaaaaagatcccagttcctgacccttctcaactcatctattagcaccaccctcttccagaaccactatcctttcttgcccaggcaaggacaccagctttctcatctcctgcttccgcccctgcaggccattctcctcacagcaaccagcactgttttcactgaacatttttgcgcatagctaataattacgtggtttaaaaaaacaacaacgctttttaagttcccatagccctgacccacatctgtctataaccctcatccctataggcaatcactgttaatttttgttgttcactggagaagtctttgtaaacattaattggaacaagccggtgcttgtttgtagccctgcaatggctttgttacatttggaagtaaattccaaatgcttaccatggcctgtaagactttatgtaaactggccctgtctacagctccgtctctaaataatcctgcccttctttccctcccttgctctgtttcagccactctggccaccttgaccatccttggacagccaggcccactcccactttggggtcttttactggccgttcttcagcatctttagatggctcatttcctgaccttccttaactgcattcaggcctctgatcaaatgtcatcccctcaaagcggccttccctggccacctgtcactctctgtgacctctatcactgtcaattcctgtaacctgacttttttttttttttttgagacagagtctcgctctgttgcccaggctggagtgcagtggtgcgatcttggctcactgcaagctccgcctcccaggttcatgtcattctcctgcctcagcctccggagtagctgggactacaggcgcccgccaccacgcttggctaattttttgtatttttagtagagacggggtttcaccatgttagccaggatggtctcgatctcctgaccttatgatctgcccgcctcggcctcccaaagtgctgggattacaggcgtgagccactgcgcccggcacctgactttatttttaattgaaaaataaaaattgtatatatttatggtgtacaacatgttttgtatatttatacattgtacaatggctaaatcaagctaattaacatatgcattatttcacatatttatcatttttgtggtgaggacactgaaaatttatcctcttagcaattttcaagtatacattgttactaactatagttaccatgttgtggactggatctcttgaatttattcctcctgtctaaatgaaattttgtatcctttgcaatgtcttcccaatcctcacccccgattttcttttcttccaagcatcctttatctgatgtcatctgccccactagaatatctgctcccaaagggcaggtgcttttcctattcattacaggatctccagcctacagctgtgcctggcagatgactagagttccataattcattcaacatataaatgaaagaaatgaacaaaaagtgaaaaagagatgaacagggccaggcgcagtggctcacacctgtagtcccagcactttgggaagctgaggtggaaggattgattgaggccagcctcggcaacatggtgaaactctgtctctacaagaaatacaaaaattagccgggtgtggtggcacatgcctgtagtctcagctactcgggaggctgagacaggagaattgcttgaacctgggaagctgaggctgcagtgagctatgatcatgccactgtactccagcctgggtgacagagggagaccctgtctcaaaaacaaaaaataaagacatgaacagatcatttggcaatggctctcaaaattcccaatgtgcataccctttgacccagcaattctacttgcacttcaaatgagatagtctactgacaatactaacatatacatgcagccacgtgtaccaggatattaactgtagcataatctcagcactttgggaggctgaggcaggaggactgcttgagccaggagtttgagacagcctgggcaacatagtgaaaccccgtctctacaaaaaatagaaaattagctgggtgtggtagcacatgcctgtggtcccagctactcctcaggctgaggtgggaggattgcttaagcccaggaggttgaggctgcagtgagccacaactgtattacatgactccagcctgggcgagacagcaagaacatgtctgaaaaagaaaaaattagaaaacagaaacatacacacaaacccctgcagtaaatgtttgtaagagcagaagttcagcaacagtctaaatgctcatcaacagagaaagtgttaaagtatgatatatctccagaacagcataccatgccactaatacaaaaggcagctcactgggtgcctgactgtactgctgactcatcaccaggctggctccccggtgccagggaaaaagtgtaggcttgctctggagtgagacaggcttgggtttgaatccaggcccgggtttgaatccaggccctgctgcttcctgcctatggggacttcggtaaggcccttctctcttccaggctcatttgtctacatctgtttttttttttttttttttttttttttgagacagagccttactctgtcacccaggctggagtgcagtggtgcgatatcagctcactgcaacctccacctcctgggttcaagtgattctcgtgcctcggcctcccgagcagctggcattacaggcgcatgccaccacacccggctaatttttgtacttttagtagagatggggtttcgctatgttggccaggctggtcttgaactcctgacctcaggtgatctgcctgcctcggcctcccaaagtgctgagattacaagcgtgagtcactgcgcggaccaacatctgttaaacaaattaggggagaagattatagtgatgtatataaagcagagagcacacagcctggtacacagtgggtccaaggtcaatgccaggcctcctctttccctcttttaagaaaattctacctctgagggttgccctgacgtgaaactggcaatcgtgagtgatctggggttgagaaattcagatatggcctgagctgaagaagtaaaattggacactgatagacataatacagagatggcctgtcatgtgtatctttatcaaacacccagaatctttccccagaatccatcaacagtggactcaagtcattctgggtgactggtgtttctacctgtggcagcctggagaggtggctccacctggtactggtactgggacaatgacagtagggatgaggcctggagggga

SEQ ID NO: 1017 - DNA, 2514 bp, Homo sapiens
gtttgggtgtggctctttgtgtcagagaaagttgtgacaactttgagtgtaatatttgtgcctgtgtgtggacggtgtttgggtggctgtgtgtgccacgggatactgcctgcttgctaagtgctggtgtgtgtcacaccatgtgtgtggtgtctgggtgtggctgtgggtttcagagcttgctgggagttgtgagtcactctgtgtaggttgtgttgtgtgccctggtgtgttagtctccgtcttgggctgtggagtgtccttcggtgtctgggtgtggtgagtagaggtgtgtgtcacaaagtacagaccattgtgtgtgacaaagcccatcgtgtgtctgtgtgtgtctttatccacgtggatggacgtctctttcttgctctgccccaagacacaccctagcccctccttattctcaaaagggggagctggggagcctccccctaccctggggcctcccctgcccctccccgccctgcctggccgtcaccactccccagagggcacagggctctgctgtgcctcagagcaaaagtcccagagccagcagagcaggctgacgacctgcaagccacagtggctgccctgtgcgtgctgcgaggtgggggaccctgggcaggaagctggctgagccccaagaccccgggggccatgggcggggatctggtgcttggcctgggggccttgagacgccgaaagcgcttgctggagcaggagaagtctctggccggctgggcactggtgctggcaggaactggcattggactcatggtgctgcatgcagagatgctgtggttcggggggtgctcgtgggcgctctacctgttcctggttaaatgcacgatcagcatttccaccttcttactcctctgcctcatcgtggcctttcatgccaaagaggtccagctgttcatgaccgacaacgggctgcgggactggcgcgtggcgctgaccgggcggcaggcggcgcagatcgtgctggagctggtggtgtgtgggctgcacccggcgcccgtgcggggcccgccgtgcgtgcaggatttaggggcgccgctgacctccccgcagccctggccgggattcctgggccaaggggaagcgctgctgtccctggccatgctgctgcgtctctacctggtgccccgcgccgtgctcctgcgcagcggcgtcctgctcaacgcttcctaccgcagcatcggcgctctcaatcaagtccgcttccgccactggttcgtggccaagctttacatgaacacgcaccctggccgcctgctgctcggcctcacgcttggcctctggctgaccaccgcctgggtgctgtccgtggccgagaggcaggctgttaatgccactgggcacctttcagacacactttggctgatccccatcacattcctgaccatcggctatggtgacgtggtgccgggcaccatgtggggcaagatcgtctgcctgtgcactggagtcatgggtgtctgctgcacagccctgctggtggccgtggtggcccggaagctggagtttaacaaggcagagaagcacgtgcacaacttcatgatggatatccagtataccaaagagatgaaggagtccgctgcccgagtgctacaagaagcctggatgttctacaaacatactcgcaggaaggagtctcatgctgcccgcaggcatcagcgcaagctgctggccgccatcaacgcgttccgccaggtgcggctgaaacaccggaagctccgggaacaagtgaactccatggtggacatctccaagatgcacatgatcctgtatgacctgcagcagaatctgagcagctcacaccgggccctggagaaacagattgacacgctggcggggaagctggatgccctgactgagctgcttagcactgccctggggccgaggcagcttccagaacccagccagcagtccaagtagctggacccacgaggaggaaccaggctactttccccagtactgaggtggtggacatcgtctctgccactcctgacccagccctgaacaaagcacctcaagtgcaaggaccaaagggggccctggcttggagtgggttggcttgctgatggctgctggaggggacgctggctaaagtgggtaggccttggcccacctgaggccccaggtgggaacatggtcacccccactctgcataccctcatcaaaaacactctcactatgctgctatggacgacctccagctctcagttacaagtgcaggcgactggaggcaggactcctgggtccctgggaaagagggtactaggggcccggatccaggattctgggaggcttcagttaccgctggccgagctgaagaactgggtatgaggctggggcggggctggaggtggcgccccctggtgggacaacaaagaggacaccatttttccagagctgcagagagcacctggtggggaggaagaagtgtaactcaccagcctctgctcttatctttgtaataaatgttaaagccagaagttgccatttctctct

SEQ ID NO: 1018 - protein, 425 aa, Homo sapiens
MGGDLVLGLGALRRRKRLLEQEKSLAGWALVLAGTGIGLMVLHAEMLWFGGCSWALYLFLVKCTISISTFLLLCLIVAFHAKEVQLFMTDNGLRDWRVTGRQAAQIVLELVVCGLHPAPVRGPPCVQDLGAPLTSPQPWPGFLGQGEALLSLAMLLRLYLVPRAVLLRSGVLLNASYRSIGALNQVRFRHWFVAKLYMNTHPGRLLLGLTLGLWLTTAWVLSVAERQAVNATGHLSDTLWLIPITFLTIGYGDVVPGTMWGKIVCLCTGVMGVCCTALLVAVVARKLEFNKAEKHVHNFMMDIQYTKEMKESAARVLQEAWMFYKHTRRKESHAARRHQRKLLAAINAFRQVRLKHRKLREQVNSMVDISKMHMILYDLQQNLSSSHRALEKQIDTLAGKLDALTELLSTALGPRQLPEPSQQSK

SEQ ID NO: 1019 - DNA, 26795 bp, Mus musculus
agagagagagagagagagagagagagagagagagagagagagagagagactgtctgcctgcctgcctgcctaggatagagtaagacaaggaggaacctgacaccttccagtgtttgaggggccaaggaagaccaggagtctagggaataaagatctctctccaagacacccttagagttcagtttagtgagtttgcacgcagacatgacctagcagaggaagccagaactgggtgggctagcccctctggcacagagaagacctgaggtggtctcagtctccactccactccacgctcacacacacacacacacacacacacacacacacacacacacacacactgaagtccccaacatctagcaaggcactgtgtattctgttttgtgatcagatctacccctgctaagcctcagtctcccagtctgcagagaggtgtgaatagcctgtgaatcatcactttgggatcctctattgtttttgggtcagtcttctccattctcctctcccctccagacagaaagactgcagtgggggtgggggcaggcgtctgcttgtgacacaatggagtggtccaaggttcccatgtgttggtgaacagttggaaacagtcttgctcacagttggtcaagaagatgtcaggctcccactcaaaagccactggccctttagatactgaaacctcaatccaaagacacttctctacccaggtctcctttttcagccccctggttggaaagagagggaatatttgttctccggcaatgaatggtctgttctgatctggtcttggagttcttgcttggtctctggaaaaggccattctgagactcctgctcccacaagaggggcagtgcctcaatttatgtagaatgggtggcatctgggctccctagctccagaggtggcagtagcgatggggtaccacatctgatagaagtagtatgtggagggtctgtttttggtgaccctctggaaggggggcttgacattggggtgggggacagtgacaggctttcctttaaacacttcataatgtgctgttttgttgaatccttacagcggttctaagatgtggtgactcttagaggaactgaggcccagagaaccacagtggcttgtccaaggtcacatagactcaggacagtgccaggactgggattcaagcctgcctgtgaggtgcttggagaggatcaccactttcctggtagttgctcttggcatatctgagctcccatctatcagacttgggctggcaggcctggtaggcctggcacaggtgccccaattgagtttgtagtgagattcgcatgcccacgtggctaacaaattgcaagtgggcgtttttagtcttcttgttccttctccgcctctgagccagagatcaccaggaagacctatctcctgccttttagagcctgcagctggtcttggaaacatgtatcctggctctgaagtatctggagtagcagcacagcctggggtgcaaggatggtgaccttcatcatacttaagatgtccccaaccccctatctttgactctctcatttgctgtggtggagagcaaatggagtgaccttgtgcttaccctacccagtctgggtctctgtctccccattcttcccaacaactctttctaattctgatcattgctgtgctcagcctagagctgaggctggggatcagggtgtccctcagttctccctggaatgactggagctgtgcttttggggctgatgaaaatagctgtcttggtctccaggggctgagcccaagttatttccatccccagcccagaggtagaaatagctcagggccaggagaaggagagaggggagaagggttaactaagggttaatcttcccttctggcccagcctctgtggagccccccagctctactgtatgccccacccaagccaaaccattctgggaacttgggcctctggggatgaaagtggggccacgctgggtttctatttggtgtggtagttgctacagggaggtgcctgtgtctgccattggtaggaagcatagaggggcccaccttacagagccagcaggctcagcccctccatatactgggagagactagttcaaagaatgacagggcacatagcccctagcattgcgggcatagctctcctgtccactttccatcttgccacttgatccctggacgcttggcagcaagggcagcaggttctatcacagctttgcaatcttctgccccaactttggctttctctgtgtgtccagctgcttttttgttttggtttggtttgctttttcagtactatatggattgaacccagtcttgcacatgctaagctggtagatagagacagcagtcagcattacatccctgctgtgtgctcagcccctaaggctatcagatctttgcccctgtcctccagacagtcctcagtctttgtagacataggcaaggaaaccaggattcagaggagaagacattttagagaccctagtgccactggaatctacagccaggtctatggccttgaagctcagacttctttcctgagccaccctgggaaagacgagcactctataaataaactgcccatgtgtgcctggttggttagcacagctggagggggatggagaggcattgtgtggtcaattagaggcagggtccgagcgtgagtttggagaagggactaaacttggccctgtgcatcctcagccatgagaggggactgagagcctatgggccctgcactctgcttccttgctgctccctcaggcagcctcctcatcactgggaagggtcaaaggagcctagaacttatggctgagtgggtcctttcataggaagacttcctgaagaccagagtggggctgggctcagggctactggtaaagagttgctgttagcctgtgtggtctggatcttacccacaccatgaggtcagctgagtaggcacaattgccccaagttatggactgcatgtgaacggttgaacttgtctgcccagtcctctaccttcctgactctgtagtctcagtacacacaagcctctgtcgggttcctcacagcatgctttcggcacccaatcagccaccctggatggccttgactggacactctttgttttgagcctgagttcatctgtgacactggagaggctgtgctgtgagaacgtgcttcttggccaccattgcttaggtgagatcccaaatatccacatcctatgaggccctgaatcacatgagaggttaagtaactgttcaaggtcacagatctacttagtgacagagccagagcttcagcctaggtggactgctccagagcctggtcacatatgccacccagacctcagcaccatacccctgggtagggcctcattccccagcacccaagcctaaggaattggagagtgaactgcagttctctggtttctcctcagtctctccctacatttctgctccagtcaaccaacttgggatgatggggtcagggcttatgctgagcagtctctagaccatcctggctcattatcaattcaatgcaaagtggaggtgtgtggtcagggctgtagccaagctgacttctgtgggggaggagtagcaaccagaataagggatgaactgagtgtttttcagcaccttctgggccctgctatcctgtcttatggccaaaggaggtagtccaggtatggccgtggttcttaaaggttggtgtgggttaaatcaggcccttgaaagcagtggagtgtcaggtgtgggcgacatgggcaagagctgcctgctgcttgtctcctctccagggttggtaagctgggttaccttccagacctgtttcctttcaaacaaatattacataagtttgtttactctatactgacagggtggtggtgtggaagtcaggacaacctgctgcaatcagtttttccctcccaccatgtggattctggtaattgaacccaggccattccgtgttggtggcaagtgccttaacacttactggccctagaccaagctcttacaggttactcaactacctcagcctcctttttgcaagtatggatcatggaagcctgtgttgagagatccagcgagactcaggctggagagggatgggacatgtgagagggtccttgggaaaccacagacctgttctaggggtgactgcctagtctcagacactcttctcgatctccagacttgtcaggagggagaagattgcattcatttcctactcagactggaggagctgagagccagatctggctgcctcagccctttccttagccttaaggaggcaattagccctttcagcccctcctgcccccttaccaccggagctgctgaaatgtaggcccagtggcagccaggagggctgaggaacagaaccatgcccagttcctgctgcttggaagtgtgtgcggaataggactctgagggtccacacaggagaacactctagtgtgagtgacctacgtagttatggctgcccagaactaggaagaaagcagggagtggggtgcccttctttttcataggctctagacagctttttgtttaactctgggccttcagcctcaacagcagctctggaagctgctcttcctgcctctgggaattcccagattttccatcttcttgcttcctatagtttgcagtgcttttctgtatgatctggtacaaattagcacactctacaaataagcaaggtgcgggccgttctcagaggccctgaggctgccaggtggggaacacacatcttttgggcattgcctacatctttctggtaaaccttaagttgagcccccttccacacacgcctacactagccttcctgctaccagattggcaagcactcttgaaagggcctgcctgccgagtcagaactaggcttcagagttgggaaggcagagatgaggcagttctggcctccatccctgctttagtacttacaggccatgggacccccacaggtgacttctctcaacctgttagctcaagtctgaaagggactagtcacgtctatgggaattgaggtgagccagggtgagggatagtccccagttgaggttggcccacttctgttagggaagccagcagtgcttcgcagccttaactagtgcccagtgtgggcactgccctacttcagccccagttgccagggaaccactgggtcctttactaacctggatttctctattgatgttgcttttgttgctgcctggtgcagccactgctgaggaaggcttgtgtccagctgtgtttccaggcaacccttgcctctagaggctgcagagaaggccacgggctggaaagcagaatctgccttcttacctgccctaccccaggtgggccctgatcccccctccctctctctcagtgccctcacttggctggcagcctagctcacctgcctgcccagaggcaaatcactcagtgttttgcttcctctgcttaactcttcggggttcccataggctctgggaaaagtacaagctcagcatgacctggactctgcttgcagtcttcccagactcctctcctgcacctcccacccctaccttactaatcactgatcctaagtacaaaagagaacctccccgcccttcacacttacaggtcagacatgtgcatttcctttttaaacatttacacatggggaaactgagtcatggtgtagtgtagtgtgtacttgtgagtgtgtacttactctgtgccagtcctgctgagaactaaatgcgaattctcttttcatgctcacatgagtcctctgtaccggctccatagcctcacagacagtgaagaacaggggagggcaggctgtccccaggttagcagacggcttcagaaccaagttaagagaaaccctgccagctgggcagtggtggcacacacctttaatcccagcacttgggaggcagaggcaggcagatttctgagttcgaggccagcctggtctacagagtgagttccaggacagccagggctatacagagaaaccctgtctcgaaaaaacaaaacaagagaaagcctgcctctagactcctttaccagtagtgtgtgttctctctggcccaccttctctggcataactaatccagtctactgaagacatttcttctgcttctcatctccagtacagcacacagccagcgtagccctgggcataaaggacagcttgtggtgagaaagaggctgggcaaatggcaccatagctaaggggaggtagtggttgggggaacctccaggaggaagtgactttgaactacactctggaggaagagtaggtgttggccaaaagtgataggaggggtttctgagcagaggaaacagtaggtaactcatctctgtgacttgaaagaagcttcaagaagctgagaaagaaacctaaggtggctggcgtatgtgtgcatatttgtgtaaggaggttttcagaggtacatggggaagccatactgagggtgggagagctgactcagggcacacaaacatctgtcaggacacctaggctgcaggtactgttaaccagaggtcagaagaagagggcagaggcctcgggagatctctgggagtatgctaggggggcggtggctgaggccaggggtaaacccacagcttcagttctaggaaagaggaagcagcctaaggctggggggtggggggcaggcagggcaagcagtacaacttcctctttctgagacctctaggaccctcctcccttggggaacttctaccgcagcttctacagcagcttggatcctgctgtagctttgctagctggcttgcactcaaggaatttctgttctcattgtttgggcacttttgtagagggctaggtttttttcttttaaaaagccccccttttccccaggctctgagcacatttggtagaggcatcgggtcccatgcctgggttaggtgctgggctttgtggtgagtaaagcagaccccctgccctgactgctgactgctgtctgcttgggggacatgctgtgaacaagcaagccaacaaatacttaatgaccaccccacggggtggggggaggaaatcctgtgaccagcttcatgacaggcttctgcacaggagataaacaacccatcctgtggatgaggaaactgaggctagggaagccgggagctcaagagtcacaggggattagtagctgtgaggatgctcagggctaggagatttggaggagtggcctttgagggaacttccttctctgctggaactctgcctcttcaactccgtgtggctagagtgcctctcctccatcaggtaccctggagctggaagggctttgtgggcattaccgtttactcttgggctgcagtgttcccatttctggcatctgtcttccaggaggtgttaggctgtggggtatcactgagtgtttggccttctagatgagagaagtatggagaagggctctactgacccctcctagcctaggagagtctgtgagcttgttttcccatgggtttccagggcagtgtttcggatcctagaggactgggaggcagagactgaagcagcaggtgtgcacacgtgtgcatgtgcctgagcaggcagaagggggtgggagtaggggttcagtctggttagagagggggcatgcagccagactgcagtaagtgccaggtttgtggtaattagaaggtgcataattagaaggcagggggtgctgagtggcgggcggctgctggtgaatttgccttagtgggcccactatggcttggaggctgggcctctggaccctcactttcctccaggaagtctccggatcacttggtttctggcctgtctgcagatgaacagctttgtggcctctccttgtggctcaggtcactcagtaggtacagttagggtccgggtggtcttgggccttttgcatctggggttttacctcttacttttcatccgttgtcctagctgtctaaacttcctggggatctgaagggctgctggggctaggagcatgctgtggagacaacctgaagacttggggtttgtggttaggtctgtggtggtgagatcctttgaagaactggagaggccataggacatggccttgaggggacacagagccagggtagagttaaaaggcactggtgcagaacctggaaggcagttttctgaccaaatttaaggaaggaaaggccaagggatgagtccggagtgcacctgctgagtgttgactgccacatgtggcctttacctactctggagcctggccttccctgtctctggttttccccttagttggcctgaggcccaagaggcgcctgctgccagtgacctggagagtccctggatgatgtgatggcagctcctcccccatcccctgggtgtaacctgaacccctggccctgctaaggtctttgtggggccaggcccaggtcgggtggcagataggtttcctctgctccactcttatttccagccgggaagcctggctcccagcagaaagggggctctgtgacctggaacttcctgcaaataataagtcctctgtcaggcttggcatcaagcatcctgtgagccctcatccaatggtgtggaggagcgctaggcctgtgagcacccttgggtttcagaagttgctaatagcttgtattgaggcttgatgaacaccctatcctagcctatgaccctgaagccaggtctctgggaaatacatatgaactttctgttgtctaatctgaatcttttctgccactccaaccttgtctactagctagagactgctctagaggtagtgctgtcttggcatcaaagggagtctcactcagcctggggccagtgggctggggagctggcattgatggttctctgaaacatctcagagtgtcctctgtggactttggtgttcctaatttcctagtgcagaggcatgtctggcatataggagttgctgaagaggctccagctggctgaatgctagctatggtgacactcccaggtctgccatgacacatgggcaggaagagatgcaagcacatatgcccaggcctccctgggagaagtgtagaggaggaacaggtgacagagcgagaaggggtgtgacttttagaagtacttccacatacaggcctttgagctgggcgtgaaggattagggccttcctgtagcagaacctgcaagaattaaggcagtgtgagagtggtctgggagctgtgggaaaccgggctagaggcagtagccattttaagcccagctcagctcttccccagcttctttcctcttggccctctctggttcctttcatatacctggctgtatatggaaggggaaggaagcacttcctcctctgggaagcctgaactagagagccatcagcttccctccagtctctgcctgtaaggctggccctaaacatgtcagttctatttctgctcagacctgcatcccaccatgtgggacaaatgcttgcctagcacccagcagtagttctgtcattgtgaatgtggccaggagggagacagcagctgcctgcctggtctggctgctctcctgagcttcctttatctgccctaggtcaatgtcactccagggcctgatgatgaagcggaccttgctgtgctggcccctgtcttgcctctttgtggtgagttggggaagggtccagagaaactagaatagttggaatctgagcatgcaatcagcactccaagagtggggggaatgcaggtcctgctctgagcctcgggctctggggaacttaaatgcttgtctccttctgggaagaattcaaggccttcagacctgatgaagcatctactagtactacctggcattcggtagtgatgctgtagagacagacacaatctcttctactcatgacatccaaaccagagaatagagctttcccaagcaattcatatatgggccggagggatttcctagcattttcaggcatggcaagagggcaaggtgcttgcctcctgccagtgtgggacaggtggaggataggtggggacctgaaagaaattgaataactcatgaactggatgtaggccctatattagttgaaggaagcctcgattctggggctagagtcagagcacctacagacttgtagcctcaggcagatctgaggtctgatctgtggtgatctttctgctgtaattctggactcaggaagaacaagccaacgtctccgagaggtagcctgcagccttagcagttgttgggagccaggctgacattctaccttcagggtaactggccctggagcttcctagccctagtagctgcggccaagttggaggacagggctttcccacagtaggagtcagggcaagcagtgcattcaattgagtgggaagcaaagggaggccatccaagaggggctagcagtccatatctagaagagcgctcctttggaacgtggcatcccctgtttaggtgcaaggtatgaatggggtggccttggcacagcggaggtcacagagaaggatgtggtctcagactcagctctgggcccagaatagtaagcaccagctgcagacttggctctaggcatgataaacagaggggagttaatgacatgctcagcttcagggtgaggggaggcgtgcagcagaggggagacaatctcagaggaattcggaagcatttcctcctcgtctgtctggggtgaggaggtgtaactcatctgaaagggctgtaattcagaggctcaatggcttgaggtcctgatcctgtctggggctttccagtattttccagaagcagatataattctctttacccagacactggcagtgcagcagaactggctgaggcaggccccaaagcctgggttgggagcctgtgtagtctgcgattcatgctctgttcaggaagtaggtagtgagcagatgaccctgcaggccccatgttttaacattgtcttcctctgtcaccatgtcctctgttccacctgcattcttccagctgctgccctggcctctggccactccaacaccaataactccttggctgtgtccacctggcaaagagcctgacccagtgagtgatgtgctgtcctgtcccgggatgattcctgagggcagaggggaggcctcggcctggatgcccaggggcttctggcctggcttcaggcttgtaatctccttcctctcccacaggatccaggacagggcacattatgcagaacttgccccccaggaaccttttcagcctcatggaactcctatccatgccagcctcattaccgatgcagccttcaaaagaggctggaggcccaggctggcacagcaactcatgatacaatgtgtggagactgccagcatgggtgagcacagggtgaagtggggcttatgctggggtcttgtcccactgctccctcagtgggcctctttccatctgtgacatggatagggggaccgttgagggcacttggtaggaaggaatccaatttttcctaaggacaggtttttatctctggacctcagtgacatcttccctccctgcaggtggtttgggccacagggagttcctcatgttccgtgtcagccatgttccaaggcacctccaagtactggtggctgtgatggtgagtggtaggtggtggggtaggaaaggaagtcagggcacttgagcctaggagtgcctgcagcatccatgtagggaagtggggtcctcttccagcctataggggaacaggcagccagaaatcgttcagcagtatatggccagccaccttcctgacctttgagtagtagagacaatccagcatcaggcagctgccattattaggatcagagttcatatcctgttcggtcctattgtccctatcctttctgtaagaaccctaaagatgcatgagccagccaccccttgaggctattaactcatgtgctcttgtgagaaggcgaaatcctgtgtccctttgcccaggagtgtaccatgtatgtgtatctgcctgttccatacacgtgtatgaggggcagatgtaggctgaggcccaaggaagcctcactggatagtcgactggatggacaaggaagagtggcatgagctggcctttgtcttcttacacatatgtggcagggtaggctgtatggggacttcagttttcccccagcttcatgttcagattcttggacgtgctgccactattcctgctcccagccttctatccagacctagctggggctcccaaggcagggccagggcaagatcgccaccatcttgtctgtggtgaagtgggcagatgcagcaggtcaggcagagagcctttctggggctgagaaggggtgctaccagcccagcaacttctttatgtttttctctgcttccttgctttcatcccgtgatgttcagagtcagggcggcggggccggcgtggcgtcgaagtggcagcaggtaccagtagcaacggtgaacctcggcagcccgggaatggcactcgggcaggcggtcctgaggagacggctgcccagtatgcagtgattgccatcgttcctgtcttttgtctcatggggcttctgggcatcctggtgtgcaacctgctcaagcggaagggctaccattgcacagcccaaaaggaagttgggcccagccctggtggaggaggcagcggtaagcccctgctgggtcgacatggggagactaggctttagagggacccttcatggcctgggattgacaggggagggctaatcaggaaggcctcctggaggtgctgtgcagcggccttgggcaacagtgacggctgacaaggatggtgataggggctgcactatggcaatgggcagaggtaagacagtgagtgtgtcaagtggagttggtaagattcctgctctgggtgaggccctgctccaccataggattgagactctgtaggggccacaggctatagttgtttggttcaaaatgacctgtggcctctggtctgaagcatgagagtgccctacatcaggtggggctggcagagccactgctctggcaggcactacgcagggttcaggtttcagctccactgtagttctagatacaagtactggaatcagagggagagggccttgagctcatttcttctcttgcttaccaatgcctcaaagtgtagagatctcatggacacatatgcactgctctgggccgtcaggaaccttatggccaagtcaagagaaatacaacatctcccatgcttgctcccaggaccccctccagctcctaaccctgaatcatggagtgagcgggtaggaagatagcacattagggccatttgactttggactgtacttttgctagtctagcgaccttaactgctgcctgggtatacaattttggaaatatgcttactggcttaggacccatcacaacggcccattctcacatccttgatgtttaaacccaaagctgttaaatagtttcctggacaggatggtgtgcagagaggtaataggcctggagaggtgttgagagttctgagcatggagggcccatagctccctaaggccaagaaaggtccagtgactatctgggagagactggtgcaatatgcagggatatggttttcagatggtcctgagaccactgagcacttggagtttctgggtgcaggataacaaagatgacagcatacttttttgagtctaggtagcccactggtaatggacttagttagctgtcttgtcacctgagcgccacagtagattttgctgcaactcaaagtaaggtctgtggcgccctctgccagcagatcctggtgtagcctggagtcccatcttgcctagaaccacgggttcctttttttttctccagggattaatcctgcctataggactgaagatgccaacgaggacaccattggagtcctggtgcgcctgatcacagagaagaaaggtaaagagagagtctctctttcatcctatgcctgggagcggaaggtcttttcctagagccttagctaatacttgggggaatccctgcccagctctgcctccaaagcctcagtttgatgggggctctgaccctgggtgctgcatttttgcctttgatcttgactggtaagggatggaggaagggcacatagtttgggccctaggacagggatgtgggagtaggcaggggctatccgctgagatgggtgggatgctcctgtaatttggagctaggttctgactccacctgcccacagagaatgcagcggccctggaggagctgttgaaagaatatcacagcaaacagctggtacagacaagtcacaggcctgtacccaggtgagggatggggcccttagataattagcttacctcctggggatttcctcttgggtctgctccctttcatgccacctttgttcctttccttgatgggctatccttttctggcttgctccagtgatcatttctgctcttcctcctgcaggctgctgccggcctcacccagcataccccacatctgcccgcatcaccaccacctgcacactgtgcagggcctggcctcactctctggcccctgttgctcccgttgtagccagaagtggccagaggtgctgctgtctcctgaggcagcagctgccaccactcctgctcccacccttctgcctactgcatccagggctcccaaggctagtgccaagccaggacgtcagggcgagattaccatcttgtctgtgggcaggtaaggtgggcagacatagagttgtggaataacttgaaggcctggatgaaagcaagtctgtgggttagcttagtgctgactagcctttcctgggcatctctgggtagtgtaggtggccaaaagggtcatcatttcccagctgtgctatgtcacatggagctcttgggtccctgaggcacacacagtcttggtgttatcatacccgggacttcttagaccaagggtctgtctgtacccctctaactagatgtggggttgctgggagctggatacaaatagctggggggctgagaaggactcctgagtagtctaacaggctcaacctgtgtgatcttggaaattgcagggtgacctagtaggagctgccttctttggcctgggtttcccctctgatgaggggtgttggtaccacctctccctataggttccgtgtggctcgtattcctgagcagcggaccagttcattgttatctgaggtgaagaccatcacggaggctgggccttcagagggtgatctccctgactccccacagcctggtcttccccccgagcagcgggcactgctgggaagtggtgggagccatactaagtggttgaagcccccagcagagaacaaagctgaggtgagtgcttggagttgggggggggggtagcacctgggtcaaccctgacagaagagaggcccatgaaggcagtggcggcctcttgactcagctctgaccctttaatcctgacccccaggagaaccgctatgtggtccggctaagtgaaagcaacctggtcatctgatgggctgtctagaattagacactctgccctgtcctgggaggttctgaaggcttcctgcaggagggagagctgcagctgggactgaggaccaagatgcaaaggccaagtcctggaggtgggaccgtccgccccactgaggaggcagcctgcggcacagcacgtgagcaggagatcaagagcccaccctatccctgcagtcccggttacttccatgcagggtgctgtaaccctgtgcctgccctgaacacatcataggagccctctgtcccttagaggtctggtttggtggaggagtggtatctgtacctggccccaagcttgtgccttgggaactagccactcttgcccatgtcctggaccctggatgtgactccctctcttctggcaggccctataaagggaaggggtagcaaagagccctgtactggtggcagagtacctgggttccaatcctgggcttatccctaggtacgtaggggaggagaactcagttcccaggacctctccagctctttgcagattctgggctgagtcctgttggggggagcttgactttgctaccctcccattagtagctttatctggcctgtttttgctgcttcctgggccttggccttcatggctcccatgggactgtctattatggtgatgccttcagaaggggtttaatgcatgtgcctgcccctaccctgctatttttaatgaaactgaaaaatgacttgacttggacagggctctctggtgcagagcctcagtccaccctgctgccctcaagctctggagctgtgggaagaggagacaggcaggctagggagtgcctgtggcctgtggttttcaatgcccctgtggtacagtatctgcctgagttttgggtagcaggggtgactgccaatccagcctgtcttagtctctgctctggctcagtgcctcgttatttatgtggggccgtgcaggcgcggggcccactgcccatcccatttcttatttattgaaacctgctgttgccctgcccctacatctccagccccacacacttgagtaataaaaggtggaaaatgtcgtcatgaggtgcttcctttccccgtatcctctctgaaaactgctcacctccagggccctgccaggtgtgcacacatcgtcctccccctcatcagcaccttcctctgaaaccagggaaataggcagaggtggctcctcgtctcatcctcaccgaggtccccagaggccaggttccccaatagaaatacaggctgagccatatgtgtgattgaatgtgttcccatagtcattccaaaaagttgtctaaaaaagggtaaacttagtatttttaaccaagtatatccagaatattttcattgcaatataaaatcattatgaaaattatgaacgagctttttttctgtttagaatcttatatatttttttttttatttatttacttattatttatttattatatgtaagtacactgtagctgtcttcagacactccagaagaggacatcagatctcattacgggtggttgtgagccaccatgtggttgctgggatttgaactttggaccttcggaagagcagtcgggtgctcttacccactgagccatctcaccagcccctagaatcttatatattttacatgtgttgacatgaactaattatttcaagggcacaagaagcatgtggtgagtgggagtggccacagctggagaggaagcagcagttacacagaagctcacagtgtgggaggggtgtgatccatgagatggggacaacatgtgcaaaggacagaccaggaagtggctggaggggcctcacagtggttaggaagaggcaaagcctcggcctgtttggtcacaatgcaaagcagaaacacccagaacaggaagttgttatagctgtctgggtaacaagtaacagggaaacagaaggacccaagagattcctagggcagacctgctggaactccttctgggatgtgagatagggaacacctaatggtgtccaaggtgttttgatatgaagccctggagctcttaggagacagatctgagtgacaagaatatcttacactcagatgggcatttacaactaggcagagagggtccatgttttagggcagatcccagggcctgcagtaagaagccatcagggtcctggtggccaagaatggatgtagaatttggggaaagttggctgagaggctaggaaggctgtcatgccccagggaatggacagggtctttgtgagtttcctaagggatgtggtgagagctggaccaataccaggtaaatcaggagacaccatcccataccaaagttgccatggccagtgggaccttaagttagggttttgtcagtgtgtggtacactatttaacatgggaaggagtgacacatgcaaacactactggagctagtagtggaagcctagcctgtaagaggagaccaggtggcttcactgaggacagaaatctgggcagaaaccaaggtaggtggctggcctagcagtggcaggaaaggagggaagaaaaaaagccactgttaacaaatgggcagacattttaaaagcccacatatccctgcttcttcccacatcctttgggtataggatactctgggacttttgtgaactgggagtagacagggtctcctgtgtgtccaaggaaatgatccctatggctgcaggatgcagcacatttggcatccatttacttcatgtatctcagggtttggctattctaatttgcctatcccttcagccagccaactcatggaccccacttagtacttaggatttggataacagccaattgggtggcacgtgaagataagagtgtgtcctggagagtgaggcaggaggtggcatcccagccattctctgggaaagctagattagagacacattcagatatccgcagggtggagacaccatgttcaggcttccaggctggttaggagatctctctcactataagcacttctctaccctgctcctgcttgctgagagaatggcttgtttcatttgcttcttgtgtcattaacctcccaacatcaaagatatgatgcaggtgtgtgatatttttggtctccacagcctcaccttcccttggaaacgttcctacaaatccctgcagctcttttcagtgggtggaggtgggagttggagggaagaacaagtagggtccaatctctagctctctgcccacttctagaaaatagccctgccattgtgacatagaaatgagcctaagatgttctatcctgtctcagataaggtatcctctcctcccttaatcaggcccacaatggatcatggtcagaacgaaaggctgggaggatgtcaggaggggaagtgaggcttggtgtaacactttccactgtagcacagcctaaaggagcactggtccagcaggtggcctctggcaatacacgccccatggagggttagggatgggactcagggccttatcaagctatgcaaacctgctgcctctgtgctggagccccatccttggaaagtcttaaaacattattgaactaatgcaactgagttgactaaccacagggacacatacctaacttcaacttctggagtgatcacttttgggcacttttattacagttgaggatgctgagcttttggcctattaactgtggaacgagaactgtgagggccgcaccctggaaaagaaaagtgattggatgcctaagaagtgtgtggtagtttgaatgagaattatccccataaggctcatttatttgaatgcttagtccccatttggtgcaactgtttgagaaggatcaggaggtatgccttgtttgggggatgaggtttcaaaagcatttgcctcacagggcatcatggtgcacaccttaatgttagtattcgggaagcagagaggcagttgtatttctgagtttgaggccaacctggtccacaaagcaagttccaggacagccagggctatacagagaaacccagttttgaaaagaaaaaggaaaaacaaaacaaagatccaaaacaaacaaaacaagcatgccatttccatgtagctcctgtgtgcacattctctgtctcagtagtatggaaacttgaagcccaaataaactcttcaataagttgtcttggttatggtgcctttgtgggaagccacatgtgccgttgctgagtggcactgactactgctggccaccacgcataagattggacaaacaaccaatgtgtacatatgcagtaaagttttttgcaaagacactgcctggcccaggcatgataatgaggttctgtaaggtactgagagtataaccaatcagatgtgagacatgcaaatgaggttctgtaaggtactgagagtataaccaatcagatgtgagacatgcaaatgaggttctgtaaggtactgagagcataaccaatcagatgtgagacatgcaaatgaggttctgtaaggtactgagagtataaccaatcagatgtgagacatgcaaatgaggtatgataatgaggttctgtaaggtactgagagagagtagccaatcagatgaggaacatgcaaatgaggcttagtgcataaccaatccgggtgtgagacacgcccctcctaggcctataaaagcagcaccagttctgggctcgaagtcttttcgcctctacaatcaagctctcccaataaacgtgtgcagaaggatcctgttgcagcgtcgttcttcctggccagtcgagcgcgtgcaagatgccttcacaaaagaaaagtaactaagacaaaaagccttggcagcattggcagtggatcaccctgaagggacagcagattcagtgtacaggagaggggaagaaaaaaaacaaaaaaacaaaaagaaagagtccttaatgacaggcttgtatgaggccctgtgggtttgtagtaagtcctgtaataagccacctagctcctcttgatttcctgacactccctcactgctctgaggagaggaggagatcccgtctcttaagaaactacctcctctgagatgggcctgcattctggaaccagaccaaggatgaattccaacttcaccttagccaaggcccttacctcccacgtgggacaaagagcagagcttcccctgcagcaaggtataaagacctcaaaggtcaacacgcagaggtgagcagcaagccatccacagccactcaagaaaccgcagggttttgttaccgcttccccctctttttctttcttttggtgctgggggggtccctgctgcacacatataccactgagctatacctcagcctcagtagaagccaggcctttaacagcttccctggatctccatcgtattatatgatccaggcgctgaacttaccactccacagctcccatccactgcgccccctcccaggccagagaggacatggaacactgcaatgcttgatttctttcctgagatcatacgtgcactggtgtataaatgcctatgtgtgtatgaattttatgtgtatgaatggtgtttccaaagaccagaaggcagcacggtatcccctgagttatagactgttgtgaaccactatgggttctgggactcaaaccctggccctttgtgagagcagcctgtgctctaaccattgggtgtatcctcagcctttgagttacaatcctaccccagcctccgaagtactggggctccaggtgtgtactcacaacaggttaaaaagcagcttagaatgccctgggggaggagcagcgcagggactcactggctggaggaggtctgtgcctccctcacccaagacacacgttttggtttttgttggttttttttttttttttttggaaactttcttttaatagttgttgaatgttctacagcttacagtaaatatcatagttacaaactcttggcttcaaccattcagagtgatcactatctgatcttcaaaacaaagcaaaacccaaaggaatccaaaacaacaaagccagatttacacttcatacacacaagcgtggccacagggctttccaatctttacactccaggctgtattttgaaaacatctataaattatttgatcaaactacttggaagacactggtcaaaggtttattattataattattattatttttaaatgttttttatttgttttaaaatgtgagttccaataaaatttaaaaattagattccaacctgtaggttaaaatgaattaaaaaatacaaaaatcatacacaacgctctcttcacagggatggtccatgccatgagaacaagcttctctgtcatgtgctatgaaagaggggtgcagatgccttgaagacaggaaggggacaggccctgggccttcaaagataaaagacaactccaaggtgcaggaggcctagccttgcatcaccttgtaaggagcttggttcacaagacagatccagttgatctggctgacctgaggtctctgggccagtcctattcttcatttagtctgactttcatgcatgaggaggatggctgagctggggtctaggacagaggatgctagggtcaaacccaaagcagattcctgtgggctgctgctatctgtaaagctgttttaaatctgttctcttgggaaagaaaattgtccctcaggctggaaaggataaagggacacactgccaccgcagggctacctaagggctaccgaaagcagcagccacggtaaggaaagcaagtgctgcttgtcttctgtgtccctctttgactctgtggccactagtttcaactcctatattcttagctggccttctggctggcattaacagtttataaattaggaaatacccacaggagaaactgagagtgggacccaagtctaggtcaggcgagtttggccatggaatgttgaagctggcctactgggaattttgaaagctgagccctggaaccacataatgccaaatttcacaatttttttttttctttttttccccctaggagagcgaacaggggtaggaaaaggacaaaccttgctgccagcccggcatgtccacagaagtctgtctagaggctcaggtgttgtctgagcaggaaacctagccaagatgcttccgctgctttgctctcctttgtccactccaacccaggctgccctccttctctagtctccctagcttgacaagatacttggggccacacactcagcagtcatgtagttaactcaagatggaaaagcagagctcactgaacatgagtcacacatgggatgatgactgattctgccagaacgctgtgaagaccagagcccatagcaggggcaagatatctgatatgcagggaactaagcctggttcagccaatgccttatctgatgtgtcatgtctgcacaatacagatgccagaacttggtgaccaagggatttgtgctacttgtatgctctccatgactcatttctgaaagctatttagaacagagcatcaagccttccaaagaaacactgctaggtctcaaacgtagaactgccctgatggccagaaagcactgggatacatgggacacaagttagtttctggttctcaaataaaccttgtactccagtccagacatgctttcagtagttcaggcttataccatgccccgttaacgtactttgttggatctggacaggagccagatggacagattgtgcaggctttccagaagcaagactctttgttgaaagatggacgatactgtcctcaattatcttcagtactaggcagttgtcaccttcagtgtcctgagttaggtcttttgtggcaaattcctatctgtactaccagctggatctatctatctctgggtctccagggcccattataggtcttggcccaaagcagaaattcttaaaaatctgctcagctgatggaccggagctccccaagtcttcataaacgcttctgtgtggggtagcaagtaaccccttctttcttcaagcaagcttacactcgagatccagtaggaggcagcaacaagagtagaggatcagaagagtctaaatcttggctctttcactcatgagctatgtgtcctttggcaagcctgtgaccccttcatagcatcacgatgcataccctgcctcctatctttagaggttttggcaatcaaagtcaaagtactttacaaaaagaggtctggacagatagatgtgtgtccctgatgaatattcagggaagggggtgcactttagggcattcctgggataacgagaaggaaaacgtggtttatcttataggaagaaaaatagggcttttgtttgttttttgttttgttttgttttaagcatgacaagagactctcaggctttcactaactgtgagtagtccagtttccagacttcctggcccagggtggataaaggtgaacaaatggtgataagggaggctggtgaacagaggcacctctccttcaggcacctctccttcagcactgcactggggaggggaaaaggtgtggacaaggtgtctgtgtgtggtgatgccagtgtggcagctcatggtcatgtgcacacccctcatcctatggtgaggggacccttccagctctggcctcctctgtcttgaccactgagcctccagactgtttagatgatacctagagtattcctgccagctacgtgtcaccttgccagctgtggtcacataaccccctgtgccctagggctcagtcccttcactatgactccctaagcttggctagacttgtggaactctatcaaacaaaagggtgaggccagcttttgtgctcttactaaaaagagttaatgggtctggttcttctagactacagcatgccaatacttggttttcaccttgggacttttctgctcttgaatcccagatgaggtgcagagcacagatgcttcagaacatgagcctatgtttggatcaggcctggagagaacagcgccagcagggggttccttaccagaaagtccctgtacttttcggagccttggaacctctatgaattaaatagcaggctccatgccttcatctgtcagggctaacccacatgaacagtgaggggtgcaaacagcttttatttactggtgtagaaagaacaaacatgaaaaggccactcctgggtctgtgttttcctctgccaccaggtcacctggagaccgtggggtctaggtagcctgccaggatcccagcagtgagctcactttgggccatttcatttctccttagaatctatcgcatcacttgtcaagtgagtggaataaccgaccctgttgcttgctctcagggtcagtatattaaaggtcatgaagtgctttgaaactaatgaagcacctaacaaatgtaacctacaattaccaccacctttatcagtttggcattttttaacatgttagacatgatctctagcaaccttcatccacctctacaaaaccacagaggacagggagaggtgttataagatcagattaacactggaaaactttgttttaaaatgaaaccttgtcagcaccccagaacagctgagttttcctggtcctgaagttcctgggagaccaggaaggtagcagccttaacttctggctctttgccacagacgctgaagaactctgaccccctggggacagtcagactgtttctgaggtcattccagctcagtggtttcctttttttttcctttggggggacttgggaaataggaaggtgatgtccaagtttaaaatgaatttaaaatgaaaataattcaagtctgaaatattaccagtgatccaattttacacagtaaggtattcctgttccacccagggaagatgtcggctttgctagctgtgcacaggagggtggctggtcggggtccctcttctcccagatgtgactgtatctgcttggcctcattcatgtgcacctctctgggtggctcccactcttcctctcttcttgggataaagagctactgtcctaagtgcacaggctctccttccagtcagcccacctactccttttcctggagtggagtcaggttcaagatgaacattccagatgtcttcataggttttccaagtgtaatttctatttctgccgcctgctctatgtggcctctcttagcccccacctttggagtccgtgggggaacagcagaaacaagcccagaggtcattacagagctcaccagatgtggcactgctgacttaattcttacaaagtcaagccaatccatccctagcaaaatttttgtaggtaaaatgccagtagtaggacggctgcatttaatgctaatttacagtgaggttcagagaagtcctttctgcttctctgggcctcagtttcctcatctgtcagataggggactgggtgagatgatggatgctaaggttccttcagttccatgagtatgaaatgattattgctattgttttccttcactatcctgaccttcagaaccgccagctcccacctggaatgtggttccttcactttggccgtgacatggcacaaggtaaccaagagcttggcctgcctgccagccccacagacagacgtgtgcgtccggcacggggaagggcagaagggcaagggagagaaatgccaccagttcctactctcatcaggaggaagcgcctcaggagaggtcctcgaggctcaggctgggtgtgggattatgcgaagcctctggatgctggtatcccagcacatgcagctgtttggcaggtctgaggtcaaagcatctctgaaggaagtgccaggtcagttaacatcactgtgcaaatcagaaggtccaggcccagcagtggggccggagacctttcaaaccagagctaagcaccctcctgcccttcttcacactacctccctccccagtgtcttccctccctccacccttccccaaactctctgctttcccaggttctgagcctggggacatgaagctgctaacattcctacataaccaggtgggtttgttcttggtctgttgtgatggttcttagatatttctttctttttgaactaatcttgcttcagaaaatgacaatctgacagagatgtggccttctcgacagcttcaagtccctactccacacggagggccacatttgttctgctctccaaacgaatctagcctttagatgaaccatcacaataaacctcactctctgcttgctactagaccggggtcccagggacaggatgctgagggaagggaagaagcagagaggactgggcctggctaggtaggaagaagggctagagcagaagggtgtggctaagagggaggcacgaggggaggctcctaggagattagaaaaagcagcttttacaaaaaccaaaaataaaaatcaaaaccattaaagatgcataaagtgacccttgcacttccgttgtctcttcttgcaatagaggtggtgctgctaggagactgctcagcaccggtaag

SEQ ID NO: 1020 - DNA, 2627 bp, Mus musculus
tgccctaggtcaatgtcactccagggcctgatgatgaagcggaccttgctgtgctggcccctgtcttgcctctttgtgctgctgccctggcctctggccactccaacaccaataactccttggctgtgtccacctggcaaagagcctgacccagatccaggacagggcacattatgcagaacttgccccccaggaaccttttcagcctcatggaactcctatccatgccagcctcattaccgatgcagccttcaaaagaggctggaggcccaggctggcacagcaactcatgatacaatgtgtggagactgccagcatggagtcagggcggcggggccggcgtggcgtcgaagtggcagcaggtaccagtagcaacggtgaacctcggcagcccgggaatggcactcgggcaggcggtcctgaggagacggctgcccagtatgcagtgattgccatcgttcctgtcttttgtctcatggggcttctgggcatcctggtgtgcaacctgctcaagcggaagggctaccattgcacagcccaaaaggaagttgggcccagccctggtggaggaggcagcgggattaatcctgcctataggactgaagatgccaacgaggacaccattggagtcctggtgcgcctgatcacagagaagaaagagaatgcagcggccctggaggagctgttgaaagaatatcacagcaaacagctggtacagacaagtcacaggcctgtacccaggctgctgccggcctcacccagcataccccacatctgcccgcatcaccaccacctgcacactgtgcagggcctggcctcactctctggcccctgttgctcccgttgtagccagaagtggccagaggtgctgctgtctcctgaggcagcagctgccaccactcctgctcccacccttctgcctactgcatccagggctcccaaggctagtgccaagccaggacgtcagggcgagattaccatcttgtctgtgggcaggttccgtgtggctcgtattcctgagcagcggaccagttcattgttatctgaggtgaagaccatcacggaggctgggccttcagagggtgatctccctgactccccacagcctggtcttccccccgagcagcgggcactgctgggaagtggtgggagccatactaagtggttgaagcccccagcagagaacaaagctgaggagaaccgctatgtggtccggctaagtgaaagcaacctggtcatctgatgggctgtctagaattagacactctgccctgtcctgggaggttctgaaggcttcctgcaggagggagagctgcagctgggactgaggaccaagatgcaaaggccaagtcctggaggtgggaccgtccgccccactgaggaggcagcctgcggcacagcacgtgagcaggagatcaagagcccaccctatccctgcagtcccggttacttccatgcagggtgctgtaaccctgtgcctgccctgaacacatcataggagccctctgtcccttagaggtctggtttggtggaggagtggtatctgtacctggccccaagcttgtgccttgggaactagccactcttgcccatgtcctggaccctggatgtgactccctctcttctggcaggccctataaagggaaggggtagcaaagagccctgtactggtggcagagtacctgggttccaatcctgggcttatccctaggtacgtaggggaggagaactcagttcccaggacctctccagctctttgcagattctgggctgagtcctgttggggggagcttgactttgctaccctcccattagtagctttatctggcctgtttttgctgcttcctgggccttggccttcatggctcccatgggactgtctattatggtgatgccttcagaaggggtttaatgcatgtgcctgcccctaccctgctatttttaatgaaactgaaaaatgacttgacttggacagggctctctggtgcagagcctcagtccaccctgctgccctcaagctctggagctgtgggaagaggagacaggcaggctagggagtgcctgtggcctgtggttttcaatgcccctgtggtacagtatctgcctgagttttgggtagcaggggtgactgccaatccagcctgtcttagtctctgctctggctcagtgcctcgttatttatgtggggccgtgcaggcgcggggcccactgcccatcccatttcttatttattgaaacctgctgttgccctgcccctacatctccagccccacacacttgagtaataaaaggtggaaaatgtcgtcatgaggtgcttcctttccccgtatcctctctgaaaactgctcacctccagggccctgccaggtgtgcacacatcgtcctccccctcatcagcaccttcctctgaaaccagggaaataggcagaggtggctcctcgtctcatcctcaccgaggtccccagaggccaggttccccaatagaaatacaggctgagccatatgtgtgattgaatgtgttcccatagtcattccaaaaagttgtctaaaaaagggtaaacttagtatttttaaccaagtatatccagaatattttcattgcaatataaaatcattatgaaaattat

SEQ ID NO: 1021 - protein, 315 aa, Mus musculus
MIQCVETASMESGRRGRRGVEVAAGTSSNGEPRQPGNGTRAGGPEETAAQYAVIAIVPVFCLMGLLGILVCNLLKRKGYHCTAQKEVGPSPGGGGSGINPAYRTEDANEDTIGVLVRLITEKKENAAALEELLKEYHSKQLVQTSHRPVPRLLPDSIPHICPHHHHLHTVQGLASLSGPCCSRCSQKWPEVLLSPEAAAATTPAPTLLPTASRAPKASAKPGRQGEITILSVGRFRVARIPEQRTSSLLSEVKTITEAGPSEGDLPDSPQPGLPPEQRALLGSGGSHTKWLKPPAENKAEENRYVVRLSESNLVI

SEQ ID NO: 1022 - DNA, 2707 bp, Mus musculus
tgccctaggtcaatgtcactccagggcctgatgatgaagcggaccttgctgtgctggcccctgtcttgcctctttgtgctgctgccctggcctctggccactccaacaccaataactccttggctgtgtccacctggcaaagagcctgacccagatccaggacagggcacattatgcagaacttgccccccaggaaccttttcagcctcatggaactcctatccatgccagcctcattaccgatgcagccttcaaaagaggctggaggcccaggctggcacagcaactcatgatacaatgtgtggagactgccagcatgggtggtttgggccacagggagttcctcatgttccgtgtcagccatgttccaaggcacctccaagtactggtggctgtgatgagtcagggcggcggggccggcgtggcgtcgaagtggcagcaggtaccagtagcaacggtgaacctcggcagcccgggaatggcactcgggcaggcggtcctgaggagacggctgcccagtatgcagtgattgccatcgttcctgtcttttgtctcatggggcttctgggcatcctggtgtgcaacctgctcaagcggaagggctaccattgcacagcccaaaaggaagttgggcccagccctggtggaggaggcagcgggattaatcctgcctataggactgaagatgccaacgaggacaccattggagtcctggtgcgcctgatcacagagaagaaagagaatgcagcggccctggaggagctgttgaaagaatatcacagcaaacagctggtacagacaagtcacaggcctgtacccaggctgctgccggcctcacccagcataccccacatctgcccgcatcaccaccacctgcacactgtgcagggcctggcctcactctctggcccctgttgctcccgttgtagccagaagtggccagaggtgctgctgtctcctgaggcagcagctgccaccactcctgctcccacccttctgcctactgcatccagggctcccaaggctagtgccaagccaggacgtcagggcgagattaccatcttgtctgtgggcaggttccgtgtggctcgtattcctgagcagcggaccagttcattgttatctgaggtgaagaccatcacggaggctgggccttcagagggtgatctccctgactccccacagcctggtcttccccccgagcagcgggcactgctgggaagtggtgggagccatactaagtggttgaagcccccagcagagaacaaagctgaggagaaccgctatgtggtccggctaagtgaaagcaacctggtcatctgatgggctgtctagaattagacactctgccctgtcctgggaggttctgaaggcttcctgcaggagggagagctgcagctgggactgaggaccaagatgcaaaggccaagtcctggaggtgggaccgtccgccccactgaggaggcagcctgcggcacagcacgtgagcaggagatcaagagcccaccctatccctgcagtcccggttacttccatgcagggtgctgtaaccctgtgcctgccctgaacacatcataggagccctctgtcccttagaggtctggtttggtggaggagtggtatctgtacctggccccaagcttgtgccttgggaactagccactcttgcccatgtcctggaccctggatgtgactccctctcttctggcaggccctataaagggaaggggtagcaaagagccctgtactggtggcagagtacctgggttccaatcctgggcttatccctaggtacgtaggggaggagaactcagttcccaggacctctccagctctttgcagattctgggctgagtcctgttggggggagcttgactttgctaccctcccattagtagctttatctggcctgtttttgctgcttcctgggccttggccttcatggctcccatgggactgtctattatggtgatgccttcagaaggggtttaatgcatgtgcctgcccctaccctgctatttttaatgaaactgaaaaatgacttgacttggacagggctctctggtgcagagcctcagtccaccctgctgccctcaagctctggagctgtgggaagaggagacaggcaggctagggagtgcctgtggcctgtggttttcaatgcccctgtggtacagtatctgcctgagttttgggtagcaggggtgactgccaatccagcctgtcttagtctctgctctggctcagtgcctcgttatttatgtggggccgtgcaggcgcggggcccactgcccatcccatttcttatttattgaaacctgctgttgccctgcccctacatctccagccccacacacttgagtaataaaaggtggaaaatgtcgtcatgaggtgcttcctttccccgtatcctctctgaaaactgctcacctccagggccctgccaggtgtgcacacatcgtcctccccctcatcagcaccttcctctgaaaccagggaaataggcagaggtggctcctcgtctcatcctcaccgaggtccccagaggccaggttccccaatagaaatacaggctgagccatatgtgtgattgaatgtgttcccatagtcattccaaaaagttgtctaaaaaagggtaaacttagtatttttaaccaagtatatccagaatattttcattgcaatataaaatcattatgaaaattat

SEQ ID NO: 1023 - protein, 427 aa, Mus musculus
MKRTLLCWPLSCLFVLLPWPLATPTPITPWLCPPGKEPDPDPGQGTLCRTCPPGTFSASWNSYPCQPHYRCSLQKRLEAQAGTATHDTMCGDCQHGWFGPQGVPHVPCQPCSKAPPSTGGCDESGRRGRRGVEVAAGTSSNGEPRQPGNGTRAGGPEETAAQYAVIAIVPVFCLMGLLGILVCNLLKRKGYHCTAQKEVGPSPGGGGSGINPAYRTEDANEDTIGVLVRLITEKKENAAALEELLKEYHSKQLVQTSHRPVPRLLPDSIPHICPHHHHLHTVQGLASLSGPCCSRCSQKWPEVLLSPEAAAATTPAPTLLPTASRAPKASAKPGRQGEITILSVGRFRVARIPEQRTSSLLSEVKTITEAGPSEGDLPDSPQPGLPPEQRALLGSGGSHTKWLKPPAENKAEENRYVVRLSESNLVI

SEQ ID NO: 1024 - DNA, 41104 bp, Homo sapiens
  misc_feature (1)...(41104): n = A,T,C or G
caggaaatagaaatagcaacagaaaacaacatagaatggcactagcacagaaaatggactgataattagaaagtgaaacagccgggtgccaggcgcggtggctcacacctgtaatcccagcagtttgggaggatgaggtgggaggatcgcttgagcccaggagttcaggacccagcctgggcaacatggtgagacaccatctctacaaaaaatacaaaaattagccatgtgtggtggcacacacctgtggttccagctgctcaggaggctgagctgaggtgggagactcacttgagcccagggaagtcgaggctgcagtcagcagagattgcaccactgcaccccagcctgggtgacagagtgataccctgtctcaaaaaaataaaaataaaaatatggccgggcgtggtggctgacacctgtaatcccagcactttgagaggttgaagggggtggatcacctgaggtcaggagttcgagaccagcctggccaacatggtgaaaacccatctctactaaaaatacaaaaactagctgggtgtggtggcgggcgcctgtaatcccagctactcgggaggctgaagcaggagaatcacttgaaccagggaggcggaggttgcagtgagccaagagtatgtgccattgcactccagcccaggcaacaagagcaaaattccgtctcaaaaaaaaaagtgaaacagcaggaaatgaggtacatcaggaggccacaaccagaaaagtcttgctttggcaggacaagaaatgatattcccaagaggaagtggctgtggaaatcaggaagcaataaagcctcgggtcaggagttgtctgggttcacagaagacttaagctacctgggaaagggctgttggaagtaggaggcttatttaatgcaaggacgttgcgtgcagtaatcaagagagatagaaagtggcatcttacagggcacttacattgtaaaaagaaaaaaatcagaagtggcgtcaccttgggaaattatgtgactcctgactagagattacagatgggacataagaagtctggctgccaagaagtgggcatttctttctaaataagttcctagctaacagaaagtgggattcccccataggaagtgtgcacatcttccttcctatcttctggggtgtgggaattcaggccccgatgggacagtgaagcctccattcgcccccaagctgacagatcctcccctctgcccccaggccccgagaagctgccatcactggagcaccgggactccccttggcaccgaggccccgcccctgccaggcctaaaatgctggttatcagtggaggtgatggctatgaggacttccgactcagcagtgggggcggcagcagcagtgagactgtgggtcgagacgacagcacaaaccacctcctcctgtggagggtgtgaccctgtctgccgtggcccaggactcgcccgcccacctgccttcagcctgcttgcctctccctagcccacacgcagactttgaccaggagtatccagccaggggcacacatgtgcctgcgtgggctctgccttgtcttcgcggaagcattcctgatggaacacccactggccagccaggccatggcttctcccgaccctctggctgccccggtgcttccagtcatgatcgggtgggggacatgtgggctgaccaggacctctgaccctggagcttctaccaaagacacagctgggtctggaccccacggggctggggagggccatgtgcaatatttggagggttttctggagggcagcaggaaggctggggaattccccatgtacagtatttatgtttctttttagatgtgtaccttcccaagcacttatttatgcagtgacctggtcacctggggtgggggtgatttgaggaaatgacatgaggaaaagaaacctattcctgccctggggaccaccctgggactctaaccaagccttcctggagggacccatgcgcccctgagccccattccattcatacagacacacacgtacgcacactgcatgtccaaggccctaaacattgcccgttgacataaactttccagggccccagcctgatggggctgccctcagtcctctagatcaagatgctgactattagggggcagtgattgccatctggggacctgtcaggctttgtcatttcccagtttgttggtggtgcctttagtggttccctaatttgggaacactgatggggccttggacagggctttctctcaggtaggagaaatgggcccatgatctcctcacagtcgcccccagtccttggccctgcttccctgtgtctcatgcactggcacatatggtcaccttggagggcagacctaggagcccctctgaccactgaatccgtctccacaccccttctgccaagggaagccccttcaggaaggaccccccaaagctgaggggctgaatgtagccttttcaacagagaaggctcccacttgagagcagcctctacctgaccccctggaccacagagagccactctgaccctcagccccctcgcttcttcagctaaaactccaaaggtttggtttcagatggggtttgttttgttctgtttggttttggttttgtttggggtgggtgggtcattgcggtcttagattatgtttctcttgctaccaaacagtcatgtattaactctctttggatgatgaagtttaaagagtcaataaatagaaacaccagatgactgcattggtggccacagtggcctcctgtcagcaacctcagggctcagtctccctggccacatgggccttccgacgtccacacacttgggaagaagggaggccttggagacccagaagagtgctggacggcgaggttgccacgatttgctgtgttacctgggcaggtggctgggctgcagtttcctcatcaggaaaataaaggggttgtaccagttcagtgctttgtaaccagggttacatggtagaatcccttgcagatgacatgtaaatgcagaaacatgattcgtaacttatttacgtattaattgagagcttctgagtcagtgggcctggatggagcttgggaatctgaagctgacatgctccaggtaaagagccaggacccctgttgagcctgtctacggctcctccaggaaacaatgttctccagcaaagcctcagctggagaaccctgatgaaggccaaggccctgctccaaccctctgaagtgtttggagcagggatagaatccaagtctgtctgatttctggtctgaagaggtctgtcattaaatcagacacaagaacgcacaggcccagcaacatgggactattctgtgcaaggacagagagccctccagaccagagtgcacctgcagaactagaggtggccatcactagaaggcatgtcgtgcctcagctctgctacacgcacgaacgtttccagcctaaatgactgacttttgagtcagcccctgaaggggcatgcaagctcatgctctgcaaactggcagcacacctctcaggggtctgctgggtcctcaacaccacaggacgggcatggaccgtctccgtgcagcatcattttactggggctatctggggaggaagggattctattaataagcacagatatattatggagtaggaggcatcattcatgtggaatatataacgaaacaaagcattagaagaaacacaggctttgaagctggacagaccttgtttgagatcttgactttgccgctaactagctatgtgcctttgggcaagttgtatcccctctgagcctccatttcctcacgtgtgaaatgaggctgatgatcccttcccgaacaggactgctgcttggcgtgcacaggtctttggattgcaagaaagagattcattttgcttgtgaactagaagggtgcttattagtgaagatgtgagctggcagcaaggagctgtcacagggcactgtggcccagacatcagagctgcatctcaggacatctggcctctccacttgagtcgccagtgcctcccacactgccagtcagttgctgttccactgctttccagcttctgctgcctcagggcctccgcctcctccactcggaggaccctgggcagacttcagttttagcacaagatacccaagaccagatcctcaccacttccccgactcaagtgcctcagtaagaatgggcttggcccagcccactgttacttagaggcccacattccagggcactggccagcctgtggacagcccggaccccatcagctgtgggcagggaggccctggaatgagcatcagaccccaggctcccggcccaggggaggctcctggaaggattacctcctctgaagcagtggttctcagcctgggatgcacattatgatcatgagggcctaggccaattccaagccaattaaatctgaactttgagggtgggacccaggtgtctatatgtttttcagaaacctttagttgaagtataacatttatacaaaaaaggacataaaaaaggacccagcgtgatgggtattcataaagtgaacacacccaggtcaaggaacagaaaatctcatcaccccagaagctccccttagacctccttctggtctgccctccaagggtaaccaccaccccggcttctgacaccatgatctagcttcaccagccaaggtagagaactgctgctgtaaagggaatgactatggttagccactggtgtgggggaaagtggggcttgggtttgatgttaagagggaacgccagcctggccaacatggagaaaccccatctctacaaaaaatacaaaagttagccaggcgtggtggcgtgcacctgtggtcatagcgacttgggaggctgaggcggagaattgctttaacccaggaggccaaggttgcagtgagccgaggttacacagcaccccatcctgggtgacagagggagactctgtctcaaaaaaaaaaaaagaacagctcaaaccaaggcaaggaggggtagaggagcctggtgcaggcccaggtggatggggaaagaggaaaaggcaggggcgcctagattgggagctcccgtgagcgtgggattttgttctttgttccatccccaggcctgccacagtgcgtgacacacagtagatgctcagtaaatatttgttgaattaaatctggagaattcaggtgagaaccaactctaggtcttgaatgccacgaaacaataaacccagcttccacttagtgtttgctgcaagccaggagcatggatcatctcgaatcctcacaatggtcctgggaggttgataccattattaccctccttttcagatgaggaaactgaggttcagagaggttagatgccttcctcaaggtcacctaaccactaattgatagaacctggaatctgtctgctcaggtctctgtatctcatggaagaggagggctggcctggtgtggctggaggacaggagagacagcctgagcacccagagtcacatgtagtcactcatgaggctggactaatgttccttagaccagccctgggaaggggatccagatcccagatgagtgaggagagtcaaagccagaggccatctcctcttcaagggagttctccaggtggtcccttgggtttgggacaggggtcagggtttagctagaccatctatctaatggaaaagatgaggcacagagagggtcaggaacttacctgaggtcacacagaaaggcaacattgaggctgggggtagctggggaggagagcccaggcaggaaggtttcctgtggtcagaaaagccaggaaatgacccttaaagccaggggaggcagaaggctagacgagctggcctccaggggccccgtcacacacctcaaaccagcctcagcactgggctggtccagagggcttggagggagcaagtctggctaaggccttaccttaaaccttctgggcagggcctggggagggcatgggggaccccagggcttgaactcaagctccagcccaggctctcggcactgtgtgatgccaggcgagtgtctgtccctccatagacctggatgacctctgtgagccctttacatcttctgcatgcctgccaaacaccaagtctgtgtcctcacagaccttaagccacaggccaggttgcaggaaacggcaaggggaagtctattttaggcccaattatagccaatgaggagtcctgcctggcaaaggcaagtgagctggcatcccaagctgggtcagaggtagtttgctgggctggactggggagggagatagtgagcaggcatcagggataaatcgggcagagcccctgctgcccagggcaaacagtgcaccaagggaagggagaggagagagagctcctgagcccagcgtcctggaagaagctggtgcccccgatatgaggtctcagcagatcctcataacacgcttggatgggcgagttctcagagaggtgaagtcacttgcctaaggtcacacagcctggcaatggcagaagtgggacttaaccactatccatgtgacaccaaagcatatattcttccattttcccctagatttctcttctccaggctccttaatctcagatgcttcagcaagccacctgcctccctgggcttggctcacactccctagctcttgacctgctcatgttctgggcccagagggtaactggactgcaagtctcaccctgacagtccccagggtccccaccagccccattgtctgcagttcatggctctgggttcctctctcagactcaccatgggaacaagaaaaccctacacttgcctccctgagcaccagtcaggtgggcaatagaacctgggatggatggaactgagagtgctgggcctcccatgagggagccagtgaggcagtcaccaaagacttgacacctccaccccagtgggattccagacccaggccagggtctggacctaaatgcaggttgaacctggtcctcagacccagacagccccagctcagcttctggcctggccccaggctgagccctatcctggcctcctagcctcagtttcccctcagactgagcccaccctcccctggagctaagacacaaacacaggacagcagcccaccttcttagggttaggacttggcccgctgggggttagcctaggatggagcattgaattttatttttttttttttgagacgcagtctcgctctgtagcccagactggagtgcgatggcacaatcttggctcactgcaacctccacctcccgggttcaagcagttctcctgcctcagcctcccaaataggtaggattataggcgcccaccaccgcacctggctaatttttttttctttgtatttttagtagagatggggtttcaccatgttggccaggctggtttacaactcctgacctcaggtgatccgcccacctcggcctctcaaagtgctgggattacaggcgtgagccaccgcgcctggcctggagcattgaaatttaagtatgagcctgctgttcctccaggcttgtactgtatgtacttccttttggaattctagcacagccagcaagcagagtggcacccactacctttggtccatgactccaaggcagtcatctactcagacccctgcatacagccacactgtggtggctctgattctgtgacccaggatccccaccccaggcagggcctggctggggcatggcacctgtacccctgcctccaggtccccatcacagctcgtcccagtttactgggaccttgtgctgtgtacctacaatgaggtgcacacattctctgggcccacttgcccagctgtaccatgtgaagttcaacaagatggtctctgaggtccctgagctcagggattccagtgctgactccatgggttcagttgagatgccaggattttataaagcctgtgattctgagagtcctttgttctcaagcctgtggttccccaagctccataaaaagcgagtctaaatctttcctgtggcttccacaactccttccctgtctactcactgtggagcaacccagatgctggtagactctcagggaggagcccacgtcacagtggtttcagggtcagagctggctgcaggaggagctggcgcatccacccagcagtaaataataattaggctccctcctaacctgggggttgcaggagcgagaagtgtttgggctgtggccccaggagacctactctatggagctgctgccagggcagccaggtagccgcctcccacagagaacttcaggcaacatgtctggcaccccagttttcagatgaggaaactgagttgggggtggatttgatgaaaacctcacagagagctggtggtagagaggggcctggaccctctctgggatgtctgattaatagccagtgctccaaaaagcatttccccatttagtttattgattgagacaaggtctcactctctcacctaggctggagtgcagtggcacgatcgcggctcactgcagtctcaacttcctgggctcaagtgattctcccacatatttttgtagagactgggcttcatcatgttgcccaggctggtctcgaactcctgggctaagtgatcctcccaactcagcctcccaaggtgctaggattacaggtgtgaccactacacctggccttccccatttggtttattgagtgacgacacctgaaattgccaccatttgaactctagaacctagagctggggtgtagatggtccccttacaaagaaaacatttccaggagtggaggcattctggatgctctggccttccgtaggctgggatgtgggaccctggaagaacccctgccccagccctggaggtctccattgacatatgagggtgctgatgtcatgatcctgacatcaatgacctgtagctccttatgcccttcccccacaacctgagcatgacccagggaaatgaaaactcatcccctgctcccctccccatgcggtgtccagttcgcctcctggaatctcctggaccctggggacctgaccttttccgtctcctagcccctgggttcagattctatgactgtttagaaccccacccccagccatctatccccagctgacttatttaccttcctttctccatctctgtcatgggctgtgattatcctgaccccagccaggcctctggcccagcactaggtcctccctggtgtctcagtctcccatcagccctactgtcccaggaggaccgcctgagatcccctgaatagtactgagagggggaacgggccactgagctgctccctccagtcctggcacaccctgtagcacaactccaggggacacgattcggagtcggaatacagtgtgaatactgcctggagtttgtgatgactggcattggaaactggcagggtgggatggctgtagtagggaggggggcactgagtcacctgtcctgctggagggaaactaactaccctggcacagagaagtggtgcggggagtaggggagtggaggcaggagacgcctcctggaggatttcactaggccttgaaggatgtgccgaagcccaccgtgtgggcttcctttatagactcaccttcaccaggccttttcgccaactaggtgagggtttccagggttgggcctgggcctcgtcaacaaagcaaagtgaggttattcttcctggccaccaactggcaggaggaagatgaagcccagaaaggggcagaggtggctctagttacactggcaatgctgagaggacccagaggagtatctcagtctccagtctctttatcttgcttcgcacaactccttgcttggttcagagccttgaagaggcggatacaagaggccctctgggcaccgccgcccagtcccgcgcagccccctgcagttcccaggggcgcgagagagggcgacgtagagcagcaccgcccagcggcagagcggcgagcccctccgcggctcggggtgagtcgggcgcggggcgcagaccgcgctctgacgtcgggggcggagcggccgtgacgcgcgggggcgggtctgcgcaccttcccggcccagccggcgattcattcaaaaggcgcgcaggctgcgcggctgtccgggcgctcgccgagccgggccgcggcgccgagtcgaacggggagccgagctggagctgccgcggnnnnnnnnnnnnnnnnnnnnnnnnnnnnnnnnnnnnnnnnnnnnnnnnnnnnnnnnnnnnnnnnnnnnnnnnnnnnnnnnnnnnnnnnnnnnnnnnnnnnnnnnnnnnnnnnnnnnnnnnnnnnnnnnnnnnnnnnnnnnnnnnnnnnnnnnnnnnnnnnnnnnnnnnnnnnnnnnnnnnnnnnnnnnnnnnnnnnnnnnnnnnnnnnnnnnnnnnnnnnnnnnnnnnnnnnnnnnnnnnnnnnnnnnnnnnnnnnnnnnnnnnnnnnnnnnnnnnnnnnnnnnnnnnnnnggaagcagcggaacttgcggtgtgaggggccggcggggcccggagcggtccccggcccgggaaacttggaccgagaccaggttgtggtgcgggctggacggcggcgcctcggcgcggctgcggcgcggggcggccaagggggggtctggatggtgtcagcccgtgactgtgggtgacacggcgcgtgaggcggcctggccgggcgaacgtgtggctgggacactgggcggtgacgccgggccgagcgggcgacacagaggggctctgtgtgtgggagacaggcagcgtgtgtgcgtgtgttgtgtgagggaaagacccggggtcactggggtcacgaagtgcgtggcttggggcgtgaccggcgcagggccagggccacccgttactgtgagtgtgaaatagagggagaggagcccaagtgactgagaacgagccgagctcgctggcgccatggtgtgcgtgtggggtcaagtggtgtcagtgtgtgtgtgtgtgtgtgtgtgtctgcgcctagggtgatgatgagtaagaggcaggaggaggagggaccggacctaggacaccttccggcagatgtggggcgatgaggaagttggggagccaggagacaagggtctccaggactgtccccacgagggcacccctcaggagttcagcttggtgaggagatggaccctgagggataggccctggctgagggagaaagccgaggctgggcaacatctggtggggtggcccagatggcagcagggtaggggccctgtggtagtctcagcttccccccgcccacctgcatccacacactcacgcatcgaagtccctacacctggcaaagttctgcccctgtgtaatctgtattctcagcggacccggacacaatcttgttctcagacccccccgcccccctcccccgcgcaggcctcagtctccccatctgcacactgaggtgctgggctttgaatggactgtgaatcatcactttgggatcctctattgttttgggtcaactgcctgtgttctcccttcccttcaggcagaaagactgcagtggggggtgggggcaggcttctcctggggacacagcggcccaggggctgcactcaggggctactgatagggttggaagcacagccttctccaaaactggtcaaggaaacgttagcctcccacccaaaggcttcctggtcctctgtcacgaaatggatccatagacaatatggatccccaaatccatagacattcacttctctgcctgggtgtcctttcttcagttccttgggttgggggagagtggggagagacttgttccccaggagtggtctctggtctgggaggctaagttcttgctggagagctggagcggtaccctttcgccatctgggcaagacccttctgaggccccttctcccgtatgaaggtctgtggggttcatgcagggtggggtggaagctgagctccctagtctaggagagggtggcacttgctgtagaatctggaagttctgtcttctgctgtcgtcctctgaaaatgctgattacattctaggggtgggggacagggtgggggacagtgtcaggcactgttctgaacacttcatggtgttctgtcttgttgaatcttcgcagtgattctgagatgtagtgactgtgtttcagagaaaggaactgaggatcagagaagcaaagtgacttggccaaggtcatacagagtcaggacagtgccaggactggaattcaggtcttctgaccccagagaccagtgagatgctgggagagaggatcacccaccttcctaataactgctcatggctttcctggacttctgtctctcaaacttgggctagtaggcgtggcctagccagggcattacattgtgagttctaagtatgatgtgtgtgtgtgcacacatgtctggaacactggggatgggtgggttacatggtcttcctgttcctccccagacttcactcccaaccagacatcaccagaaagtcctgtcccctgccttctagagcctggacctggctttgggggtgtccccatggctttgaagagtgtatggagttagcagcacagcctaggggtagcagggaaaattgagagtcccaggtgaccttcatcatacttgagaggccccctcccctttgcagttgctctagaggcatttccccaaatccacctgcatgttatggtggggagcagacagggagtgaccttgagctggtccctactctctctgggcctcggtctccctgttcttcccagagaccccttttggctctgaccactgttgccacttggccaagaactggaactggggatcagggtgtccctcggtcctctctgcaatgactggagctgtgcttcttggggctgatgaaaatagctgtcgtggtctctaggggctgagccggagttatttccatcctcaacaaagaggtggaaatagcttagggcctgggagggggagcaagaggagaagggttaacttctccttatcccagccttaaaggaggcccccagcctcagcctgtgccctggccaagccaaacctttctgggaacttgggcctctggggatgacagtggggccaggctgggtttccacttgtgaccacagttgggactggtgtgatagctgctggagggagggccctatgtctagccaaggaggggagatattgagggccagtcagcacctgcccctactcatagggtcaggcccaatctcatttcacagaaggagagattgaggttctgagaattcagggacttaccctaggactcctagaaccttcaccttccagacgcggtacctgccttctgtcctgagtttgtcattctgtgtccacactttccctggcggctggaggttggccagcactggaagcaggcccaagacacaccttctggacgtcggcctgcctcatattccagctctggccttgccatccctgcccaggctctggttctagcttctgtgcttccacgtcggctctcccgcacactgccagagtgacctccataaaataacttgcttttcgcctacaaagtgtagttcaaactcctcacctggcaatgaggcctttccttccaaggcctttcagaatttgcatctttaccctcgcctctccttgccagatgccttgtctgccttgcctttgcttttaaagcttccctctttctagaaccctcttggccatccagactatagccccagctccacctcacccaggaagccctcctggcccgaaattagtctcccttcattgttgtgggccacctgccaggtgtcctccctcactgctggggaatgggcacaggtttggggcacctgtgggtaccgcatgctcagcttggtggggccagcgtggccagtagcccaccccctcccactgccgtctctgtgctgacgagacctcttcctgaggaagggcagctgctctaggatcccagcacctgtgtgctgggaggcaccgggagatttgcacccaggtctctggtgctcaccatgacctgaggcagaatgtgtgctggcgggtgggggcaaagactcacggccactcctgtgggtagggggcaagtgtagtgcttgtcatggtcctcgacatcttgagccagtagaggcaactgtccctgctcaggccctgtagtgtgccaggctctgggcccagcatttcctcacaacagcactcacccgggccctctcctttccaagttggtatgggggaacctcgactcagagagcagccctaggctgagtcacgcagccacttgtgttgtagtcaggtactccagatcctacccagcccccagcctggtctccaggcaggaggtgagggtcgaggggtttgtctgacaattctaacattagtttctcaagaagggccaggctggtcagcacccagtctggctgggcgggacctgactacttctgttatggggccagcccttctgccaggtcagcaggagagaggaccagagaggaaggggttttgcctgaggttactcagcagggtgtgtttggcgccattccccactcaggatcgatgggggagcagggatgtggtctctggacagggagaatacccactgtgtgctgaacccgtgtctttctgggcctaggcttggtgctgctgagtggggctggagtggcagagaggacaagagccaatgctgcatccctactctgcccatccgtgggattatggcccgggaggctgtcacatcctcagccttatactcctgggggtcatcattccctccaagcacaggcagggaaaccaaggcctagagagaggaggcacttgccaggccccagtgtcactgggatccaaacccaggtctgctggccttgaagaccagagttctttcctaggccactctgggaaagatgagagctctataaataagctgcccatgtggctgtgagcaagtgccctggctagttgtcacagacagagggggacagcgggacctctacagccagttagagtcagggtctgagtgtgcaggtagagagaggagtgggggcttccagaggggggacctgcgcttagcccagtgcatgcactgtgaggaggagcagtgagaggggaggaccttggccacccacaccaccagcctgctgcatgcctggcctcctgcacagaccctttccctccctccctcaaggagcctcaccccttctcgaggaatcaagggagactgaaaactgatggcaggggtgaggggtgggggagtctggagaggagagggggccctcttgacagggaggctggggaggcttcctacaggaggggatgcctggcccaaggcctgattgtaagaagagcccctgttgcctgtgaacgctgagtcctccaccacaccatgaggtcagctgcactggtgtaattgggaaacaggcttgggaagttggggctgggttcctgactgctgaactaccccttacattcctgaccatggccctggctggtgtgggagcaggtggacgtaggcctgtacaggggctgggacatgggcacccagggccctcccagagaggccgaggcccctctacttgtgctgccagggtttacgtggagttccccaaagcactcttgccacacccaagcctctgggtgacctcggctggctgttgcttggtcctgagcttgggttcctctggccctcgtggagctgtgttgagagccctcagtatcccatgaggcagggactagcacccctgtttgcagaggaagaccccgaaactcagggagggtaagtaacctgcccaaggccatcgatctgcgaagtgacagagccagagtctgaaccctggtgggttgctccagggcccaaccttgtctcctccctgctccaccactgcacttgcactgaccccagtcctcagcgtagctccactgggtaggacctgacctgggatggccctgggggcgcctctttccccagcaccgcaagtctggggagagttggagaatggggcagaccagggctgtggtctcccccaagtccctcccaaagcctctgcccaggtcttccaggtcagggtgattgggggcagggcccatgctgagcacattagggacttgggatcagttttatggccggggcaggtggcaaaggtggcttcttggaggaggtagcagagcatgagccggggctgcagtgaggtgtccttcagcacccccagacccgttgctgtcctgtctcagggccagggttggcaacacagggctgtctgtggtgctgagaggttgacggtggccagaagcagtggagataccaggcctgggtggctcaggcaggggtcgcctgccagttgcccctactccagggtaggtaaacttcatctccttcaaggtgaagttgttacaggctaccacttgacctctctgagcctcagttttttctgtgtgaagcatggaacactgtctttgaggggttcagtgagacccagcttagagtgggaaggggacaggcagtagtgctcagtgaggagggttagggagcctcctctctgcccgagataactgtctggtctcagacatccctcctctagccccagactcggcccaggaagtggggcaaggattgcacctgtaccatacccagactgggaggagctgggtgggccaggtgtggccacctcagcccttttcttggcctcaaggggccaatttagcccccttagcctcagccccaccccatccacctgagccactgaaacccaggcctggtggcagccaggaggtctgaggtgcagaaccatgcccaacttctgggggtgttgctgagagtgggctggggagcagctgctgcctggcctcgaggtgctccccagcccttgagggactggtttataccccatcgtggtgacctgggagctcatggctgcccagggctgtgggagggggcaggagtggagcacctgtctcactgagtggccctgagccagcctctgcacatctctgagcttccagcagcagccctagtaagctggggttccaccctgggacctctttttccccgctctgggaattcccagacttccccggtcttcctgcctctttcagttcacagctccctttcctgccagagctggcacagactagaacaatatgcaaatgagtatagatgcaggcaactcctagaggccccatgggatggcggtgcagacagcaccttctcctggggccctcctgggtccttagtaacagaccctcagttgagccacctactgggtgctactagcttgctagcctccaccatcaggttggcaaacactgcaaggacatttactatgtgccaggtcctgggctaagttgcagggcaaaaggaggcagaaaagagacagtcctgggctccattcctgcttcatctcttactggctgtgtgacccccgccagtgacctcccctgacctcagtttgcccagctgtgaaacaggaatgctcacttctcctgcaaggaaaggcagcaacccaggatgagggcccggcctgcacagggctggggtccattcctttccctgtgagtgtggaagagggaaagccactcagcgtggtcgctgccctacttcagccccacttgccagggaaccgctgggctccttgctaacctggatttctctgttgatgggtggcctttgtcttcctgccttgggtgtggccaccgccaagggaggcctgtgtccagctgtgtttccaggcaaccctagcctctggaggccagagggaggtccacaggctcaggagccactatctgggaagcagagtagctgcctccctacctgccctcctccaggtgggcaccagcccccacctccatctcccccagtgcggcctctcttagcaggcagcctggggagcctgctgagaccgaactgttcattcttctccatcccttgcttaacccttcctggctcccataggccctagggggaagtgcaggctttttggcaggcagctgagccttggtgtgacctgagcactgcccaccaaccttcccagactcctccagactcctcccgtcttctccgccctcccaccctccagattcccaccagggcgaacccagcaccgcctgtataccagactctgtgccaggcactgaacgtaaataaaaggtttgtgcccttctcctccacattccacacgtagggaaactgagtcacagtgaagtgtggggaatgcttactctgtgccaggcctgtgctgagtacttaatgtgattctcttctttcagccttaccacagccctctgcaggcaggccacagagccagtgcaagacagagcagagcaggactgcaccccatactttgtatccccaggttagcccaggggttcagatctgggttctgacccaccccagcctctgggctccttccccctcagcctgctcactggctcttctagctcggcatagctgggctctctaccaagagtgccttttctgccttctcccccaaatcagcccatacccgcccaggtcggcactgggcatggagcaggcagctcgtggtggggaaagggctgggtaataggatctgcatggcaccatgaatgctgagggggaggtgggggagagggtacttccaggaggaagtgacttcgagctgagctctaaggaagagtgggtgctggccaagcgatgaggggagagcagaaagcaggtgcagcgtgtgtgagggtggaaagcactcagcgtggcaggcgtgtgggtgggggaggttggtgggggcgcgtcacgacgccatcctgagggtggtgggagctggcccagggccagggccagaactgggtgtcagggcacctaggctgcagggcgggactgacctggaggccagagacagggcaagggggcaagagcaatgggcgcaggccttgggagagcttagggactgtagggaaggggagggccctgcctaggggagggggagtggcgtggcagggcccgggtgaccccagcgagcttcagttctgggaaaggggaagctgcctgtggcctgggctggtggcacagcttcctctttctctgaggcctccaggctgcacctccctggggctccaccatctgtggcctcaatcgtggtctggggccctcagcttgggggtctggccgtggcctttgctagttggcttttctccagggaatttctggttctcattgttcgggcatttttttggagagctgagtctgaggaaaccctccccgcctcgtgagcctgcttggaggcctcccgcttcagacatggggctgggtgtggagttttgtggcaaataaaacagacgtccctgccctcaccactgtctggtgggggagcaaggaataaacaagtaagcaaacaaatacttaatcacagccctctgccagcagggcagaggagaagggctgtggagaaggaaatcccatgacctactttagcttcattacctcctttaaaccccatgactggctgggcacagcggctcacacctggaatcccagtactttgggaggccaaggcgagaggatcgcttgagcccaagagttggagaccagccagggcaacataatgagaccccgtctctacagaaaataaatttaaaaatttagccaggcatggtggggcatgcctgcagtcctagttactcaggaggctgaagcaggaggatcacttaaaagttcaaagttgcagtgagctgtgatcgtgctactgcagtccatcctggatggcagagtgagacactgtctcagaaaaaacaaaacagaaattccccaaaaacttcgcgacagccatgccagcaagatgaacgtccccatctctgtagatgagaaaactgagacccagtgatgtgaaggtcccaaagggagttggtggcagtggagactgggccccaggctaggagacatgggaggagtggcctctaagccaagttccttctctgctacccccctggggcccctcctccccatccagtgtggctgggtgtggctctcctctgtcaggcatcggaggctctggggcctcactgactgcccagcctttaggatgaggcagagacggatatgggaccttcagatatcccctcccagccgagggggcttccatctaactgtttttttggtcacggttccagggccgttttagacagtggaggccttgtggggcagggtgtgaggggtgctgagcagcaggtgtggacatgtgtgtgcaccaggcctttctacctgaccgggcaagtccagtgggggctcagtctgggctgagtgtgggggccgggcagccagactggagtaagtgctggtttggggtaatgagaaggtgcgtaattagaaggtgcaaggccctaggtggcagtgtctatgcgtgtgctggagtgggccctcgttggctttgagtctgggcctttggaccccgctttcttcctggaaggttctagatcacacagctctgcgtctgtctgcagatgagcagctgcacagctgctccctgtgggctcaggtcacctagcaggtgccacccagggttggggtggttctagggctctctgctgtggttgcttggcctcttttcacccccgcatcagccctctgggcctaccttggggacatggagggctgctagagctgggggctgggctgttgggttggtcacggttccccctggctttgtcttttttttttttttttgagatggagtcttgctctgtcgcccaggctggagtacagtggcacaatctcggctcactgcaacctccacctcccaggttcaagcgattcccctgcctcagcctcccgagtagctgggattacaagttgtaccaccacactgggctaatttttgtatttttactagagacggggtttcagcatcttggccaggctggtcttgaactcctgacctcgtgatccacctgcctctgcctcccaaagtgctgggattacaggcgtgagccaccatgcctgccacagcctgcccccacccccagcatcaggctctgtcttgcgtagtcaggcctagtggggaagtgaagcctgaggacttggggctcgtggtcaggtctgtgggttagatccctcaaaggacagaggaggggccatggggagacaggctcgaggtgggagctgggccctgacaagggcacaggacactttggggcagaaactggaaggaagacttgtgaccaaatttaaggagtgacaggggaccctccccaaatagcctgggggtgccatctgttgggtgttgactgccaggtgtggcctccaccctatactgtggccctaccttctcctgtccctggctttcccctgagctggcctgggacccagagtggctgccagtgacctggagagtcctgagatgatgtaactgctgcccactccctcccctgagtgtaactcaaaccctgggcccctctgagatctgccaagagggagggcgggtggacagatcggtttcctgggctgctattctaggtgggagggccgggctgcctgcagggagaggactctgagtgatttgggactaccacaggaggcgcttttctcacctcaccggccttggagtcacagcgggggcctcagccgcggcggccctgagccagtggctgggttcccaggctgcccctgggcttaagaggctgcgtgtggcctgaagagcacggctttcctcagcctcgtgcccctgaagccaggcctccaggaagtacacagcggacttccttgctctgccacctgtcccttctgctgtctgatgtgaatcctttgtcctgctgtgtccgcctcgtccactggccggaggcttctccagagcaggccaccgtctgggcctgggggcctcagtctcagaccggtgggccgtgacgccaccatggatatttctctgaagtatcacacactgcactcccactctgctttatttcgtttcttggcacttaccaccaaatggcaggggcacctctctgtttgcagttgggtctcccctgggatggagctccctgcagacagggaccttgtctgtcttgttcataccgatttctccagtgcccgcacgcagtaggtgctggagagatgacaaagacagagcactggctgccgtgaccaccccagccccataggtctgccaggggaagagctgtggccagacatgttccagcctcaagggaggagtcagcctccctggaagaggtgtggacagtggccatgcagaaggaccaggacctagatggggtggggagctgtgggagccagacccactttggggaaagcttctagagaagcttctggaaagagaggccttcgtgttgagctttgaagggtaaaggaaaaggccttccttggaccagaaccagcaggagtgaaggcagaggccgggcatgcttgcagacctgtgaggaggaggcggggggagcctgagcctggagcgctgggctggagtgtggaggccgggctggggtgttgggtgttggttgcaaccctgtcatcacggacacaggccgccacacgcgcttccttcccctgctgatgcctcggggcacctggcagtttaaggaaggggaaggaagcccttcctcctctgggaagcctcccagcctgcagagccttcttcctgccttcctgcctgtgctgccccgtgaggccggctcccaggcagggcagccccctctgcttgggcctgtgcttgcgggtgtggagccggcctccccgggctctgcctgcccagcagcaccttgcctgctccccatgagtcctgtcatcctggaagtggtgctgaggggacagcagctgcctgcctgtccctgccgctctgccgagcctcctctccatctgccctaggccggcgaccaccaggggcctgaggatgaagccaagtctgctgtgccggcccctgtcctgcttccttatggtgagctggggatgggccctgggaaggagaaaagccgcaccctcagccctgcagccctccagcaagagggtgcagacactcccggggaaccccctgctgggcagggctcagttactcagctcgtcaagaatctgaggcagctggaccctaggaagcacctctgggcccacccaggcttgtcagggagatggagaatgaagggcttgctggcatttatgggcaaggcaggcatggctgagggcaagatgcccattggcacgcaggcatgagaacggagcccagcccagagggtatgctgggcaccaagaggaaactgggcaaaagaggcctgggatttggaccctgagagccatagcacctcaggtgctggggttcaagatctgtattggtctgggggatcccagattccaggtcccaggatcacaggatcaggccagctgcccggagctgcaggcaagtccacattacagacttgcagcatcttggggtctgccctggggcccatctttctgctgtgacgctagaagctcagggagggtgagacttggccttgggccttgctaagggttgctccatgtacaggaggccttccagccttagcaggtgctgggagccgctctggggtctgaggagatccctattccatctccagggcagctgatggtagcctcatccagcctaggccaaattgggggactctaggagggattcaggagagacagttcattcctaagaatgggaagcagagagaactcctagtgaaatgggctggggacacacactgagaagatggagctttcttttgggatgcgtctccctgtttgggtgtgtgggtgtgaatggggtagcctcgccttgagggaagattgcagaggaggatgtggtcctggagactttcgctgaagggagagcccagaataggaagcgccacctgcagacttggctccagggattataaatgaggctggttaatgatatgcccagctgtgatggggccagggatggacccaaagtaggaggaagtgggggcagaatacgagagaggattcggaagcatttcctcctcatcgttctggttagctggaagggcttgagatcctgatgtggccttatctggggctttccagcactttccagagccagatgtggctctctccttgcccaggtactggtcttgcagcaggtctgggacaggacaggttttcctcagtgtgagggattgaggttagaagagtgtgtccctgaagcccgggtggggtagtcagtggtccctaccactggggtttcaggaaataggtgggggatagatgaccccagagaccccacacccagcactttctgcctctttcaatgcctactgttcttctagctgctgccctggcctctcgccaccctgacatcaacaaccctttggcagtgcccacctggggaggagcccgacctggtgagcattgccctgctctcctgcctgtcctgggagggccctgagggccaggggcagagtcctgtgcctggcccccaagggtcctcaggcttggctcctggccatgctctcaccctttacctcccacaggacccagggcagggcacattatgcaggccctgccccccaggcaccttctcagctgcatggggctccagcccatgccagccccatgcccgttgcagcctttggaggaggctggaggcccaggtgggcatggcaactcgagatacactctgtggagactgctggcctgggtaagccaaagggagtgcggggagggctcctggctgggtgaccaggactctggatcctggggccccagccttattgtaccctgagcaggcctcattcttcccatctgtgaaatgggatggggcaggaccacggagggtgcctggtaggaaggaatccagcctctcctaaggatagtgtttggggaaacttctgggcctcagtggtatcttccctcctcgcaggtggtttgggccttggggggttccccgcgttccatgtcaaccatgttcctgggcacctctgggtactcatggctgtgatggtgagtggcagactggggctaggactggtgcaggggtatgtgcgggaggggccagtgagttggagcccagcagcctctgcagtgttcatgtgggggcagtggggtccttcttccagcccagggcagggcgtgcagccaaagggtctccagcagggcacagtcagccgctcccctggctgtttctgcccaccatgcttccgagtggcagagagtgtcctgcagatggcagccacagctgggggctggggactcacatactgacctgtcccctgtccccatcccttcaaagagattcatgccagccaagtgcagtggctcatgcctgtaatctcagcactttgggaggccaaggcaggaggatcactttgagaccagcttgggcaacatagcaagaccctgtctgcaaaaaataaaaataaaaaattagccgggcgtggtggtgctactcgggaggctgaggcgggaggattgcttgagtccatgattttcatgctgcagtgagctgtgatcgccccactgcactccagcctgggcaacaagtgagaccctgcctaaaaaaacccatgcagatgagtgtgcgcatgcaaacactcacatacccacacgcacctcctcccgccactgagtcagtcaccccctgaggcactagattcatggccaggccacagggaggcagatcccacgtccctgtgcccagacatgtgtcctgtgtgccatctcttcaccccctgaccccagcgtgaggggagggtggggctgggtgtctggccgtcctgaggaggccttgttcaggacaatgcttcgatggccagaagggaaaacaggagggcagtgggttgacctttgcatccccagcatggcggggagtgggctcccctgggcacattggctctcctgcagcccccactgactcgggccctgggcccctgtctctctgtgtttgtgtcactctgcttttgtcctgcctccatcgtctgtgatgctcagagtgggggcggcgggcccgacgtggcgtggaggtggcagcaggggccagcagcggtggtgagacacggcagcctgggaacggcacccgggcaggtggcccagaggagacagccgcccagtacgcggtcatcgccatcgtccctgtcttctgcctcatggggctgttgggcatcctggtgtgcaacctcctcaagcggaagggctaccactgcacggcgcacaaggaggtcgggcccggccctggaggtggaggcagtggtgaggcccagctggggtccaggtgggaaggacgggggcacgagcccagccccagctccacttgggggctgccagcggaatcctgcctggcctctggggtctgagagggagaggcttgggaggtgatagctgcagactgacaacatgggaggaaaggtaaggggacgaaggtgtggccgtgggggcagagcagaggtggcacagctggtcaagtggcttcagtggatcctaccctgggtgaagccttgcccagatgtggggatctggactctttggaggccacagttgtgtgtatggttccagggtcggatggtggccttggagttactcaaggtgacctctgacctctggcctggagtagcaggagtgccctgtggcaggagggctggcagggcagctgtcctgtcctgggcaggcaccataaggggctcgggttttggttccaggctgtagtttgagttacaaggcctggaaccggagggacaggcatgcgccaccaccttcacccccagggccccgggcccctttccttcttccccacaccactactcccctgcagggcaggggcccactcgcacacaccctgccctgggcccatgggagcctgtggctacctcaagagtgaaatggcatctcccatgctagcaccctcggctgtctggggctggcatgggagccagagacccttctaagtcctgacactgaagtctggcgggggcaggaagcggacaggagcagtaagccggcaggaggaaacgtggtgactcagggccattttgcctgggactgtgcttgttttcctagagacttccctttaactgctggatgctgcctgggtgcaagtcctgggagctctgtttgctgctgggcccagggctgatcatcgtggcccattctcacacccttgagatttgggcccaaagctgactaggggcactcagttaaattgttacatagggcacagtagagaggccatggaatagcagtttgctgtagatttggggagttctgggtagggtggcagcccacagctccttgaggctgaggaggagacagtgcagacccagaagacgctgacgcaccgccccctcgcccgcccaattcaatgactggagttcacgtggccctgaagcctctatgcacccgggctgttgggtgcaggaagcactggtgttgaatcatgaaggtgatatgggcttctctgagcctggatcccacatttgcagggctctgggaggcttgtcacctaaatgcacatgctcagggcccttaagaaggccagggttgccctctgctggcagatcatggtttagctcaggagtgcggcttccccctcttccccaggatcagggcccttctcttccccaggaatcaaccctgcctaccggactgaggatgccaatgaggacaccattggggtcctggtgcgcttgatcacagagaagaaaggtgaggagaaggtctgaccccatcccagtgcccaggagaggagggtttcctccaggagcctgtgaggcagccgcggtgggcagagtcttgccctgctctgccttccctgccagggtgcctcaagcagcctggtgctctctgacccaggagtgcacacctctgcctcccattcttgcctgatgaagtgggaggaaaaggcgcacagcccaggctgggagtggtggtatggagggtaggtggggggttctctgctggggcagggggtgggaggtgtgtcccatatggccacagtgagggtctgactgcagctacccacagagaatgctgcggccctggaggagctgctgaaagagtaccacagcaaacagctggtgcagacgagccacaggcctgtgtccaagtgagtgggctggtgggagataacggggccaaaacctacattaaccagcctgcctcctggggatctcccacttgggtctccctcaagtcaccctgttccctgctggggtctcctgcccctggcctggcctatggccacttctgcctgtgccccctgcaggctgccgccagcgcccccgaacgtgccacacatctgcccgcaccgccaccatctccacaccgtgcagggcctggcctcgctctctggcccctgctgctcccgctgtagccagaagaagtggcccgaggtgctgctgtcccctgaggctgtagccgccactactcctgttcccagccttctgcctaacccgaccagggttcccaaggccggggccaaggcagggcgtcagggcgagatcaccatcttgtctgtgggcaggtgagatgggcacagatgcagcaggggcaggtaaagacgtgacagcctgggggccgggagggggaggcagggccccagcttgggccctgagcaccctgctcaatgggagccctgcccttattgggcctctctgggcagtggaggcggccagagagatcaggactttccggttatgttgtgtctcacatggagcccttgcatccctagggcagcatcttggcccccatggcacccgggcctctcaggctaaggctctggtccatgaacttgctgtgtgaccccgggcacgtgctgccttctctgtgccccgggatccccgctaacggggatgattgccccactctcctcacaggttccgcgtggctcgaattcctgagcagcggacaagttcaatggtgtctgaggtgaagaccatcacggaggctgggccctcgtggggtgatctccctgactccccacagcctggcctcccccctgagcagcaggccctgctaggaagtggcggaagccgtacaaagtggctgaagcccccagcagagaacaaggccgaggtgagagtcaaggagaaaggcatctgttggcacctgggccaaccctgaccgaagacggggcaggggtggaagtgcagcgggccctaggcaggggccactttcctggagccagaagccagcccctgactcagctctgacccctcacccctgcccaccaggagaaccgctatgtggtccggctaagtgagagcaacctggtcatctgaggggcggtctagtctaaggacactgcggccctgccctgggaggttccgaaggcttcctggaggaggtggagctgcagctgggactgtgaggaccgagaagcaatggcccagcagacgagacagcaaagaccaaggcctggaggtgggagcgtctgccccagtgaggaggcaggtggccggcgggcactgtgtacaggagcaggctgagccccgcccctggccctgctgccatgttgctcccctgaaggatgccccgacccccgtgcctgccctggctggatcctaggagcccacgggattctctgtatcatcagaggctgggcttggcagaggggaggggcctgtgcccgtcacccctggccccattccttggtaattagccacacccttgcctctgtacagggccctagagcagatgtgcgtccccctcctcttccagcaggtctataaagggaaggggtagcagaaagtcctgggctaggagagtgagtccctgggttctaatcttgggcacatctgtggccatcgctgggtccatttttctgactgtgaagtaaggagagacgtctcagtacccagggcctcttcagctctttgtaggttctgggctgggttgtgggggactggggagctgggctctaccatccctcccattagtagctttatccagccccgtttttgctgcttccagggcctctgccttcaaggcccccatggggctgtccatccatggctctgcctacggaaggggcttaatgcatgtgcctgcccctcccccagctgtttttaatgaaactgaaaaaatagacttgatcccggcaggactgtgatacagagccctagcctgcccagccagccccaagatctcaggagctttagggagaagacttggtggggctggagcacaccttgggcctcagtggtttctgtgtccctgtggtgccagtgcttctgggcagtgcaggcggctgccaggcccagccctgacttccactctggctcagcaacctggttatttatgtggggccgtgcaggcatgggcccactgcctgtccatcctgtttctcttatttattgaaactcaccattgccctatccttgtgtctccacccccttccatgtgttgaataataaaaggtgggaaagtgctgtcacgaggagctccttttctctgtgcccttcccagcttatccgcctgttccacttgtacctgtccagccctgccctgtgttgggcaccgtgacaggctgccctcccctcacagttcctgcacctcagcagccagggaagcagggcccagaggagacccatcaactcatctggttctcaccaaagcccctagctagaggcagggctgtcccacagaaatagtgtgagccacatatgtgactttaaattttctgacagtcacatttcaaaaagtaaaaagaagcaggtgaacttaatttttttttaacccagtctatccaaaatattttcatttcaatataaaatcagtataaaaagtgtgaatgagctgtttttgcttttgctttgaaatctggagtgtatcttacacatcttgattggaactcaaatatttcaagggctccatagccacgtggccagcagctaccacactggtcagcgcagcacctgaggaaatgcactgtgtggagcccgggaggtaattgggggtgaggaagatgtgcgggccagggaatgtgttccacagagagggacagcatgtgcaaaggctgagcaccaacacatagtggtcacctgggccttatgcccagggagcctccaaagcattcagctcctgcttggccagtgtggagaggaaaggagccacaggagcgggtgctacacccggcaagacagagcgtctccatctaaaattcctagggcaagcttccaacccggcccaagggccgcatgtggcccaggatatggctttgaatggggcctaacacaaattcataaactttcttaaaacattgagatgtttttgcttttttcttttctttttagttcttcagctattgttagtgttaatatgcggcccaagaaaattcttccaatgtggcccagagaaaccaaaagattggacacccctgtgctagggtttggtaatgggaaatgggtcgggggcttagggccagctgggtggggcaacaggagcagtcctgggggcacctgtgacacagccatggaggatgtcccatgccatccagatgtgaaggcccagagctctcaggagacagacctggagacaagaagacctacaggcactcaggtgggtgtttaggccaggactgggctgggaggaaatgtcctggggacgatgcctgggctgctccagggcaccacagagaaggcactgctagggaggcaggaaagaaaccagggagggcaacgtccgtggcagtgtcctggcagccaggggaggggtgggcgcagggtgggctgcaaggccaggtgctgctggggggtgaggaggactgctctgtgccctggtgagtggcacaggaacttggtgggattcgcctaaagggagaggggagaccagggccagggccaggtggattgagggagacagctccctgccgaagcctggcaggccatagctgggtggggcctcaggctctggggagagacaattttcagttaatttagggttttattgtttgttatgttgtctaaagacgggagagagggacacatttaaactaacggcctcagagagaggctgaagaacaagagtgacacctgatggaacctggggaggtgtggagaggaccagcctgtgggagtccccggcctgtctgcagcaggcacagggcagctatggggcggccatgctggggctgtcgggaggcctggcttcacagggggcaggggcctttctcctgagcagaagccaagctgggggcctcctcctaccctgggcagatgtgctttgggatttgactctccttgggtacctagggcacaggtgtctctctccagggcttttcaggtgggcaggaaggggagggacacctctgaagatccaggagatgtttcacctgcaccagaagaggggaaggaaacagaggctggacatcaggagggatgttctggagcagaaaaggatgccaaagtgtaggacagggtgtccattgtaggggactagcaggcatcaccagtgtacccaaataagtatttcctgcggctgccagagtgtgtttggagtccctatttgccagctgctcagctgcatctcagggtctggcctctccaccttgactggccctcagcctccttccccaggggaaggctgggctgtggggtctagatgccctctccacagcctgcctgtctcgcctgggcagaggtacatacacatgcaagccagggtgcaccaaggctgggtgcaggcttccaggccagggctgagcgccccctcacagtaagcactgtgctctcctccagactccccctccccaatttctgcttgctgaaaggtgtggccctggcctgtttcttcacctgtcccttggggtattgaggctagcttgcaagagtgggatgaagagctgagggctcaagtaggagtgtgtctgatgcccttggtcttcagggtccttaccctcacctggaagcttttctggcttgttccatctaaatccctgaagctttgtcagcgcttgagttcaagaggcccacgcggaggtgggagctggaggacagggtggggttctgggctgaccactgaggggaagagttctgagcttgacctctgtgctccacccctcttccctatgggccagaatggtaggggctgggacccaagtctccacctcccctcctgctcctggccctcagctctgccactgtgacctggagctgagcctccctctgggagaaaatcccttcctgcaccggagaaactgactatggtgactcagccccaacaatgcctgtggccagaggtgccccctcggacactgggggtgggtttcatattggatcaaggacaggaagggaggctgggtggaggcacacggtgagatttggtgagaggcattagagagtaaggaggcctaaaagttttcatttcagctgcagtgtgagccaagctacttggcctcttttggcctgtttcctttccaggtgaggaggctgagttcttggaggtatagctatggggatgtggagcatgaactgtaggggcccggccctgggaaggaatggtggacagataacccagtaagagaagcctgggcctgggctagggcagtggcttcacccagaggggagataagagattcagatgatgtttaggaggcaaaactgatagcacttgatgggactgctttggatgaaggcgccagagcctccctcagctgtcctttttctgtaaccacaaaccaccaagtgccccttggtttcccatctgacaaatccatcttttaagaaagctcagggcgctgggttcagtggctcacacttgtaatcccagcactttgggaggctgaagcaggcagatcgcttgagcccaagagttcaagaccagcttgggcaacatggtgaaagcccgcctctacaaaaaaatacaaaaattagctgggagtggtggtgtgcgcctgtagtcccagctactcaggaggctaaggtgggaggatcacttgagcccaggaggtggaggttgcagtgagctgagattgcgccactgcactccagctgggtgagagactgtctcaaaaacaaaaacaaacaaaaacaaaacaaaacaaactcgggccttgcttgctctgagatgggcagaacatggggcttggtgcgtgggctatggagccagaacaagtgccaaatgtgagttctaactctgcctctcaccagctctgtaccatcggccaaggtacttaccctcctcagcttccccatctaagatggtgctaacaacagggctcacctcacgtgtgctgtgaggaccgaatgccttaacaaacatgagcagcaggcaccagccacacaatagatgtcagctttattgcgcggatggctcaatggatttcaactctgaatggcctcactgtgctcccacatcacacacttagggtgggtgctgaagttgccacttaaagctccccagcagctgtgagacccttagggcagacccctgtcagatcagctgtaagatgtaccataggtttttcttgactactgagaacaaatttagcatcaacttggggagacgcccaagggactcactggcccaggacagtcctctgtgcctccctccccaagaaccactcagtctagtcacctaagacttttttttgggggggaatttttttttttaatagttattgagtgttctacagcttacagtaaataccatagttacaaattcttggcttcaatctttcagagtgatcactgtctgatcttcaaaacaaaacaaaaacccaaaagaatccaaaacaacaaaacaaaaccagatttacacttcatacacacaggcaaggccatggggctttccaatctttacactccggactgtgttttgaaaacacctataaattctttgatcaaactacttggaagacactggtcaaaggtttattattattattattattattattattattttaaattttatttctttttaaaatgtgagttccaataaaatttaaaaattagattccaacctgtagattaaaatgaattaaaaaatacaaaatcatatacaacgctctcttcacagggatgttacatgccatgagaacaggtttctctgtcatgtgatatgaaacagggaagcagatgcctttaagtcaggatggggacaggcccttgggcctttcaagattattacagacaactccaagtagctagaggcctggccttaccccccctgggtaaggaggagcttgagtcacaccatagatccagactatctggctgacccgaggagaaggtctctgggacagtctcctctctttccctgactctcttaggcctgaggagaaaggctggggtctggagatgctggtcttgctggggtcaggcccaaagctgatctcacccatttgattcctatgggccggtactttgcaaagctgttacatctgttctccttaggaaggaaaatccccctgctatcagtggctggaatgggtagaggacctctaccacagcaaggatatccagggactatccatgtggccatagggaagcaagtgctgttttgtccctttctagctttgtggcagccagtcccaactcctgtgtgcctcggttggcctttgggttggactcaacagcatgcaccacagaagatatccactggagagactgagggactgggacccaagtctggcttaggcagggctggccatggaatgttgaagctggcctgccaggaattttgaaggctgggtcctggaaccatataatgcctaatttcagaaacgaggagttttctaggaaaggggcagataagtaaaggacaaaccctgcagcccccttggcatgcctgcctgtgcgctcagaggctccggtgtggaatcccatcagttagtctggcgtgtttcttcagctctgcgggtgggtcccaactggcccactctactactgcccctctctggattcccaagcttggcaagcagcgggggccgcacagccagtagtgatgtgggagaatacaggatggaaaagcagacttccacgtattttcacttaactgcaattgaggaggaattctgatacagatggtgatatataagacaaagttcacagggcccagaatggggcccaccccctctgggcacagaacaaagctgaggaatttgatatggaagctctgagcctcgcttagtcagtgcctcgctgggaacctggatgagtcctatctgtatgaggagccaaaacttggtgaccaaggggcctgtccttttatacttcatgtgattcctttctgaaggccatcagaacaaagcaagccctccaaagaaggacccccagatctctgggaacggggtacctcaaacttggaacaattcgggtggccaggggtaaggatgctcagagtctggttctggtcctcacccatgggaaaagcaagcccagggacttcagtctgtacgttttgtaccaactcactggatctggacagtgggcaggctctcagggattaggaagccaggtgtgcaggcttaccaaggacatgggtctcccaatagaaagatgcctcgtgctgtccttgaacatgtcttcggtcctgggcattgtgaccccaaagtgttttgtccaagtgaggcctttagttgcaaattctcatcctccttgtgctgccagttagatgtgcctctgggtccctccccagggctcattacaggtcctggcccaaagcagttcatacaaatctgctcagctcagagactgggcttcccagctctataaagtacagttagcccctccctccatgcttgccaagagacccagcaggtggcagcagaaagagcagaggatttgaagaatcacttccaagctgtgtgaccttttagcaagtctcaagcctcctgagccttagttttttcatctataaaatggaggactttggcaaccaatgtcaaagtactttgcataccaaaaacgctctggacaggtgtgtgtgtctctgctaaatattcaggaaagaggatatacattttagggtcattgccaggtaagaaagaacagcaactgtcctatctcatgaggaagaaattaaatatgcattttttttcaaaacatggcaaaccattatgtttcaggctttcactatttgcaggcaatccagctcccagactcaaacttcttgaccccaggccagtgaggagagggggtcaggtagaagtagaagaattcaaaagggttggctggtaacgagccatctgtacccctgatcctggccataggtgttgcacttggggagaggcagtggcatgaggaggagagaggggtttgcatcctggggccagtgctgtagctcactgtcaggcggctacatcccttgtcctctcttgcttgcctgccttcaatgagacggcccttccagctctgactttttgtctagcttgaccaccgtgccatctagaatctttggaggtatctacctatggtacctcccactagatctctgtgaccttaccagtaactgtgcccatcctaccagaggcacatgactgtccccgctctcctgggctcagtccttttgcagtgactccccaagcttggctaggcttgtggatctccatcacagcaagaggctgaggccggctgaactggggctcatactgaaaaaggggtgctggacctgggctcttccagaccacagcctttcagtgccttattttcaccttggggcccccctttgctcttgaattacatagtaggtgctaagatagggcacagagcacagatgcttcagtacgtgagcctgtgtggggatcagatggaggggaacgagacagcagacagcctgggattcgagtggctctgtcacttattagcaagtcacttgacttttccaagccttgatttccttatggatcaaataggagaaataacctctatttcatcgggttaaaccagataatttatgttcaactgttctgtgaactgtgaggtccagctgttagttttacttactggtgttgaaagaacaaaagttacaaggtcattcctaggtctcctcttcttcctttctcctctctgtggttccaccccagcccacatggaggcagcagggttctgggaagcctagcggataccagcatgctgctcactgtgggcctgttcccttccataacctgtttcctcatttgtcaattgactgtaataactctaaccctgtccctctcagggcgagtacatgaaaggccgtgaagtgctttgacctctgtgatgcacctgacaaatccaaaggtttctattattattatcattattattattttggcatttttcaaacacgtatgacataatctagaacaaccttcacccacctttacaaaaccaaagagggtggaaggaggtatttgcaaaaagtgaattaacactggaaaactttctattgttttaaagtgaaacctcatcagcacccagaacagataatttagaacagctgaattttttcttactggtcctaaagttccttggaagcccaggaaggtgggcccccaaactcctggctctaggccaaggaggctgatgggctttaccctcctgggaatggctagacagcttctgagctccttccaacccaagggtttcctgatttttccctcccttagggagacatgggaggttggggtaaggatatgtccaagtttgcatgaattttaaatgaaagcagttttttaaagtcccaaatgttgtcaatgatcccattttttacaataaaatgttcgtgccccacccccagaggggctgctggcccagccaagcgctgggtgccggaggctgctgctgggcaatccaggctcctggctgagactagcagggacctcctcgtcccaggggtccctcttctcccagatgagcctgtctcctgggcctcatcctcattctcctctcctgatgactcccactgtcttcctcctcttcctctcctctcgggatgaggggctactgtcctaaaagcatggcctctccttttcggccagtccacctgctccttctcctggaggtggagtcaggtacaggacggaagttccagatgtcttcacagaatttccaaatgctatttcttcatttgcaatttctgttcctgccatccgcccccatgtagcctctgcccagtcttcaacccccgcctttggagtccgtggaggaaaagagcagaaacaggagcccagagaccattccagactcaccaggtatgggcgctgccgacttaatttttacaaaaccaagccaatccgtccctaggtaaatttttgtaagcaaggtgcccactaggtaggaaggctgcatttaatgctaatttactgtaaggtctagggaagtcctttccgcttctctgggcctcagtttcctcatctgccaaatagggaaatggatgagatgattgctaaggtcccttcagttccatgagtctatgaaatgtttattgctattgcttttccttcactatcctcaccttcagagctgccagcacccacctggaatgtggttccttcacttgggccatgaatggcacaggtaaccaagagcttggcctgcctgcaagctctatggtcagacaggtgagtcctggcactgggaagggcaaaagaaaagggagagaaatgccctaggttcccactccaatcaggaggaagctcctcatcagagtgggtccatgacagctcagaggctgaagtctggatgacacagggcatccggccttccaaggcctcgggatgctgggatcctaccaccctgcagccgcttggcaggtctaaggacaaaatcaccttttgaggaagtgccaggtcagttaacatcactgtgcaaatcagaaggtccagggccagatgctttggccagagacctttcaaaccaaagccatgaggcaagcaccgctcctcccttcttccctctccttccccacaatgccctccctccccccaccctcccccaaattctaaagacttttttccccaggttctcagcctggggtattaagctgctaataacacgcctacatactcaggtggttttgttcttggtctgttgcaatggttctcaggagacatttcatttgtgtctgggacatgggaatgtcctgaactaatcttgcttaagaaaaaacaaccagaacactcccctagagatgtagcctgctcaacagctctgagttcctaccctggaccacatctgtttatgctcttcaaatggaatccagccttcagatgaaccactgcaataaaccctactctctgcttgcctctagactgggatccccagggacaggacacttagggaagagcagagaggacatggcctggtcaggtaggaggaaggggatagagctggaagggcaggggctaagagggggacagttggggagaggcaggagattagaaaaagcagcttttacaaaaaccaaaaataaaaatcaaaaccattaaagatgcataaagtgacccttgcacttccgttgtctcttcttgcaaatagaggtggtgctgctagggaactgctccagcaccggtgtaagacttgagtagttgcatacaatgtgtgactccagatctgcagagggaaaggggaaagaaacagtgtcagtgatattcaggaggcttctcccctcaactcgggagcccgctgtgccttcctagtgaagctgcctgcctcccgcctgtggaagttgttgtgctctggtgccaagagccctggaggagatgggggaggccagatgatgtggggggccagaggatttcaaagtgacatccctggagccctatggttcactgtcactgcctcaggagctgctgaggggaccaaggaagccagaggtctgggtcagcccaaagcctccaaatagctccaaccaaagctcttaacatatgatctgggcaagagttcatttgaagaatggggcccatagttaaaagaagtccgaagaccataaggtaaatggcacagaatttagtactagagaactgaagtttaagccctagcttaatttttactggctaagtgatatttaactacatatttatctgtaaaatagagctaatgatccttatttcacagagcaactataaggattatgagataacataagcaaagggatagctattattatttctgttattatttagatttcaacaagcagtcaacagaagtgatagctattattaagagtgatattatggaccttggagcaggaaagcaactggtaacttgacagctgttacctgccctagctgacacctgtgctccagacccaaaccagggactttgaggcagttcctgt

SEQ ID NO: 1025 - DNA, 3364 bp, Homo sapiens
gggtctgcgcaccttcccggcccagccggcgattcattcaaaaggcgcgcaggctgcgcggctgtccgggcgctcgccgagccgggccgcggcgccgagtcgaacggggagccgagctggagctgccctgccctaggccggcgaccaccaggggcctgaggatgaagccaagtctgctgtgccggcccctgtcctgcttccttatgctgctgccctggcctctcgccaccctgacatcaacaaccctttggcagtgcccacctggggaggagcccgacctggacccagggcagggcacattatgcaggccctgccccccaggcaccttctcagctgcatggggctccagcccatgccagccccatgcccgttgcagcctttggaggaggctggaggcccaggtgggcatggcaactcgagatacactctgtggagactgctggcctggagtgggggcggcgggcccgacgtggcgtggaggtggcagcaggggccagcagcggtggtgagacacggcagcctgggaacggcacccgggcaggtggcccagaggagacagccgcccagtacgcggtcatcgccatcgtccctgtcttctgcctcatggggctgttgggcatcctggtgtgcaacctcctcaagcggaagggctaccactgcacggcgcacaaggaggtcgggcccggccctggaggtggaggcagtggaatcaaccctgcctaccggactgaggatgccaatgaggacaccattggggtcctggtgcgcttgatcacagagaagaaagctacccacagagaatgctgcggccctggaggagctgctgaaagagtaccacagcaaacagctggtgcagacgagccacaggcctgtgtccaagctgccgccagcgcccccgaacgtgccacacatctgcccgcaccgccaccatctccacaccgtgcagggcctggcctcgctctctggcccctgctgctcccgctgtagccagaagaagtggcccgaggtgctgctgtcccctgaggctgtagccgccactactcctgttcccagccttctgcctaacccgaccagggttcccaaggccggggccaaggcagggcgtcagggcgagatcaccatcttgtctgtgggcaggttccgcgtggctcgaattcctgagcagcggacaagttcaatggtgtctgaggtgaagaccatcacggaggctgggccctcgtggggtgatctccctgactccccacagcctggcctcccccctgagcagcaggccctgctaggaagtggcggaagccgtacaaagtggctgaagcccccagcagagaacaaggccgaggagaaccgctatgtggtccggctaagtgagagcaacctggtcatctgaggggcggtctagtctaaggacactgcggccctgccctgggaggttccgaaggcttcctggaggaggtggagctgcagctgggactgtgaggaccgagaagcaatggcccagcagacgagacagcaaagaccaaggcctggaggtgggagcgtctgccccagtgaggaggcaggtggccggcgggcactgtgtacaggagcaggctgagccccgcccctggccctgctgccatgttgctcccctgaaggatgccccgacccccgtgcctgccctggctggatcctaggagcccacgggattctctgtatcatcagaggctgggcttggcagaggggaggggcctgtgcccgtcacccctggccccattccttggtaattagccacacccttgcctctgtacagggccctagagcagatgtgcgtccccctcctcttccagcaggtctataaagggaaggggtagcagaaagtcctgggctaggagagtgagtccctgggttctaatcttgggcacatctgtggccatcgctgggtccatttttctgactgtgaagtaaggagagacgtctcagtacccagggcctcttcagctctttgtaggttctgggctgggttgtgggggactggggagctgggctctaccatccctcccattagtagctttatccagccccgtttttgctgcttccagggcctctgccttcaaggcccccatggggctgtccatccatggctctgcctacggaaggggcttaatgcatgtgcctgcccctcccccagctgtttttaatgaaactgaaaaaatagacttgatcccggcaggactgtgatacagagccctagcctgcccagccagccccaagatctcaggagctttagggagaagacttggtggggctggagcacaccttgggcctcagtggtttctgtgtccctgtggtgccagtgcttctgggcagtgcaggcggctgccaggcccagccctgacttccactctggctcagcaacctggttatttatgtggggccgtgcaggcatgggcccactgcctgtccatcctgtttctcttatttattgaaactcaccattgccctatccttgtgtctccacccccttccatgtgttgaataataaaaggtgggaaagtgctgtcacgaggagctccttttctctgtgcccttcccagcttatccgcctgttccacttgtacctgtccagccctgccctgtgttgggcaccgtgacaggctgccctcccctcacagttcctgcacctcagcagccagggaagcagggcccagaggagacccatcaactcatctggttctcaccaaagcccctagctagaggcagggctgtcccacagaaatagtgtgagccacatatgtgactttaaattttctgacagtcacatttcaaaaagtaaaaagaagcaggtgaacttaatttttttttaacccagtctatccaaaatattttcatttcaatataaaatcagtataaaaagtgtgaatgagctgtttttgcttttgctttgaaatctggagtgtatcttacacatcttgattggaactcaaatatttcaagggctccatagccacgtggccagcagctaccacactggtcagcgcagcacctgaggaaatgcactgtgtggagcccgggaggtaattgggggtgaggaagatgtgcgggccagggaatgtgttccacagagagggacagcatgtgcaaaggctgagcaccaacacatagtggtcacctgggccttatgcccagggagcctccaaagcattcagctcctgcttggccagtgtggagaggaaaggagccacaggagcgggtgctacacccggcaagacagagcgtctccatctaaaattcctagggcaagcttccaacccggcccaagggccgcatgtggcccaggatatggctttgaatggggcctaacacaaattcataaactttcttaaaacat

SEQ ID NO: 1026 - protein, 205 aa, Homo sapiens
MPVAAFGGGWRPRWAWQLEIHSVETAGLEWGRRARRGVEVAAGASSGGETRQPGNGTRAGGPEETAAQYAVIAIVPVFCLMGLLGILVCNLLKRKGYHCTAHKEVGPGPGGGGSGINPAYRTEDANEDTIGVLVRLITEKKATECCGPGGAAERVPQQTAGADEPQACVQAAASAPERATHLPAPPPSPHRAGPGLALWPLLLPL

SEQ ID NO: 1027 - DNA, 3374 bp, Homo sapiens
ttgagagccctcagtatcccatgaggcagggactagcacccctgtttgcagaggaagaccccgaaactcagggagggccggcgaccaccaggggcctgaggatgaagccaagtctgctgtgccggcccctgtcctgcttccttatgctgctgccctggcctctcgccaccctgacatcaacaaccctttggcagtgcccacctggggaggagcccgacctggacccagggcagggcacattatgcaggccctgccccccaggcaccttctcagctgcatggggctccagcccatgccagccccatgcccgttgcagcctttggaggaggctggaggcccaggtgggcatggcaactcgagatacactctgtggagactgctggcctgggtggtttgggccttggggggttccccgcgttccatgtcaaccatgttcctgggcacctctgggtactcatggctgtgatgagtgggggcggcgggcccgacgtggcgtggaggtggcagcaggggccagcagcggtggtgagacacggcagcctgggaacggcacccgggcaggtggcccagaggagacagccgcccagtacgcggtcatcgccatcgtccctgtcttctgcctcatggggctgttgggcatcctggtgtgcaacctcctcaagcggaagggctaccactgcacggcgcacaaggaggtcgggcccggccctggaggtggaggcagtggaatcaaccctgcctaccggactgaggatgccaatgaggacaccattggggtcctggtgcgcttgatcacagagaagaaagagaatgctgcggccctggaggagctgctgaaagagtaccacagcaaacagctggtgcagacgagccacaggcctgtgtccaagctgccgccagcgcccccgaacgtgccacacatctgcccgcaccgccaccatctccacaccgtgcagggcctggcctcgctctctggcccctgctgctcccgctgtagccagaagaagtggcccgaggtgctgctgtcccctgaggctgtagccgccactactcctgttcccagccttctgcctaacccgaccagggttcccaaggccggggccaaggcagggcgtcagggcgagatcaccatcttgtctgtgggcaggttccgcgtggctcgaattcctgagcagcggacaagttcaatggtgtctgaggtgaagaccatcacggaggctgggccctcgtggggtgatctccctgactccccacagcctggcctcccccctgagcagcaggccctgctaggaagtggcggaagccgtacaaagtggctgaagcccccagcagagaacaaggccgaggagaaccgctatgtggtccggctaagtgagagcaacctggtcatctgaggggcggtctagtctaaggacactgcggccctgccctgggaggttccgaaggcttcctggaggaggtggagctgcagctgggactgtgaggaccgagaagcaatggcccagcagacgagacagcaaagaccaaggcctggaggtgggagcgtctgccccagtgaggaggcaggtggccggcgggcactgtgtacaggagcaggctgagccccgcccctggccctgctgccatgttgctcccctgaaggatgccccgacccccgtgcctgccctggctggatcctaggagcccacgggattctctgtatcatcagaggctgggcttggcagaggggaggggcctgtgcccgtcacccctggccccattccttggtaattagccacacccttgcctctgtacagggccctagagcagatgtgcgtccccctcctcttccagcaggtctataaagggaaggggtagcagaaagtcctgggctaggagagtgagtccctgggttctaatcttgggcacatctgtggccatcgctgggtccatttttctgactgtgaagtaaggagagacgtctcagtacccagggcctcttcagctctttgtaggttctgggctgggttgtgggggactggggagctgggctctaccatccctcccattagtagctttatccagccccgtttttgctgcttccagggcctctgccttcaaggcccccatggggctgtccatccatggctctgcctacggaaggggcttaatgcatgtgcctgcccctcccccagctgtttttaatgaaactgaaaaaatagacttgatcccggcaggactgtgatacagagccctagcctgcccagccagccccaagatctcaggagctttagggagaagacttggtggggctggagcacaccttgggcctcagtggtttctgtgtccctgtggtgccagtgcttctgggcagtgcaggcggctgccaggcccagccctgacttccactctggctcagcaacctggttatttatgtggggccgtgcaggcatgggcccactgcctgtccatcctgtttctcttatttattgaaactcaccattgccctatccttgtgtctccacccccttccatgtgttgaataataaaaggtgggaaagtgctgtcacgaggagctccttttctctgtgcccttcccagcttatccgcctgttccacttgtacctgtccagccctgccctgtgttgggcaccgtgacaggctgccctcccctcacagttcctgcacctcagcagccagggaagcagggcccagaggagacccatcaactcatctggttctcaccaaagcccctagctagaggcagggctgtcccacagaaatagtgtgagccacatatgtgactttaaattttctgacagtcacatttcaaaaagtaaaaagaagcaggtgaacttaatttttttttaacccagtctatccaaaatattttcatttcaatataaaatcagtataaaaagtgtgaatgagctgtttttgcttttgctttgaaatctggagtgtatcttacacatcttgattggaactcaaatatttcaagggctccatagccacgtggccagcagctaccacactggtcagcgcagcacctgaggaaatgcactgtgtggagcccgggaggtaattgggggtgaggaagatgtgcgggccagggaatgtgttccacagagagggacagcatgtgcaaaggctgagcaccaacacatagtggtcacctgggccttatgcccagggagcctccaaagcattcagctcctgcttggccagtgtggagaggaaaggagccacaggagcgggtgctacacccggcaagacagagcgtctccatctaaaattcctagggcaagcttccaacccggcccaagggccgcatgtggcccaggatatggctttgaatggggcctaacacaaattcataaactttcttaaaacat

SEQ ID NO: 1028 - protein, 457 aa, Homo sapiens
MRQGLAPLFAEEDPETQGGPATTRGLRMKPSLLCRPLSCFLMLLPWPLATLTSTTLWQCPPGEEPDLDPGQGTLCRPCPPGTFSAAWGSSPCQPHARCSLWRRLEAQVGMATRDTLCGDCWPGWFGPWGVPRVPCQPCSWAPLGTHGCDEWGRRARRGVEVAAGASSGGETRQPGNGTRAGGPEETAAQYAVIAIVPVFCLMGLLGILVCNLLKRKGYHCTAHKEVGPGPGGGGSGINPAYRTEDANEDTIGVLVRLITEKKENAAALEELLKEYHSKQLVQTSHRPVSKLPPAPPNVPHICPHRHHLHTVQGLASLSGPCCSRCSQKKWPEVLLSPEAVAATTPVPSLLPNPTRVPKAGAKAGRQGEITILSVGRFRVARIPEQRTSSMVSEVKTITEAGPSWGDLPDSPQPGLPPEQQALLGSGGSRTKWLKPPAENKAEENRYVVRLSESNLVI

SEQ ID NO: 1029 - DNA, 3407 bp, Homo sapiens
gattcattcaaaaggcgcgcaggctgcgcggctgtccgggcgctcgccgagccgggccgcggcgccgagtcgaacggggagccgagctggagctgccgcgctgccctaggccggcgaccaccaggggcctgaggatgaagccaagtctgctgtgccggcccctgtcctgcttccttatgctgctgccctggcctctcgccaccctgacatcaacaaccctttggcagtgcccacctggggaggagcccgacctggacccagggcagggcacattatgcaggccctgccccccaggcaccttctcagctgcatggggctccagcccatgccagccccatgcccgttgcagcctttggaggaggctggaggcccaggtgggcatggcaactcgagatacactctgtggagactgctggcctgggtggtttgggccttggggggttccccgcgttccatgtcaaccatgttcctgggcacctctgggtactcatggctgtgatgagtgggggcggcgggcccgacgtggcgtggaggtggcagcaggggccagcagcggtggtgagacacggcagcctgggaacggcacccgggcaggtggcccagaggagacagccgcccagtacgcggtcatcgccatcgtccctgtcttctgcctcatggggctgttgggcatcctggtgtgcaacctcctcaagcggaagggctaccactgcacggcgcacaaggaggtcgggcccggccctggaggtggaggcagtggaatcaaccctgcctaccggactgaggatgccaatgaggacaccattggggtcctggtgcgcttgatcacagagaagaaagagaatgctgcggccctggaggagctgctgaaagagtaccacagcaaacagctggtgcagacgagccacaggcctgtgtccaagctgccgccagcgcccccgaacgtgccacacatctgcccgcaccgccaccatctccacaccgtgcagggcctggcctcgctctctggcccctgctgctcccgctgtagccagaagaagtggcccgaggtgctgctgtcccctgaggctgtagccgccactactcctgttcccagccttctgcctaacccgaccagggttcccaaggccggggccaaggcagggcgtcagggcgagatcaccatcttgtctgtgggcaggttccgcgtggctcgaattcctgagcagcggacaagttcaatggtgtctgaggtgaagaccatcacggaggctgggccctcgtggggtgatctccctgactccccacagcctggcctcccccctgagcagcaggccctgctaggaagtggcggaagccgtacaaagtggctgaagcccccagcagagaacaaggccgaggagaaccgctatgtggtccggctaagtgagagcaacctggtcatctgaggggcggtctagtctaaggacactgcggccctgccctgggaggttccgaaggcttcctggaggaggtggagctgcagctgggactgtgaggaccgagaagcaatggcccagcagacgagacagcaaagaccaaggcctggaggtgggagcgtctgccccagtgaggaggcaggtggccggcgggcactgtgtacaggagcaggctgagccccgcccctggccctgctgccatgttgctcccctgaaggatgccccgacccccgtgcctgccctggctggatcctaggagcccacgggattctctgtatcatcagaggctgggcttggcagaggggaggggcctgtgcccgtcacccctggccccattccttggtaattagccacacccttgcctctgtacagggccctagagcagatgtgcgtccccctcctcttccagcaggtctataaagggaaggggtagcagaaagtcctgggctaggagagtgagtccctgggttctaatcttgggcacatctgtggccatcgctgggtccatttttctgactgtgaagtaaggagagacgtctcagtacccagggcctcttcagctctttgtaggttctgggctgggttgtgggggactggggagctgggctctaccatccctcccattagtagctttatccagccccgtttttgctgcttccagggcctctgccttcaaggcccccatggggctgtccatccatggctctgcctacggaaggggcttaatgcatgtgcctgcccctcccccagctgtttttaatgaaactgaaaaaatagacttgatcccggcaggactgtgatacagagccctagcctgcccagccagccccaagatctcaggagctttagggagaagacttggtggggctggagcacaccttgggcctcagtggtttctgtgtccctgtggtgccagtgcttctgggcagtgcaggcggctgccaggcccagccctgacttccactctggctcagcaacctggttatttatgtggggccgtgcaggcatgggcccactgcctgtccatcctgtttctcttatttattgaaactcaccattgccctatccttgtgtctccacccccttccatgtgttgaataataaaaggtgggaaagtgctgtcacgaggagctccttttctctgtgcccttcccagcttatccgcctgttccacttgtacctgtccagccctgccctgtgttgggcaccgtgacaggctgccctcccctcacagttcctgcacctcagcagccagggaagcagggcccagaggagacccatcaactcatctggttctcaccaaagcccctagctagaggcagggctgtcccacagaaatagtgtgagccacatatgtgactttaaattttctgacagtcacatttcaaaaagtaaaaagaagcaggtgaacttaatttttttttaacccagtctatccaaaatattttcatttcaatataaaatcagtataaaaagtgtgaatgagctgtttttgcttttgctttgaaatctggagtgtatcttacacatcttgattggaactcaaatatttcaagggctccatagccacgtggccagcagctaccacactggtcagcgcagcacctgaggaaatgcactgtgtggagcccgggaggtaattgggggtgaggaagatgtgcgggccagggaatgtgttccacagagagggacagcatgtgcaaaggctgagcaccaacacatagtggtcacctgggccttatgcccagggagcctccaaagcattcagctcctgcttggccagtgtggagaggaaaggagccacaggagcgggtgctacacccggcaagacagagcgtctccatctaaaattcctagggcaagcttccaacccggcccaagggccgcatgtggcccaggatatggctttgaatggggcctaacacaaattcataaactttcttaaaacat

SEQ ID NO: 1030 - protein, 430 aa, Homo sapiens
MKPSLLCRPLSCFLMLLPWPLATLTSTTLWQCPPGEEPDLDPGQGTLCRPCPPGTFSAAWGSSPCQPHARCSLWRRLEAQVGMATRDTLCGDCWPGWFGPWGVPRVPCQPCSWAPLGTHGCDEWGRRARRGVEVAAGASSGGETRQPGNGTRAGGPEETAAQYAVIAIVPVFCLMGLLGILVCNLLKRKGYHCTAHKEVGPGPGGGGSGINPAYRTEDANEDTIGVLVRLITEKKENAAALEELLKEYHSKQLVQTSHRPVSKLPPAPPNVPHICPHRHHLHTVQGLASLSGPCCSRCSQKKWPEVLLSPEAVAATTPVPSLLPNPTRVPKAGAKAGRQGEITILSVGRFRVARIPEQRTSSMVSEVKTITEAGPSWGDLPDSPQPGLPPEQQALLGSGGSRTKWLKPPAENKAEENRYVVRLSESNLVI

SEQ ID NO: 1031 - DNA, 3096 bp, Homo sapiens
gggtctgcgcaccttcccggcccagccggcgattcattcaaaaggcgcgcaggctgcgcggctgtccgggcgctcgccgagccgggccgcggcgccgagtcgaacggggagccgagctggagctgccctgccctaggccggcgaccaccaggggcctgaggatgaagccaagtctgctgtgccggcccctgtcctgcttccttatgctgctgccctggcctctcgccaccctgacatcaacaaccctttggcagtgcccacctggggaggagcccgacctggacccagggcagggcacattatgcaggccctgccccccaggcaccttctcagctgcatggggctccagcccatgccagccccatgcccgttgcagcctttggaggaggctggaggcccaggtgggcatggcaactcgagatacactctgtggagactgctggcctgggaatcaaccctgcctaccggactgaggatgccaatgaggacaccattggggtcctggtgcgcttgatcacagagaagaaagagaatgctgcggccctggaggagctgctgaaagagtaccacagcaaacagctggtgcagacgagccacaggcctgtgtccaagctgccgccagcgcccccgaacgtgccacacatctgcccgcaccgccaccatctccacaccgtgcagggcctggcctcgctctctggcccctgctgctcccgctgtagccagaagaagtggcccgaggtgctgctgtcccctgaggctgtagccgccactactcctgttcccagccttctgcctaacccgaccagggttcccaaggccggggccaaggcagggcgtcagggcgagatcaccatcttgtctgtgggcaggttccgcgtggctcgaattcctgagcagcggacaagttcaatggtgtctgaggtgaagaccatcacggaggctgggccctcgtggggtgatctccctgactccccacagcctggcctcccccctgagcagcaggccctgctaggaagtggcggaagccgtacaaagtggctgaagcccccagcagagaacaaggccgaggagaaccgctatgtggtccggctaagtgagagcaacctggtcatctgaggggcggtctagtctaaggacactgcggccctgccctgggaggttccgaaggcttcctggaggaggtggagctgcagctgggactgtgaggaccgagaagcaatggcccagcagacgagacagcaaagaccaaggcctggaggtgggagcgtctgccccagtgaggaggcaggtggccggcgggcactgtgtacaggagcaggctgagccccgcccctggccctgctgccatgttgctcccctgaaggatgccccgacccccgtgcctgccctggctggatcctaggagcccacgggattctctgtatcatcagaggctgggcttggcagaggggaggggcctgtgcccgtcacccctggccccattccttggtaattagccacacccttgcctctgtacagggccctagagcagatgtgcgtccccctcctcttccagcaggtctataaagggaaggggtagcagaaagtcctgggctaggagagtgagtccctgggttctaatcttgggcacatctgtggccatcgctgggtccatttttctgactgtgaagtaaggagagacgtctcagtacccagggcctcttcagctctttgtaggttctgggctgggttgtgggggactggggagctgggctctaccatccctcccattagtagctttatccagccccgtttttgctgcttccagggcctctgccttcaaggcccccatggggctgtccatccatggctctgcctacggaaggggcttaatgcatgtgcctgcccctcccccagctgtttttaatgaaactgaaaaaatagacttgatcccggcaggactgtgatacagagccctagcctgcccagccagccccaagatctcaggagctttagggagaagacttggtggggctggagcacaccttgggcctcagtggtttctgtgtccctgtggtgccagtgcttctgggcagtgcaggcggctgccaggcccagccctgacttccactctggctcagcaacctggttatttatgtggggccgtgcaggcatgggcccactgcctgtccatcctgtttctcttatttattgaaactcaccattgccctatccttgtgtctccacccccttccatgtgttgaataataaaaggtgggaaagtgctgtcacgaggagctccttttctctgtgcccttcccagcttatccgcctgttccacttgtacctgtccagccctgccctgtgttgggcaccgtgacaggctgccctcccctcacagttcctgcacctcagcagccagggaagcagggcccagaggagacccatcaactcatctggttctcaccaaagcccctagctagaggcagggctgtcccacagaaatagtgtgagccacatatgtgactttaaattttctgacagtcacatttcaaaaagtaaaaagaagcaggtgaacttaatttttttttaacccagtctatccaaaatattttcatttcaatataaaatcagtataaaaagtgtgaatgagctgtttttgcttttgctttgaaatctggagtgtatcttacacatcttgattggaactcaaatatttcaagggctccatagccacgtggccagcagctaccacactggtcagcgcagcacctgaggaaatgcactgtgtggagcccgggaggtaattgggggtgaggaagatgtgcgggccagggaatgtgttccacagagagggacagcatgtgcaaaggctgagcaccaacacatagtggtcacctgggccttatgcccagggagcctccaaagcattcagctcctgcttggccagtgtggagaggaaaggagccacaggagcgggtgctacacccggcaagacagagcgtctccatctaaaattcctagggcaagcttccaacccggcccaagggccgcatgtggcccaggatatggctttgaatggggcctaacacaaattcataaactttcttaaaacat

SEQ ID NO: 1032 - protein, 250 aa, Homo sapiens
MPVAAFGGGWRPRWAWQLEIHSVETAGLGINPAYRTEDANEDTIGVLVRLITEKKENAAALEELLKEYHSKQLVQTSHRPVSKLPPAPPNVPHICPHRHHLHTVQGLASLSGPCCSRCSQKKWPEVLLSPEAVAATTPVPSLLPNPTRVPKAGAKAGRQGEITILSVGRFRVARIPEQRTSSMVSEVKTITEAGPSWGDLPDSPQPGLPPEQQALLGSGGSRTKWLKPPAENKAEENRYVVRLSESNLVI

SEQ ID NO: 1033 - DNA, 1233 bp, Homo sapiens
tcattcaaaaggcgcgcaggctgcgcggctgtccgggcgctcgccgagccgggccgcggcgccgagtcgaacggggagccgagctggagctgccgcggccaggaatcaaccctgcctaccggactgaggatgccaatgaggacaccattggggtcctggtgcgcttgatcacagagaagaaagagaatgctgcggccctggaggagctgctgaaagagtaccacagcaaacagctggtgcagacgagccacaggcctgtgtccaagtgagtgggctggtgggagataacggggccaaaacctacattaaccagcctgcctcctggggatctcccacttgggtctccctcaagtcaccctgttccctgctggggtctcctgcccctggcctggcctatggccacttctgcctgtgccccctgcaggctgccgccagcgcccccgaacgtgccacacatctgcccgcaccgccaccatctccacaccgtgcagggcctggcctcgctctctggcccctgctgctcccgctgtagccagaagaagtggcccgaggtgctgctgtcccctgaggctgtagccgccactactcctgttcccagccttctgcctaacccgaccagggttcccaaggccggggccaaggcagggcgtcagggcgagatcaccatcttgtctgtgggcaggtgagatgggcacagatgcagcaggggcaggtaaagacgtgacagcctgggggccgggagggggaggcagggccccagcttgggccctgagcaccctgctcaatgggagccctgcccttattgggcctctctgggcagtggaggcggccagagagatcaggactttccggttatgttgtgtctcacatggagcccttgcatccctagggcagcatcttggcccccatggcacccgggcctctcaggctaaggctctggtccatgaacttgctgtgtgaccccgggcacgtgctgccttctctgtgccccgggatccccgctaacggggatgattgccccactctcctcacaggttccgcgtggctcgaattcctgagcagcggacaagttcaatggtgtctgaggtgaagaccatcacggaggctgggccctcgtggggtgatctccctgactccccacagcctggcctcccccctgagcagcaggccctgctaggaagtggcggaagccgtacaaagtggctgaagcccccagcagagaacaaggccgag

SEQ ID NO: 1034 - protein, 96 aa, Homo sapiens
MATSACAPCRLPPAPPNVPHICPHRHHLHTVQGLASLSGPCCSRCSQKKWPEVLLSPEAVAATTPVPSLLPNPTRVPKAGAKAGRQGEITILSVGR

SEQ ID NO: 1035 - DNA, 3434 bp, Homo sapiens
gggtctgcgcaccttcccggcccagccggcgattcattcaaaaggcgcgcaggctgcgcggctgtccgggcgctcgccgagccgggccgcggcgccgagtcgaacggggagccgagctggagctgccctgccctaggccggcgaccaccaggggcctgaggatgaagccaagtctgctgtgccggcccctgtcctgcttccttatgctgctgccctggcctctcgccaccctgacatcaacaaccctttggcagtgcccacctggggaggagcccgacctggacccagggcagggcacattatgcaggccctgccccccaggcaccttctcagctgcatggggctccagcccatgccagccccatgcccgttgcagcctttggaggaggctggaggcccaggtgggcatggcaactcgagatacactctgtggagactgctggcctgggtggtttgggccttggggggttccccgcgttccatgtcaaccatgttcctgggcacctctgggtactcatggctgtgatgagtgggggcggcgggcccgacgtggcgtggaggtggcagcaggggccagcagcggtggtgagacacggcagcctgggaacggcacccgggcaggtggcccagaggagacagccgcccagtacgcggtcatcgccatcgtccctgtcttctgcctcatggggctgttgggcatcctggtgtgcaacctcctcaagcggaagggctaccactgcacggcgcacaaggaggtcgggcccggccctggaggtggaggcagtggaatcaaccctgcctaccggactgaggatgccaatgaggacaccattggggtcctggtgcgcttgatcacagagaagaaagagaatgctgcggccctggaggagctgctgaaagagtaccacagcaaacagctggtgcagacgagccacaggcctgtgtccaagctgccgccagcgcccccgaacgtgccacacatctgcccgcaccgccaccatctccacaccgtgcagggcctggcctcgctctctggcccctgctgctcccgctgtagccagaagaagtggcccgaggtgctgctgtcccctgaggctgtagccgccactactcctgttcccagccttctgcctaacccgaccagggttcccaaggccggggccaaggcagggcgtcagggcgagatcaccatcttgtctgtgggcaggttccgcgtggctcgaattcctgagcagcggacaagttcaatggtgtctgaggtgaagaccatcacggaggctgggccctcgtggggtgatctccctgactccccacagcctggcctcccccctgagcagcaggccctgctaggaagtggcggaagccgtacaaagtggctgaagcccccagcagagaacaaggccgaggagaaccgctatgtggtccggctaagtgagagcaacctggtcatctgaggggcggtctagtctaaggacactgcggccctgccctgggaggttccgaaggcttcctggaggaggtggagctgcagctgggactgtgaggaccgagaagcaatggcccagcagacgagacagcaaagaccaaggcctggaggtgggagcgtctgccccagtgaggaggcaggtggccggcgggcactgtgtacaggagcaggctgagccccgcccctggccctgctgccatgttgctcccctgaaggatgccccgacccccgtgcctgccctggctggatcctaggagcccacgggattctctgtatcatcagaggctgggcttggcagaggggaggggcctgtgcccgtcacccctggccccattccttggtaattagccacacccttgcctctgtacagggccctagagcagatgtgcgtccccctcctcttccagcaggtctataaagggaaggggtagcagaaagtcctgggctaggagagtgagtccctgggttctaatcttgggcacatctgtggccatcgctgggtccatttttctgactgtgaagtaaggagagacgtctcagtacccagggcctcttcagctctttgtaggttctgggctgggttgtgggggactggggagctgggctctaccatccctcccattagtagctttatccagccccgtttttgctgcttccagggcctctgccttcaaggcccccatggggctgtccatccatggctctgcctacggaaggggcttaatgcatgtgcctgcccctcccccagctgtttttaatgaaactgaaaaaatagacttgatcccggcaggactgtgatacagagccctagcctgcccagccagccccaagatctcaggagctttagggagaagacttggtggggctggagcacaccttgggcctcagtggtttctgtgtccctgtggtgccagtgcttctgggcagtgcaggcggctgccaggcccagccctgacttccactctggctcagcaacctggttatttatgtggggccgtgcaggcatgggcccactgcctgtccatcctgtttctcttatttattgaaactcaccattgccctatccttgtgtctccacccccttccatgtgttgaataataaaaggtgggaaagtgctgtcacgaggagctccttttctctgtgcccttcccagcttatccgcctgttccacttgtacctgtccagccctgccctgtgttgggcaccgtgacaggctgccctcccctcacagttcctgcacctcagcagccagggaagcagggcccagaggagacccatcaactcatctggttctcaccaaagcccctagctagaggcagggctgtcccacagaaatagtgtgagccacatatgtgactttaaattttctgacagtcacatttcaaaaagtaaaaagaagcaggtgaacttaatttttttttaacccagtctatccaaaatattttcatttcaatataaaatcagtataaaaagtgtgaatgagctgtttttgcttttgctttgaaatctggagtgtatcttacacatcttgattggaactcaaatatttcaagggctccatagccacgtggccagcagctaccacactggtcagcgcagcacctgaggaaatgcactgtgtggagcccgggaggtaattgggggtgaggaagatgtgcgggccagggaatgtgttccacagagagggacagcatgtgcaaaggctgagcaccaacacatagtggtcacctgggccttatgcccagggagcctccaaagcattcagctcctgcttggccagtgtggagaggaaaggagccacaggagcgggtgctacacccggcaagacagagcgtctccatctaaaattcctagggcaagcttccaacccggcccaagggccgcatgtggcccaggatatggctttgaatggggcctaacacaaattcataaactttcttaaaacat

SEQ ID NO: 1036 - protein, 430 aa, Homo sapiens; identical to SEQ ID NO: 1030

SEQ ID NO: 1037 - DNA, 138115 bp, Mus musculus
  misc_feature (1)...(138115): n = A,T,C or G
gggcatctaatgtctgactctagccagacttcagactcctgggcacagctggccacaaaaggaaaggtgcaccagtggggcctggggcatgtctccaaggataaagtactcacccacaagcacagaccctcccttcagatttcacataaaatccagatgtggtggcatatgcctgttaacctagcagtggtgactggaaacaggcagaagagactatgcctcaagaaataagagtatggagaaagacaacgcacccaacatcaacatctgactccccatatacacacaaagatgagtacatgtgcacataccacacacacatacaaacaaatacaattcatacacatacacacacatagacacatgtacacacatacatacacacatatatacacacaaatacaattcatatacatacacacacacatatacatacacacatacatacacatacacacatatacatacacacaaacatatatatatataaacacaaatacaattcatacacatacacatatacattcacaaatatacatatacaaacacaaacatatacacacatacatatacatacatatatacctatacatacacacaaatacaattcatacacatacacatatatacacataatatacacacacaaaaacaattcatacacatacacacatacacatatacatacatgcatatacacacatacacatacacacacatatacatacacacacacacacacacacacagaggacagaatggtcaagaggaggtagaaatagcccaccttttcacctgatgcccacacaatcagccagcctctgtcctatccctacagcaatagtccttgctcctaactctgttgagggaactccagtgggccttgcctccccagctttccaaatagataagatgacatggaagttattacagaaccctcagacttggttggtggcccccatcctctagtgtacaatgtcccaggagcaggcttctgccatatacccacacatatcctctgtgcctgagttgccaaatggctcgtgcttgacatccaggaagtacctgtgaatggactcaggagagatcactgggaggtcactgtggaacagtgtttgacagccatgtctgttgatgcgatctatgctgtcactccaacaaagccatgacatctcactgaccttgaggatttagctgtaagcatacattcttctataggaagaaaagctggctccgagaagttaatgaactctctctcccaagcatcacacagcttggaagtggaaaggatgggtttcagtctagcagagcaaaggtggagtgtgctctggaatcactttgctggacagtgcctgatgatcctctagtgtgccacaccctctgagatcttgcgtagctcttcctggttcaggcagcttaagaatcagataatccaccacattgcttctgcaggcagtgagcagcatcttcttttgagacagtgacacactagtgagctgtggtgagcctcacaactccaccctgaagctgagtcggtaatgactcgggagcctagtgatgtgtcccatcgggaggggcacacctggtcccagggcagcatcccctcaggtccagcaccagctcctgtgatcacatctcctcatttcccatgcagaggctttccaaaagcttggatgcaagtgtggctgtcactgtggacacagacacgtcctctgccagcccaggcccaggtgtaaacaggaagtgtcattggggcgcttgcattgtgcagggggcagcttgagagaccacggccttctgcgggaatctagccaatgaaaacatgtttgcaaacccctgactctggtcggtgggccaaggcaagcagagactcataaaggagatttagggcaggaaggtggcatattcatttgtacctccacacagtaaaaataatttattggcagctgctgggagctttagtctgaaatcacatggctggcaatatgaagacctttctttctttttctttttttctttccctaacccaagtagcctggactttcagatgaagagacatcattgaatttgtagtgtgtttttgtgtggatgcatgtgtggatgcctgtgtagatgtgtacaaaatgtgcatatgtatatatgtatgtgtatgtgtgtatatgcaagtgtgtggtatacatatatgtgtatgtgtatacatgcatatgtctgtacatgtgtatatgtgttttatatgtataacttgcatttatgtctgtgcatgaatgtatgcatgtctctttgtgcatgcgtagttcatgtatgcctctgtgtgtgtgtgtgtgtgtgtgtgtgtgtggtgtgcatgtgcatgcttctatatttctttatttacaggtgtcttccttcactgatgctacaggcctcaggagtatttcctcagaggctgtggtaatgagctcaccagcgtgccatttatcacccacttgtggcaaggggagggggaggagtctcagaggcaaaggatgagttgtggatagggatgtctttcatctgctggagacccatttgtctccttaagtgcctgtcccacagggacctgggtaggagtttgtggagaagggtgagggctgggactgagcagatatgcagaggttgaagcaagagaggccaaggaaggaacccagagaaagatgaccctggaggcaaatagggtgttgagatttaaatctgcctggggccagggaaagaaaaggccaggagatagcagggaactgaatctgaggcagccaggcaggtattcctgctgacatcagttgatgagcctgcatgtcaaaggttggcacataccaggctgccattttccaggagcatcagcagagatggggtctacccctgggatcaatttgaaaacacatgttgcttttgaagagccatggacccagactgcagggcttgtggccattctgtgtgatgcaaggccacttcataactccactgtttgtacctctctctctggaaagcctttccttgttaattctccctccagccaccctccccctcccagcttgcttctccggttttaacttctgcaactggtttggaactcagaaaaggcagtttcaatgcagactagtgtggtgtccttgccagcatccccacccccacctccgtggaatgtaagcaggtgccaacataaagattttcggtgccatgtcctagtgggcatggctctcatcatgtgtgggagggtctccagcctcaacagtctctgacatctgattctcattggctcagaccttgcctgtgatctcccagtgacaccccccccccccagcctggttatcttggcctttgcttcttcatgggaagtcgagcctgcttgcctgcagaaagccgaccagggctttgagaatcctgtgttctctgttgtctgaagttctgtccttctgccatgaagacaccataatcaacagaagcaggtgtaaaggaaatcccctttagtgttttccagggggaatttcatggacagatatgtggctggacttctgccaacccctgacctatcttttaagattctttcatttgtttgtttgttttggagtgcatgttgctgggactattaggcaagttgagcctgggtcctgtgctagagtctgacaagactgtcatcttacacggtgacctttttgggataatcgagttaagaatctattgatttcaaaataaagagaaccccagtgcaaaatgatttaatcagacttgagcccatggctacacattcagcttgtgggtgtgtgtgcgcatgtggagtgccaacatccatggccagggtcttccttcctgccttattttggcaacgtggtttctcagtgaacctgaagctcagtgttttgactagactccctggccagtgtgctccagggatctgcctctctctgcctgcccagcacaggagtgcagtcaggcaccactatacctggacttttcattgggttctggggaacacttacctggaaagcatttgacctgctgggccatctccccaagtctcctgcatttcggcttttaaacaatgtattctaggatctaggtgtactgccacagtcagatcatcccaatattatggaggctgagccaggaagaccgtgaattgggtgcaagcctgcgaaaatagagaatctaagaaaaggaagagaagggaaattagaaagaaggaggaagagaaggctgacagggaagattgtagggtgtgcagggaggcatgaagcagcttgtgttgggacttcccggtactctgggttgcgtccgctttctccctctgcggcctttgttttcctttcctattgtgtatgcagcattgtcttgtctgtgacatagaaagagctagaaagtgtagggttagatgttcccggggtcttggtggtcttgggaagagggaacaggcacgggctctaagccagcatgtcctttggcctctgcagcctttagccccgaggaaattctctctggggcagcagtccaggcagatccggtgatcttgcctttggaaagagggcaaagcagccagaggcaggctgatcaggcttcagggcaggcaggaaaccgaacagtttcaaacaccagggaaacacccgaaacaccagaagtgtccatacagcttgtgtggctctacaagtgtcggtggcacactcctgtcatcccggcaaactcacctggcctctggttggtgcgcatggacattaagtcccttcactcccagctgggcacagggctggtttccatgtgttggctagagtcagtgtcctgctttttcagatgggtgacatatcttgagtttttctccctatttttcctcccctacccttctctccccccattccctcctccctttcatccctcactctgtccccttcctctctctccctccctccctccctcccttcctttctgtggttcctatggtgtcaaaaatttaacctagtgccttgtacatcgtaggctatctgtcttctactaagctatgtttccaacccttttaacaatttctttatttaaaatttgaagtagagcctctgtgagttgcctgggctggctttgaactcactctaaagcctaatctataaccttagacttataacctaaaacctataacctttctatcggttcccccaagaagctaggaagacaggccagtgccactggaccaattagccatgagatttttaagacaggcacttgaaggggactagacccgtcatggaaaggcagctctgagcagatggaactttgcaatctttccaatctctggaaaccaatgttgaggccttgatgaagaaaaggctcaggatgaggggttagtcaaggatggagggcctactggtctcagaggcctccctctctgaacacattcagaacttttgggggtccaaatccatggtatcccctcaacaaacatcttcaatagcagcttctttccattagtcacaggctctatctcctctacgaatttctgaaaggtcaagaaaagaatgtgaatccaaagtccaggcatacagagaagcctgcaagatgagcaaatcatcaacagactcagtggcctgacccatgacctctgacaccaacatcccgttaaagacagtgatctgggctatgtctgggatggcaccagtatccttcagagcagccatccttggtctcttaaactttatcagattagtgtgcaatgagctgaaaaacaactttactagtcaatcatattgattaacaaccaactcagacagtgtttactaaaacccatgagggacccatcctattacagatgagaaaattatacagtcactaaagcaagacatgtctgctcctctccccacccagtgctcattccacacaagcaatgaaagtaaagactataatccctaaatgcacagggaggggtaggagaaggggaaagggaagggggaggaggaggaggccacagctaccaccctcagctctgagaaacaggacccagagcctgggattcggttgaactaaaagaagtctgatcattagagaccaaaagaaagatagaaaaagacgtgtgtgtgtgtgtgtgtgtgtgtgtgtgtgtgtgtgtgtgtgtgtgtaggagtctggcagctgcatctttctacctgatcaaaatcaactctaaacaagcccaaggttgaatgggggtggaggacatttgtacacttaattattcatctggaataaaaatgaattctgcaacagctttgagggacagcaaggcaagagcaattagaagttctgagatgcacgcaaatgtttgaatgaacaatcattataataagtacattaaaataaaaacaagtcagagggttgtatttgcataaataatccaaggtgagagtgttggattctctaagaataaaagggacatggcctttcaaagtggagaaattgtaaccgatgtataggtcagtagagacagacagcagcaaattaagacaaaacagtttggaagatttatttgtgcctgtgtgtgtgtgtgtgtgtgtgtgtgtgtgtgtgtgtgtgcgcgtataaagccatggctgtgggtgcacagacttctgcattcacagggaggctaggagaaagtcttgagtgtcctctgtcactcattccctattcctttgaggcagggtctttccctgaacaagatactcattctttcttggctaagcaggacattagcaagccctaaggtactcctgtctcctccctgtaggacctggcattacagattttgctgaatacctgaattgttatgtggatgttgggatctgcagtcctcttaactcctgagccatctctccagcccctgggcattggattaactagtctcttattctcccccctactttgagtgaataggaagaatcttccataattttccagcatattcaccctcaccaaatacccacaaggtaaacaccatcatatctgtgttccagatgaggaaggaggtacaatgagtcggagtcactttgtactgttatctcagttgcttagcctctttgtgtctagtctcttcttggttagatctactcttcctgcttccctgtgtccccaagctttagggacacagcatgagggtcctgctctggggccctgcactctgtgaacatcttcaagggatgtgatgcaaggttgggtgcccagggatttgttagtttgttgagacagtctctttgtgtaatccaaacttatctgtacctaattgagttgaccagattggttggtctaacttgtagccctccccctgcacctgccacttcagcactgagattacaagcatgagacattgtacctattattattattattattactattattattattattattaaatgttttatcatattcttttcctctcaaatcctccaagatccttcctacttccctactcagacaacttcatgttctctctctctctcttacttgctatctcataaaaaaaaaaacaaaatcaaattaaaaatgacaaaatgaaacaaaaagtacacaaacatacaccacaaaacaaaacaaagcacatgtaatacatttacattggtcagctcttcctgagcacagcattggttctcagcctccctagtgctctataatacagttattcatgttgttgtgatctccaaccataggttacttttgttgctacttcataactgaaattttgccactgttatgaactataatgtaaatatttttggagacagaggtttgtcaaacgttgagaaccactggcacagggccttctctggattgtggctaacactcaattggagaaaactggtttcccctttcccagcaggtaccaactgtaaatagcatcttgctggggagtgggaacttcgtgttcaccctccattctcagtgctgggatttttgtctgtcttttgtgatttccagttaggatttcttttcacaccgtagtccaagctggcccaagctggtccagggtttgtgctgtagactgatattgcagcggcaatcctcctgcttctttccagctgcacagtggtaggatttgtcattcttgagtcagggtctcaggatgtagctcaggcttgtccagaacttactatgtgccctgggttaaacatggatgtccagtgatcctcctttctctacccaagtgctggaattacaggcacgcaccaccatgtcctgctcctagattgtctttattttgttgttttgtttttgcttgggggttggagatagaggatttgaatacttcagcagggagaaagtgaggcctgtttgcctcttactacactgatagacagatttataaagtagatatggcatacatatacagtgatattatacagaatttcctaaggaaagattcttgtgatgtgcagcatcatggatgaaagccgagggcccagagagttggctcagcagctaggagagtttgctgctcttcaaatgacgctgttctcagccctcatactggaaacaccaaaaccacctgtggctccagccccaggggatctgatagcctcttctggctttcaagggcactgtgctcgtgtccacctaaagcatatacatacgtagcacgttccaggccagccagagcttcatagtgagattctgtctttaaacggagcgggagggggaggctgattaggtcggtctcataattctttccatgttttggaaaccttactcccacaacaataaaataaaaatttcgaaggagaaaatacagggaagctggtgaggcaggactgtggtcactacagaagacagcgcagactctgagggatggagttcccaggcctctggaaacgcctgcttctccttcaccctgcctcacacagatgctctagaagctgtcaagtgcctgtggacaattcattccagaaggcaaacatcctccttctctcttactttaacatcccgtagcggctgagatgggggacggtggatgtgggcaccctgagtccctggtgccatggtaaccgcatctcttgaggagatggttgagctatcctgagggcagtgccagcacctgatatcaacaattagctggaggagctagaaagttcagagccagcctggcccacctggggagacttggtctctgaataaaaaagtgaaataaagcaaaatttgaaaagggctgtggaatatgactgctcacgaaaactccatgacagggcactttcccgggatgggtaggtccatggtcttgagcccagtacagctagggaagtaaaggtcacaggtttgcatttttcttgagactcattgccaggcttgtttggcactgactgcactgtggataaaaatcaagttaaattaaagtaaattaaaagataacaaggcacgctgtcttgtttatggacttgacagcggcccaagcctatcttctcttataggcacagatagatttacttgcccttaggcagtgtgtgcatgtataaaatgtatgcaatatatataaaatatacacaatgtagacagcactggtccatatcgtctcctttatgctttgatcctgaggattccagctctactgtattccaannnnnnnnnnnnnnnnnnnnnnnnnnnnnnnnnnnnnnnnnnnnnnnnnnnnnnnnnnnnnnnnnnnnnnnnnnnnnnnnnnnnnnnnnnnnnnnnnnnnnnnnnnnnnnnnnnnnnnnnnnnnnnnnnnnnnnnnnnnnnnnnnnnnnnnnnnnnnnnnnnnnnnnnnnnnnnnnnnnnnnnnnnnnnnnnnnnccagacaggagagtggaggaggggatcttggagaatcgcagtcactgtcctggtcactgtgagcgtggagaggctgtcttgtgggagcagagtgggaagctagtactcaaggagaaaagcatttccacagtccgagccaatgagagagaagaatggcagtcttggctcgggcttctccacctgccaccctctcggggccagcctgcttaccagcatggctcagtgacaattttctgtttctctaatcctccaggatggctacttctctcaccgtcccaaagagaaagttcggaccgacagcaacaatgagaactcagtccccaaggactttgagaatgtggataacagcaacttcgcccccaggacccagaagcagaaacaccagccagagctggcaaagaagccccccagcaggcagaaagagcatttgcagagaaagctggatgcccaggacaaacgacagggccagtcagtcctggggaaaggccccaaggaggtgctgcctcctcgggagaaagccacaggcaacagtagccaagggaaggatctctcaagacacagccatgccaggaagagtggtggtggtgggtcccccgaaaccaagtctgaccaggcccccaagtgtgatatctctggcaaggaggccatctcagcactgacccgcgctaagtccaagcattgtcgccaggagattgcagaaacctactgtcgccacaagctggggctgctgatgccagagaaggtggctcgattctgtcccctagaaggtaggtctctttctcctgtccctggccccatctctctgccttctcaggccctctgaatatagccacactgcacctcaaaccctgaccacaagatctggtttgtctgggaactctgaactcctgccgtctgctatcaagaaagtttgacaaaatcatgacatgtgatagtatcatatgacctgttccctttagcagatatgatctcggtgtctgcagatgtgctgtgctgtgttcatagctatctggaatttacaggctacagaaattagaaaaaaattagactctgtcagacgtaggctttttacgtatgcaatattgtacagccccaacattacataaaaaattataagtcacccagagattatttgaagcatagaggaggatgtgcaggatataagcaaacaccataccatttcatctaagagaaaggacactgttagatatgggaattatagggtctggttcccaaatccccatggatcctgagggacacctcttcatggttctatgtatccatacagtttattagacgggttgtggtcccaagctccaagtgtcccaaggaaagatgggaaaggaaggctaacatggccttcacacattccctcttagtcaagttcagcgtgaccttttgagcttgtagcagcaaatatgcatctatgcaacacttcctgttcaatagacagattttagaagattctcccttcccaagcctccgtgtggtccaggtggttcctgtctgtgttcttgattgcacttggcactttgtgtgcagcaataattaagtggaatgcaatgtttccaagagctgttcttagccagtgccaggcaggggcattttggaagtctgaaccaaggtaatacggctcctgtcacgcttagagcttgcatgcttgctccctgaagggccaagtagcaaatctgtatggtcattgggctgtatatctttatcacagatcttaagagacaatacacaaacatcaatgcacttggttaggttccagtggattcagactgctttccagattgcaagaggcttccatccagggcatctaatttaaggtagaaatttcatgaagtcaaaaagacatgcaatacatctgacctatggaatgttgtagtatagtctggtccaccttaaatgtgctgagaaagtttctgagcctatggttggtcaaaggcaacaaaaacaaagcttagattaagacaatgtgttgactgccttgtgtaaggtagtaaatgctgcagtgaaagggggaagcaggatagtgctgggatgaattttcgttcccaatgttatcaagttgaaaagccgtacgtcatccatcattacgctaagaatcatccgtagtcagtgctgttctatctccgggaatccttttctgaggaagctgaggctcagacaggtttaggatttgggtggaggcatccacctaacagacagcaaagccggtattggaattcaggatgaagagtctgagtctgcttccacaagtttgatagtcttcaggggggaaacagattctcacttcagcttgagttatacaaaccccaaagaaatttagctgcctgagaggtgtgcccccttctcctcagtacagtctgaaggagaagggagggtgtcagctgaggaaacagggagcctgtggcaataatgggggggcatgtgtgccagactggagtgcctgcatttgcatctcagacttcctctgcaagctctgagattttcggcaagttgcctgccctctctgtgccttggtgttgtatttattcatcgcagagggtttaaagactgcacagttaagtgaatgtacctggtcactgctgcacattacgcagatatgagccttaacgcttactccacagtcatccaccaccgaatagcagccttcagcgtttcccgtgcttctcctgggtcgtgctgaaatgtctgcaagctagcgtgagctcactggggctgcctgcggggttggctgtctctgccttggcgaaggtggcatgccctccagggacctccaaactggttaatggagttggcatttaagacacatggcacaccagacccacgatgctttaatttcctgcaccgtggcctcccctttgcagtaaatttactgtgaatagactaattgcaaaataactctaattgggtagttatcaatgaacaacttcccgtgaaacagaatggcttacaattaatagcatttaagccataaactattcttctgcgaaaagcagggatgtaattacaccccacagggagattgccttcccttctggaaaccatgacacccggaattccgtctgctctggagggatgggctttggcctagtggtccttttttatctcttgcaaaatgaggaaaagaggcacaatagggggaacacttgacatcagacaatataggaacctcgctggtcctccccacacagaggcatgcactgggcctcacccagaccgtagccactgaaggccagttcgtcagagcctagggacagatccagaggaagggaagttcattttccatgttgacttttgtgaggagctttgtttctgtgtctcctctgctttgcctgtctctcagccttgtccccactcagcccaggggacactctggaaaagactggctccctacagggccattcttccttttctgacctttgatttctgcctcctgtagagaataatcttgaaataagtgaatagaagtcttcctccattccatttgaagacggctgttacctgcttgcacgtatacaagggcagaagactcctatagactgtctaccaaggaacatgcagagagagagagattcttaagggttttgtggaaagacctgtccttgagtatgacctcagaagaagttgtctccagatccccagcaaacccttcctcccaaagataggacactcactgcagccacaaagctgatgcgcacacacacacacacacacacatgcgtgcacgcgcgcagacacacacactcatgcaagtacacatgtgcatgcacacatacatgtttatacacaaaaatgcatatacacatgcatgcaaacacacatacacatacatgctcatacagacatacccacacacatgaaattgtatgtgaattctcatatgcatgtatgcacacatacacacccatacatatgcgcgcgcgcgcacacacacacacatgtgctcatacacaacactcacagagttgcatggaattcctgtccaccctttggtctctccaccttaggagtcccaagtcaccctgactgatccttcctgtgttttacggactataactccacaagtgtaacaggcaagggcatcttgaactggaaacaaagaagaaaggtcgtttttaaatcgagatcatgaaagtctagggctgaagccacacccctgcctttacctcattcccaaatcctctggagactcagtctcagccccttgtggtagagggggcctgccaaagcacaagagctcatggcacagaggccaggaagcagaggcaaagtctgagctaagggggaaaccttcttcttttctttagtccatcttggtctgaagcctataggatggcaactcccacagtggggggcttgctttcccctctaagctaatcccacctggaaatgccaccaaagacacgcccagaaactacttcccttgtctcctaggtgcctctcagtccaatcaagttggctataggatacatcagcatatgtgtgtctcagggagctatagccaacagccccccaaatctccgtgccccccccccgccccaggacagttctactgagatttttctaaggcacttggctgttaaaactgagaagaaaggcagctggctttctagaaagctaacatcaaaagtgacccttctgcctccctcccgcctctgccacctcctccttgccccagagatgtccagctgctgccccttctggagcggtaactctcctttaaaacttgtctctcgaatgtgttggtccctaagtgatgtgcctgaaaaccaagctgaagagcttgcgcaggaagaggaaagcatccctgacaggacacgcaggaggcctttcctggttgtggtcagacacatcttctagaaacttcccttatgaataagcactcctcaagccaagtgtatttttaaacaagaggatcatggctagccgggggttttgcttgtgcgctcgcaatgacctctgtagaccagcggattgggagcaggcgtctcactctgcgcttatgagctgcagcttggagcagctctgcctagagagagcctgactaatcggcttcccttttgttcacggccggaaggggattttggaaccggataaagctcctgcatggctgggaggcagagcaggcagggtgctttgctggcctggagcacatgggtgcctgtctcctcttgcctggctacttcgccccatagcacaacaactctcactcccccggggtaaccatggagacactagcatctgggacccttttgccaggaatgtcacaggcagtctgagaatactggtaatttgggtttacagttggcaagcttcttttttcataaatgtgaacaaaattgttgattcttctagcacctggcactaggctcggtgttcatcaagtatctattgctattgagcggtttgagataagggaatgaaagaaaccctagctcacatcctctggctttttcacaacccagggaagagggtagggtacccgaagaatgccctggaaactcatcttgaacaagaacattgatctcttcccccagcacacttcaatgttacctgtttcactaagtcaaagtatgcactgaacagccatgttgactgtgtctcttaactatgacaaaactgccagaacaacacctcttaaaggaggcaaggtgtctgggctctgtttcagaggttgtggtccctggtcacttggcttccttgttttgtggctgtggcaagacagggcagagcaccaggacaggtatgatgggcattgtgctgtagagcagagctgctcactcatggcaagaagaatgcaaagtcgggaaggtctggggaccagatatacccttcagagccatggctctagtgacccatccctttaaaataagctgccttctagttcccatcacttcctaacaacgccaccaaaagatgcatccatccatgggttgatggattaacaagagcagagcccttctgagccagtcactttcagaaagttccacctctgagcatagacagaactgtagatcaagcttttggtacatgagccttttaaaagaatattccatgtccagtccccaacaagcacccatcatacattaaacaggaggccacatgggagatgtggtggatgagagaaacatgactgatctcatgacactcacagtgcagggtggggatgggagacaggcagtgaaggtgcaggctattatgcacctggcatcaagtagggtagagggaagaactgtgagtctgacagaagtgtctccagggcagataggtagagaaatggtcgttgggtataaattcgttcttccttggaagcacctgctaagaatgttaacactcttggggaggaacggcttacattcttgtgcaggctgagttcattgttagacgaatctaatgtgtatttagcagtaccgcatcccaggtaacggtgcttgaatgagatgcatgaacaaggcagttggagatagctgccttcatagagtttctgttctaggagaagccggctattgtcaaatacatagaaccagactctgataaccaggaaaacaggcctgcacctgcaggcccaataaggatcaattccttgattggtggttgctgggttttggaagctttcaggaagggctggcagatctgggtctgcagcagaacctttgggaaagccttagctttgcttaggatggcaattcaaataagacagtctagggggctgaggagtagctcaaagggtacgatactttacctagcatgccctagcactgaatagactaggtaaggtggagcaggcctataattccagcactccagaagtggaggtacgaagacagaagttcatggccatccttggatacatggtgagtttgaaacaagtctgagcaacataaattcttgtccttaaacaaatagatagacgtaaattgagcagaccgaatccaaaaattcaaaatctgaaatgttccaagatacaacatttgttttttggtttttttggttttttggttttttggttttttggttttttggtttttgttttttgtttttgtttttgtttttttttagacaaggtattactttgtagccctggctggcctgaagccctgtgattcttctgtttcggtttcctaagtgctgagcttgcagtgtgagccatggtgctcaggtctgcctaattctgagcataaccaaccccacttcccaagaggaacgtgccaaatttgacccattgtgagacagcattcaaaaacaggtactctcaaaatagcatataaaattaccttcacgcatatgtgtaaattatacatacagtgtaaataattatgcataaatttcatgtttagacttgaatcccatctacaaactgtctcattatgtttaggaaaaaaaaattcaaatataaaaacccctgaaatctgagcctttctggtcacaaaacttcatgcacaaggggtccagaaccctgtgatcacacttagcagtgctccagggatggctgattgccaggaatgatacttagcaagtgagttatgttaacccagtggctcctcctgccaactctgttatccaggaaattagggcacatggagagagacaactggccacagtcacacagttagcaagtggcagagtcaggattcagtggcgaggggttctatggccagaggcttagtcatgtgctctgctacctacaaaagccggaagcttgtgcagtgttctgcctgtggtgccttccagctgctgcaagaggctcaccccatcaggccattcacttgctgatggccagggtgggggtgggggtggggggcgatcccaccggagaccccctgactggtcttcaaagttagccggtcgctttagataaggaacagacttatggctgccccatttctctgtcactttctggtcgctcagcgtatttgcatttgtgtgacatgacaaagcaataatttttcattgtatccttcagtcacccatgagagattggatttaggtcacaatttattaccctgtggaatttaatccaatttttaacaccatgtcagccactccagtattagagcttttttaatggctgtgaaatttatacaatgataaagtaatttaaaacatatgtaggaagagcattgggacaaattgatgtgtatagaaccctacagtaaagattgaataggagataaacatggaaaatggtgattgattacaggacggtgggaactgtgtcccactgatcagctcttaatggcaaaattagtaaactaatttgttcttcacaattttgaggagagtttccgttgccctaaatcaagattgaggctgagtcacaaagcacaaattaatagctcacctctgagtgctatgtacctcaacttagaaacaggcctgagtgactggaaggttgccaaccgcctgtctcgggggacctttcccgccaccaaagtcggaagacaacgggcaggatggcagagtctccctttgtttatttagtgtatgggcatttgtgtatgcacgtgagtgggctgtgtaggtgtgagcgcacaggtgtatctgagtgtgtgcatgtgaacaagtctgagtgtgtgtgtgtgttatgtgtgtgcctgttgggggacaccggatgccctgctttctctgccttatgccttattttacagagtctttcactgagcctgggcttagacggccaagcgatctttctctctctgcccaaccctccaccctggggttgtacacaacggtgcttggctttttacgggagttctggagatctgaaatcagaccttcatgctcgctgcccttttccactgagccaattccctacctcgtactcggttttagaaagttgcctgctttctcctgtctcccgaagataaacacaattagtgccattctgaaggcacaaaggcaacacctctttgctgcctaccatgggtggctcaggcacaggtctcagtccccaagggtgctatgttagttacttttgtgttgatgtgacaagagcctgaaaacaacaactgaaagatttattctggctcctgtcctcaggggacacaggaagcacaacacacgctctgcccgggaggaggagtgttgtttgcttgttgttgtttgctgcttcgggttttgtttgtttcccctcaatgggtatggatttcaggtttgctagatgggtagttttaggaattgatggtacagtactgaatatacttgacactcccaaattatacgcctggaaacggcttgagtgtagcttttgcattgtacggattgtcagagggtgactttatagttaggtcttcttctgcacgcatgcattgtttcactgaggctcctggaccgccaacaccataggttgctccggtaagaactggtaactctttccagaggtaactttttctcaacttcattttggggtaatggtgggtcattgtttggtattgagcagaacaacagaataatcagatttatacttacaaagggggttgacagtttctagctagtaaatatttcagatgtaaccagacctgataactctaccttaactactcagctgtatatggaaaggactggatatggctgtgccctaatagataactgtttacaaaacagacaggcaggatttgacccaaggttgttctgtgtgcactcccattttaagacaaactgtgcctttgtgtccttaaggcagtggcagactaagaagagaatttgcaggagggaagatatttacctgccctactcccatcacacctccaaggtcaaacttgttctgacctaaaagttaggaggaacctctgcaggccacagacatcccctcaggtctgcagcatagatgttgcctccctggctccccatccattcctgggaaagctctcagggtagaacctctgcaaggtgacctgaaggctcaatggagccagagcagccagggccaggcttgaaagaacttggtccagctcctgaggctggctagactgcactgtttgtttctgaactttattagcattgcagcgggggaccaagagaatttagaggcaccgctgccagtgctttcaaagtctagccctcaaaggacaattaacctggttatccaggcccccctcccttccttgtttatggctgtgaacacaggaaatgcagtgttgggtacatggattgctatcaaggaatttaactgtaatttaaaaggctctatgggaaggaccccagtggctgattaagaatgcatttgtagagtaataaagactccagcagctcagtggagctcagcctccagacttatttatgaatctggaatcttgtcaggttcctcgggggacggggtctacacgggggttgtctggttccaaatgttttggattggcttcttgcagaatgtaagatggagaaaatggcccagcctttcttcgtctttgggattgtggagttaaatgtcagctccaccagggactaagagcagaagcaagggtatactagtttggccttattctgcctcattttttccatctgtgagatgggactaataatagcctcgcttgcacgttctgtgaagtagtaggtacagagcttgctgggataggtgacctgctcatttagtatgcccttcctgtcacagttttcatctttagggctgttatgctcttctggtaagcccaggtgactgctgatggcaggcccaaacttctgtctgagcaaactgaaagagtcagttctcagttctcatgccccattcagcagtctctgtagccaagacccagcatctcctgtggctgtcataatgctttctaacccatcccttcacatctggctgctgtatctacccattctctcccacaagtgacttcgttctactcttagagcggtctcctttgatctgccctgcaatattttactgtggtttcctgacagcccaccaaagggagctctcttctctgagactgcaccctggtggtgactgtggtcttgggttgaccaccctcacaccttctccagcctcctcactcccctcccctcccctcccctcccctccagggctcagtgagtcctgtccctcacctgcatcccctagagaaagctgacgttggctgaagccttcccttatgctgtacctcctaaccatactcctgtcattatgtctctcctgctgagctcatgagcttcctcggggacacttgtgtgtgcttgcacatgccaaggcatgcatgtggaggtcagagaacagcttacagttttctctttccaccatgtggacttggagaattgaacttgtgtcatcaggcctggaggcaggcatctttactcacatacttactcaccttgccatctactcttctttcatagcatttaccacagtttgaaatggatgcaggtttgagggatcactcagctggcatctctattccaaactagaccgtaatattcatgatactgttgttgttttcttcgtactctacctaatgcaaaatagatatccaaaatggatatatggatgaagggataggcgaatgggtagatggatgaatggatggatggatgagtggagaaatggatgggtgggtgtagagtgcatggagagatggataagtagatggatgggtagacgatgagtgcatgatggatgaatggatggatggatggtggataagtggatgagtgtgtatatggatgatggatgaataagttaatacatggaagaatccaggaatgtgaaaatggtatgagtcccttggctgttttgtagacactacaggagggagtctttgcaagagttctaaaagaactgagcactcatgtgatcaacgagaagagatgagcaagtgctagcaccttagtatacaaggagaaatatgtcagaaagaggcaaggacccaggggcctgcgtggtcgtacagagctcagaactcaggtatgatgggtgatctctatgacttgactggatttgagattgtcttggcaaacctttctcaatatgagaaatgtgagagtgtctggagaggatcaggggagaatggaagatccacctacaagatgggggtatcattggataaaataagtggggaacagttagatgaacacagtattctcacttctttctatttattggctgccatgatatgaactcttctgcctctccttacccaccagaggatggactgaaccctccagagccgtgagcaaatgagagccttctttttaaaagttgtttctgccatgtactttctgaggcaataaagaaagttactaatgttttgtagagagaatctggagtgcccccagcccccagtgcgatgaggtagataaccccctaaagcccacatctgagttctctagcacactctgcattctgatggctggcactctgctttgataaaactatagccaacctgcctgtttgttgctataatgtctgtctgtagttgcttcccaactctaagggaaaagttcaatagttaccatagtgctcatatggaacccaaagctctcttgatcaatctgtccctttacagagacaccaacctctgctcttagacaaaagctgagcctggctggccacatccagtatgtgtgtagacatgttacagatttgttatagtgggatgtgttaacattcatgagtgggaatacaggacagattcagcaaggagcaacaaaaactgaccttacagttttcagttgactttgagagatagtgtgagttgctcaaggtcgcaagggaaatgctttgtctaaactcactataagagagaagatctccagtccttgtctcccaagcacctacgatcactgaaaggatactgtgggaaggagtagtggcctgacacaaggtagatattccacaaatgtttgttgaacgataagtggatgaatgacgaccttgagagatgcagagtagtcctgccctggagggccttaaaagtgacttgatgagaagagagaatattttccagcctagccacccaggctgttgactgacatgttcagaatatgctgaacacatagcaccactcgagggactcccagagtcccttggtttggtcagtggtgggatgctgcctggcattcctggggtctctcgggggagaagagctgggttccggtaaatattggatcatctttccaaaactcctggtaagaagtgctgaggattgcagtctccagcttctaattacacccctcaggaaggaagagacctttgccaccggcacacttcatcgctgatctgaaacctgacacaggctcggtttaattccatatgcttttccctgggatcattaaaatggtctgaggaagtggttccctgtccgtcttcaaccctagactccatggtctcttcagtcaaggtccatgaccctgtgtgagagcaggcatggtgggcaggatctgcccaagtgaagaccatgagaaaaaccccactgggaagaaaggcgattaagtttcttagtatgggaggagaaaattttgaaaagtatgttggagctctcctcaggaacaagagtaacagggatcatttgtagggggtcccattgtttcacgctcagtttgggatactctagactttataccaagaagcccttctgcttgactttggatctctgaattctgtgtgctgttcagcctgaagttgttcttcgtgctgttttctgcattgaatactcaggtaaatggctattcaccatgacttcccatagccaacctctacccagagtgccagaatcttatactattgctcaatcaatttaggttgcattttgtcccccaaaagacactgaatggaccggggaggtggctcagtgagtaaagcacttactatgccatgtatagagaattgaacttggatcctcagaacccatggtgagggggatgccacacatggccatgcatgtctgtaatcacactgcttgtgggatgagatggcatttggagacaggagaagcttggggtctcacaggcctgctataggtgacgaaaacctgtctcaaacaaggtagaaggtaaggtccaacacccacagttaccttcctatctccccatgatgtaccatagcatgcgtgctaagtcatgcatgtatctgcatttatacacatgaacatacgtgtatatgtaagcaacacatagagtttgtttttattttttgtatttgttttgtttttgtttttttgtttgtttgttttctcaagacagggtttctctgtgtagccctggatgtcctagaactcactctgtagaccagattggccttgaactcagaaatctgcctgcctctgcctccaattgttgggattaaaggcatgcaacaccactgcctggccatcagagtttgtttttaatgttaatgtcctaagaacccaacttgtggatgtggtgatctgctcttcataatatttacctatggtcataggatatttgacctatgatgatcaggttcaaatgaaggcattaaaatgagccttcgtgtaacatgactgtcctcatgaaaaggagacatttgtacccagaggccaggaacacagcaggaagcttgaggaaagagtcagaggtgagcctctaggtaccaagggatataacagttgtccgcagtcatcatcaactagaagacgtgccctcagcaaatgcacattcacaggatccctgatctcagatagccagcctccaaaactgagagagagccagtgggttctgccattgcaggcagcctgtattctgttggaggagctcccaatgttaataaagtggacatcacaactccatcatccaatggcacctcaaactcataccagctcttcagacattccccatctaccaagtccagctttcttattataacctccaccatattttatgatacaaacacccacaggtatctctaacagtggcctcagccaagcccaggtgcttcgattccagacaatgtgtgctcgtcaacctcagggaggtagacagaccccacacatctttaagcttcacccttagcctggaggctaaagccagcccctcacagacccaggccagatgctcactcttcttttgttttgttttttaatcagcaataataaaacatagagctcttcattgaagcattcagagttttaccttgtgttgaagttaacagaaagatttggcagcattgtccgtagtgccacaatggcaaaagtcacctccgtatgatgggacatgatgtttatgctatgcctgtgagggtattttaaaagagggttagctaaggaggaggatgcgccttgaaggagcttggatgcaatacacaagggggaagaagaagccactggctgtcagtggtcccttttcgccatgctctggtcagccatgaagagaacaatctcctctgacttaggctacagataccatgcatgatgctcagccagagtatatgaggcccagtgactgtagactgattacactgaaactatgagccagaataaattcttcctccattgcctatttctgtcacgtgcttagtcagtgacaaaaggctaatagcatataaagccttcctcataggtgagctaggaccttccactttcaatatagaataccattgatggggtgttaaggaactcatttttacactttgggtaagtggaaatgagattccaaaattcacagagggagaaaaaaatgaaaccatcccgtcagccagagtaccccaacatcctgcgatatctcaacccttcattcatagctttgatccttactctgtctataatcctatttatgttaaaaatggcaatgacatgtggtggtgagaaactgggctggggccaagctgttatgtagagggtgctcaaggcacaaatgtaccagcgttttgtgctttccatgaacagttacaggcacgaggcaaatctcttgtaagcctggaaatgacgatcaagaaggatacggtcctgaaaggaactgtgaagaaagcatttgtcatggttttccatacagcatctctaatgaggaatctctaccatgactcggcacatctgtgcggctgaaaagcaagtagctgtcagatgtattaagggctgttgaggggcactgggatgaagcccctctctctctctctctctctctctctctctctctctgtgtgtgtgtgggggggggtgcattgtaagtgtgactccctgtgcatgaacacgaatgtggaagccagagaacaacctcactgtcattcctcagacaatgtccagtttgttcttttgaggcagtgtctctcatttgacctagaacttgccaagtcaggtaggctagctggccagcaacccctaggatctgtctgtcacctcctggaagccacccaccccccacccaccctcaggactgggttttccaggccacactgtgtctcaagtcgtgtttgtttgcttgtttttaacatgggttctgaagatcaaattcaggtcctcatgcttgccagtgagctggcatgagccctctgactatagctgtgaatggtgagagagatgccgaggggaaagccctactgcgtgccctccttaacacatagtcagtcagaaaagaagccagtgatcaggtggtccatcagctcctcccactgcttcatcttgaactttgcttggatgactctccaaggtaaaggggctttcttcgccaaaaccctgaactacactgcatttcaaaactctaccctcagagtggattggaatgggctacatttttttcctgcaataaaataaagcaacgaatataatggagtaaaatgactccactttttttttcctttcaggaagttcccccattttctcataatgagagatcattaaaataaccagaagacaaatggcatcaaattaataaaaatgtagatcaaatgatcctctgttacctatttttgctcaattgcagttgagaagtacattgattaaactgccagcacaccattatggtcgtattcattactacagtgtaatccatttgattatgatagggtaataactaacacagccgcatagacagatgctcctctgcggctaagccatcatctaaggtggatctgcactgacaaacactgggtccctgtcacctagggtgcattgcactgtagagttggaaagaaaagatattccatttccctcacctttgtcatgtgactcacctcaccaggttcccacatggagcgtgcttgagttccactgtacagtgcataacgagcggggtgaggtgtaagagaagtcaggatttttttttaattagtttgtttattgactctagagccaatagtggatttgattgattcctcatctgtttatttatccattgggcttattaattcattaggtagttattattattcataggcagacagaagggtgtcatgcagaagttactgtgaaactggatagagcttccggatagatggctgggttgttaaagtgtttgctgtgtaagaatgaagacctgcgttcagatgccagtacccacctgtaaagcttggtgctgctacctgttcctgtaacccctggggaaaacgctggaggatccctgaaatccagtgagcagctgccctagcaaaatcaaggagagaacctgtggatggatggatagatagatagatagatagatagatagatagatagatagatagatagatagatagatgatagcaattgagaaagattcataaactgaaccccatatatgtgctccccctaataaacacaatgaatttactacttggatactttgggttgctcacagactcatgggagagtcaagtacattgaatggactgtcatagttagtagggagagaagtgtgcatggagattcatgtctggtaacatagagggatgattctgctgcagggaaggcacagctagctctgggagcgaaacatctggagctaacactggcaagctctctgcattagcagagagactctcgctggtgagcaaggctttccagctcaggtcagctccttcccccaatacctagtctcaccagtgacaacaaatgcctgtggatactgtcatactgccaccagggagcagtagtcctgtacaatggaggcttcatgtagaaaacactcagtagagggtagggagaaggccctatgggtaaaacagcttgcaactcaagtgttgagggcctgagtttgggttttgagtactcatgtaaaaataattggtgtggtcacacatgtgtctataagctcagtgctggctgtggggtacagagacagggcattaccgaggatggccagcagccagcctcaccaggacactgccaagctccaagttcagtgagagagcctgtctcaaggagaaaaggtaacgagtgatagaggtagatgcccagtgttctcctttagcctccttaagagcaccagtatataccactgcacacactcctgtatacacaagcctgcacagcacacatacagatacacacatgtatacatacacacacaagcaacgaaggtcagtgagcattttctgttcttcttatttactattttctgttagcattcattgctggtgggaatgtatattgtaaaatatgaaaataaatacagaagttcagagggagagagagagagaaagatagagagagagaaaataaaataaagacagacctgccatatgtttctgctctaataggcttggcaatacacccaaaggaatccaagtgagcatgccatagagacacctgtacgttcctgtttattgcaacactattcccagcagctaagttataacatcagccagatgcttatcaatggaggatgggtaaggacaatgtggcatgtatacacaatgtttcattcagccataaaggagaattaagccacatcatgtgctggaacttggatgaaatagagaccatcatgttaagggaaataagccagactcagaaagatgaatactggaataatgtgtgtgtgtgtgtgtgtggggggggggtgtcagtagcattttctatgtgaattttctttgtatcctccagtctagaggaataaccatcacccgcaaatcagccttgcccttgaggacagcagaacacaggcagagcaaacaccttgcctgaggcctcccagccagccaaaggcaaagtcaggctctgaagcccgtgttattacacctcgtgagggcaggcctttcacctgcatgaagctgacagtttcatatgctagaggtgttcataactagggtcacaagacaatcttaggggtcaaggttgcaaggcacatgcctgagttaggcaaatgagagtcagtctggctgaatggctcccttcaaaaccgccaagctgacttgctgtaaacgtagtggggaggtttgcacatgtttccaggaaggttgttggggttttgtttgtttgtttgtttgtttgtttttgttttttccagtaataaatctgaatttttaactgcaatttcttgattgacctgacaaccatattaattgaaaacaagtaaggcaggcagtatgaagtctgaacgcctgtctgtaagcaaggctgcctgagcggccagctgagagctctggtttagatcagggtgtgtctagaggccactgtctgtgctgggtgccccacattcttcctacctcatcatctgcagagacggctcactctctctgctacagtgggtgtccctgccagtttcctaacttcagttaacagattcctcaccgtctccccgtaggggagttggctttagttttccagtggaaccttccaccccattcctgagcctttggatctgggcgtgtgttactttgagggccagccgtgggcagccaggcaggagcccagctgagttgtctctgttctcatttccccttgcagctggggagaagcaagttggaaagtccccgtttccattctgtatcaacgtgcctttattaaattgctactctttgtatgtgccaggtgagggaggattgatcctgtaaagcagaagaggtaatgtggcagatggtgttacgggagaggcgttacctgaatctgtatgctgcaaatgttgaaaagaggaagtctatcccaaggaggcagtcagggaaagtccatgagcttaactctagctgtggctctaatttcaccaagtcaagagagaagacgtgggacagtcaccgacaccatcatcaatcactaccatggttatcattgcacaacgaccatcattaccactcaacacagctagtgcattgttcccagctccaggaccatcaccacccaacagccccactcccagcaataccatcattaacactacagccatcaccagacaacctccagcaccacttctgttcctctcacaattaccacatcactctcacaccagtgtgaccacttccaccttaacaaacaccatcacccacatcaccatgagacattcattaccttcattgctaccaccaattccatgctaaccctacaccaccgcctccactgctaacaactccataggcatcactatcccccccccccatatccgcactatgccatttctttaaccacctcccatcaccacctctatcattagcagcatttcaccattgtcgctcaatagtgagcataatctcgatagcccacactcttggcccctgcaaggaccctgcagcaaacaagtctaaggtgcttagggaacagccaacatgagctggctttctctaagtcatggtgtcctcaatcttccattgaatatataatatatttataccagtgatttgtgggagtgaaatgtagccatatatggagtccttgcagctgagccaggtgagaggcagccactcaataacttgccaccatttaaaacctatgggnnnnnnnnnnnnnnnnnnnnatttaaaacctatgggcctttctatgaacagatacattcagtcagcaggaagacagggcatacagcattcacaagctacgaggagattggatggggagaagggggagatgaagtttcctcctatcagaagcctcagttatgaggacattagggttctaagtcacctattggctattaaagataggaagtctttctcgtgacagcaagcacctccccctcccttacccacagcctccaggagttcctgagcttatttggtatgcaccatccagtgttggaggtgacatcttattaaacaaggtctgcctgcaaccaggcaagtcacaatgaagtcaagaattaagataccgcttcccatattgcctaattggattacagggatcataggaatgctgtgttgactataaagaagttcaggggattattgagtgatgacagtcctctgctgtccttcactaatcctgtcagtcagaaatagctcaagatgaagggagactcctctgcaaggagctgcctttctcgtttccaggtaggctcttggagggttgtggtgagcagaaatgtggtagagcatgtcagactatggtgacagccaccacaaccatgtctactcacacccccatctctggtccccttcacagtctagggtccttatccaaatgttaaacaattaacagatgtttctcccttgaggtcccacaaaaacctaccatgtaggctggagagatggctcagtggttaagagcccgctgaatgtctcacacccaactgtaacttcaggaaataaatgcccttgccctccatgagcactagtctgtaacttcaggaaataaatgcccttgccctccatgagcactagttttcacatgtacacacacacacacacacacacacacacaagaaaatagaaataaaacattaacattatttttacattatcttgaacttttctccttggtgaatagcatacccatcctccaagttacccaaatcagacgataaacggcttttgtctaattccttctgcctcagatccacaaggtcactctcaagcccagctcggaaatgtcttttctccccatctcttctgctccatatgttctgtagaacgctcccgtctcttgttcacaatgctgtggtcactctcaaactactcctgtctccatctccaattttttcggaatgaaagcactggatccagagcgagctctttaaatgcttctgctcacgttacttccctgctgacaattcttcggctataaacccagctagtacaatgttacgtgggcctcatagcccttcccaggcccaggaagacattgcgaatcaatccctgcactctttccagctgagcaggatctggacagagcttttctgagttagtagggttggcaggaaagatgagagctattcggcatttcagcatcctgtgccacctgcctttgtctacctcttttgtcttgcatctccccacctctgccagagaactctatccaaacatccctgaaccctggataggcctgactgacacccacaacccttctagaatgtggttctctctacctggattgtttcttctcacatggtcatgcctggtaagcccctacttcatttaagtgtcatcactgtgtacagttataagaaagtcttttccctctaagcccctattttccttcatctaggcccatctagggtgcagtgtcatgacgtacagaggcttttggtcctgttacctgcctcctgattagtttttcaagctaccgttgcaggaacggggacaggattatctatctttgcctgcctggtgcctgtcacagctccactctgagctactgcttgtattcagtaagggataaatggcactgaagtcatgcagaatgcttggcttctgccagacgtcagagttcacctctccaaaggcaccattcaacttcttcccagagatctacatggtaggcatggcttctttccattctaaaggctaaaatactaaggctttaagaaggaagtcttctgcttcaggctatatggaaatagaaccagacatatctaaactgttgtccctgaaaagagacctgcatctggaggcctttttcagattgtcacaactgaggggagggtactgccggcttctagtgggcagattccagaagtactggcagacatcacacaggcactgaccagttcatcaccagtggagaaacatctaccctttcgtgccatgggaccaaggaaaggaaacttggccccagcctctgcaagtaaccatgacctagaactttcccttgtggtgtgagtcactcagacctgttgctggggttttctttggttccaattactaagcatcagacactactcatatacaaccaggagtttgcatccctgtgtttatgcaagaccaggcaagccactaccagcactcaatttaccatacaggattctaagtcttggatcacatcattaaaacatcccatcctaacctaagattggtctctgtgcaagccgcgttcccaatctgcctgtctccaagagcttgccgctgaacccaaggcctcatgtagatctccaacagctgaaatgaatgcatgcagaaagctttgttttcttttgcagctattcctaggagcaaagtaaataagtaatttagataaaccccccaagaactcatactctaaatcagcctaagctaggtgaagtcagcagagggttaagagcgcctaatccattttcatcaggagagtttgaactttggtcatagtgagcaacttagccaagatatcacattgttcattattcacagggcactgtaacttagcgcagtctctgagtaatctttttaagcctgccaaaagaaccggtgttaattgcttacactggaacatatttgctgctggaaatgtcacaccgtaattatatcccatttcgctgtctgacaagtaatatactaaaagaaaattggctttcttattttctcctgcctcttcttgtgatgtgtaaaaaaaaaaaaaccattcctggaagccttcaggcagcacacaggttgcaagtttctggacttgtcacaaagtttgtcagcaaactttctggattggctgactcgttcttgcagacaaacagcccagctttgcatactttgtgccccaggcagcaacaggacaccctcaaggagggacctgtgccgagtctagggctccacttctgcatgcttgcaactcccaatacaattttagcaagaccctcacatttttatgtgttggaccctgcaattgatggaactggtcctgcaaaagaggaacaagcggggggggggggggcgggaattactgacgtatgatggataaaaggcaagaagtcattggcacttaacaagatagtgagaatttcagagacatagacatgtgtgtatacatgtatgtaagtatatatgtcctcattcaagctaatattaatatgacatatatgcacatatgtatgtgtgttcatgaacatttgtatgcacagttatcctcgagggatttgtgccaacgcctctgtggataccaaagatgcttaagatctttatataaaatgatgtcacatctgcattatacctatgcatagcctcctgtatacttagaaacatctctcgattgtttttgatacctagtataatgttaatgctatgtaagtaatcattaggctgtattgcttagggaaggataacaagaaaaacctaatattcagtgtggacactgtatttccatggctggctggttggctatggagagggctagttgtatgtgctatgtatatgtttgtacatgcatatttgttctctctctctctctctctctctctctctgtatgtgtgtgtgtgtgtgtgtgtgtgtgtgtgtgtgtgtgtgtgtgtgttttatcagaatcgctggccatgacatgagaccatgcagggcagacagtatgtctaatccagggctccttctggaaatttggcactctacttgtaagactaagcttctcttaatccaagggttcctaaggaaagggagccatacccagcccaccagctgtcctgaaagtcctatgaagcagagcacatctgcacccctcatttttgaggcacctgtttctgtgttctctctatatcctgccggggaggaaacaccatgacatgtgcacaggaggtgtctgcattcaagtctagaagatatgccagctccggcacttctgttttattggcaaaagcacagtctcttggccagacacaactgcaaggcatgctgggaagtaggttataaaatgtgccaaggaaaaggcaggagcagaatcggcaggaaccccaacaactctgcttggctgctctggtcagatggtgttccttcccagcatgcacatttgcaactgagcccaaggttttgggtcttcacgaagcacgtgtgatcatgtggtttattctggcagaaaggtcaccttcccggggctgagaacacttctccaggaagcttttctctgagaacgtggctgcgtacctgacagggatatggggcagagggggaggcaaggttagtaatttagttgtcactggctgacaggttagtcttagaatatgttccctgcaattcaaggcttgctagagagagacagagagaggcacttaacaaatgtcagcccttttttgtaaactgccacagctgcctcatgctgaccctgaagcagttgaagagttgtctgcagacttccatcacctcctcattccactcgcactggtgttctcttttccttaatgtattctttttttttcagttttcatacaaatacatattgtatgttgagcatagtccccctaatgccctcctccagtcctctctgtctctctttccctcccactattcccctttgtacctaggcaggtacgggactaggatagtgttatacagacagacacacatttggacagaacacatgaggtacctgctatcctaagaatgacttaatttgcttggctggcttctctccagttgcatccacttttctgcagacaccaccctcactgtgtgtcctgatccactactctgttttgggtgctccaggttggctctagaactttacaatagcaaatggggtggtcacaaacactaatgtatgagtatctcttcaatatgttgagttgcaggtcctgccaataaacacacaggagaggcacagcagaatcatctagtaggtctattcataggggttttgatgaggttctattctgacttccaccaacagtgtagaagagcttctctcatccacatcctaaccatcatttgctgttggctttcctaatgcctgccattcctgcccaccccctggtattcctgatactcaccaacaggaagagcagccatcttggtcactagagagggctctgaaaacagtcaggactggaacacgggaacctgtagttttgctcgtttcccaccatgacttattaagagatgcacggttctgcgatgggatctcagcctcagcacctgacttgctgaccagctgagcccttgctgttgcagccatgacgcctcggcagtcaacagtccgacagttcctctaggtctgtgtgcaagtctgactccctcagttctcatacctacaagtttctccagacttcataaatgtccgtgggatgggaaggactcaactgcccctatgtaagacatgctggtttagagcatccacgctatggtagcttcgagaaactctgttctctccttatggaatctagcatctggatgcagtcctgtgactcaatctctcaaacatgtgtagaaatgataactaccttttatcctgccagttgactggatctgtgttcatcaaagtcatctgatgtcctctgtcacctctgtcaccatcagagagacccaagagcataagatggaatagccatagaagcaacctggatatagtgatggcacctgtgtcttgtgtttgaattgggactaaataaaggagaatgcagctaaccagctaaccaaaaccacagttgacaactcgtatgaccataacacacatgtaacaacaggttatcaaaaatgtccaggagtgtggggagatggcttagctcttgccactcaagtatgagaacctgagtttggctcctcagcatccaaacaaaaagtcctgacatagtagcacacactgcaacactaggaaggaggacagaagaggattcctgaagctcattggccagccttgctgaatgaatctgtgatctccatgttcagtgagagcccttgagtttaaaattaaggcagagagtggtcgtgaaagacactcaatatgggtccttgcacatatgtgcacacccctacacacacacaaatacccaaacatatatatatacacaatgcacaaataacaaatacacagaacacacatactgacaaagacaaacagatacacacaccacacctaggtggctggccctggtgacagcttgcccaattttcactcctgttcctattttttgtaaatggcagtttcaacaaatcctgcccactgatgcattgtttaaccaaatgtcatctctctgccttcctcatttaagcatcatctgttaggtttacacattgatacacccatgaaattagcattacacttgtttcctcgtggagctgactaggtttaatttaattgaagctgttgtcactgctgatagcctttggaagctgcaggggcgctggttgtcttagcttaaccccgtcctgtctgaagatcaaggcttccttctctccgggtgatctgtgacctgtctcctctctagctccttagtaggtctttccttctttagaaaagggtcccaagccataggtggaaagtcattcttccctgtgctgggaaggctagtatgatgggacaggaactctcaaaccagtgactgcaaacaccgcaggcaagtgctggctgccagaagtggctctgaatgtgcaaagtgaggcacagcttcactgagcctttcctcattcagtaagagcctctctgggagaggctgtgcagaggctggtccactgcctgactttccagtctgttacctggtaatggttcttgataattgtcccttaaatgaatggcactgtccctccacctgaccctaccacacacccacatttgtattattgcttttcttgttgctggtaccaaataatgacagaagtaatttaaggtagaaagggttggcgttggttcacagttacaggatgccattcattatggtggcaaggcacaacatctagggcagctccatacatagcaatgggaccttgaggtagtggtcatacatatctctatggaccagcaagcagaagccttgggcagaaaacagaagtggacataatctttaagctctgcccctgaccaatgactccagctgaataatacaaaggacccatcctttgtattattctcaaattgtgtcatcagcttaagagcaagtgttgaaacacgtgagcctacgggggacctgccatagtcaaaccagagcaaggcctagctaacttacggcatatgtggctattttccaaacaaatgaatgaatttctgctgctttgttcttgaagcttcctaagatgacctttgcagtaaccttcgcctgctttcacccctcgggatacccaaggtggtgcactctagtcagtcccaggaaggagtgtgaccttcacagacagaggacataggatgagctgaggggacagatgtgacctggactgggagcaagatgagcacagtgtgattgaataatccggcccacatctctgagaggcgtgcgcccagcagaagcttgggtgtgacctcagaaggcaaatggggatctttcggcaggtgagacctgcagatagatgaatgtgtctgagagccatagcttgcaattcacactctttcctagtacagcccaggcacagaggctcctggctttgaagccaatcaaggaagaaccaagaagccattaactatatgctcgggatgttttgattattatactacaaaattttctacagtataggaaattgccaaattacaggaaattgccaaaatctaagcagaagtatcatgtgtgcatctaagcagaagtatcgtgtgtgcatgcacacacacacacacacacacacacacacaccatgaacctctcctctcgctcactttctttaaactaaaaccatcttccctttcttcagtgatgtcttcatcactgttgtgcaatggcggcttctgtgtgtttgtgcgtgatcatgagggtgtgtgtgcacctgtatgtacatgtgtatgtgcacataaacatgcatgtggaggtcagaggacagctttgggtgtcgtagcatttttcaggtaccctttatttgagatctttgacgctcactggcctagaattttaccaactaggctagactaactgaccctctagcttccaggattctaccttgccctgcttcgcatcacgcaggttcatcaccatgatcaacaggtaacatttcatccaacttcttccttgggttcaggaaatctgaacccaggtcttcacgcttgcaaggcaagtgctccacccactgacacatccccctcccaacctcaccctgtgataccttctttacctcactcccacttcctcctgcctcagctcttagcttcactctggcttcctcagaaagttctggaaacttccctagaagcattgccttctccctatccttcttctttgcagctggcacctgccctccacactccagcctcaccagactctaggcttcctggagacaaaatcagatcattcatttgtgtgtcctagcacctgacagggcagctgctcacagtacctgctctgtgaatattgaaaaagtgggcaaagagagggggttgtattcatctatgtggaaaagacatagagcatattgctgcgggctggaggcatgctgcaagttgaaatgtatacagatatattacatatattcatacatgtataatctgtatgtagaactgtttctaatatgttcaacagctagataaaccaggatattgatttctttctctttcttcttataatttttttttcatttatgtgtacatacattagctagtgccatagtgcatgtgtgcacttgcatggttcatgtgtgcatttgcatggtgcatgtgtgcatttgcatgctatatgcaccggcttgagttacttctctccttcctcctcattgtagattccaggaattaaaatcggatcgtcaaacttgacagcacttgctgagccatctcaccagaccctctttcttatttttttaatattgtcttatgtgcttgaattttctgcagtctatatttccatattccacagtcagtcccaggaaggcgtgcgatcttcacagacacagaaggagtgtgacaatatagacagagaaatcaaagaaaccagtaaaagcactcatagaaggagctgaagctctcgtggttaaataataataattcccccttgtctttagcccaggacctcagctcccctcatgcagtctttggtctgtgcattccagccccacccaggatagccatgacagaagtggatcctgggatgtcctgctaccacaaactttctcaagtgtacacttcaatatccatttctttctgcaccattaactcacccagtatgtcctgggtgtccccaacattatcaatctgacatcctggaagtccactgatgggaaaaacaaacacaagggggcacatagccagtgtattgggttggcctctgtggataatcactgttgaaataaacctagctcataagtcaggtgccacatggtggggccctcgcagaggaccctgatgctgagattcacttggcactctggtttcatgggggccatgggtagaggtagttctagaacaaggctgcctggactgaagctccatactcactccctgtgtgtctcagtttccccctttatacagcagacatgctgagttcacttgcaagtgtttgcaagggtccaatgagatgggaagagactggcttaaggaccagcccaaagtgaacagagcttgaagactccagtctgagttgggcaccgtgacagctttaacatgacaaatggttgccagtgtggggaaatgtcccttcttaaaaagctaaaaagcaagcacctgcagcgcatattcatagtttatgatcaggaggcagcgttaatggcccataatgtgattactataaggatttttattaggaaaattccaaccaatttggcattaattaatgtactgttaactttcgagtgttactcctttagtccttggagagttggagaaaataaacctgttgtcaaaacccttaccctgagaagtaaataagagttgtttgctcctcgagaggcccggagtaataaaaacagatgagtcactgctgagttcagtcggtatttattgagtctgtgagtcccttcaagagaggaaagaggggacagagatgaaaatgtcaagctgcgaacaattccagaaagaacctggaagcttccatctctgggtcaaaaggcaagaagagcatcttggagctgtagccacattagcaagaccttgagccacaggatgcaaaaggctgcacagaacccctgcctcgtgcctgctccccactttttgctgcaaagctgtgcactgtgtgatggcaattgggaatggcaaaacgggtcctgcccatattccatttcaccactgtggaaaatgagtctgtggaggagctctcaatgcagtccttagaatgattcccaagtccccaaataactttgctcctgtatggccattcttgtccaatgcgatgcttctacttggtctctgtgtaccaaccacatgagccttcctctcatctaccatgctggtgtgcactacaggatgtttgcctatgctgttccctctggatggagattcttttccttcactcttgtccagtgacctcatcaatcattctgtagtcggcagcccataggccgtgtctatacccgactgaatagtaattagattggtagggctgccataacaagagaacatgagatgatgggcgccttcaaggagagagatgcattatcccaatatttggaaactatagttcaaggtcaatggtgccagcatggtctgagttgtgacaagaactctcttcttgaattgcagatagctgccttccttgtcttagagatagtaagcgtctggtatgccctcttaataagggcaccaatcccatcaacccaggactccacccttttgacttcctttaacccatttgtcccccttaactgagtgtacatctccagcaccatgacatggtaggctttatgacatgggtttcagcatcagaaacgccccaataattcctgttgatggtgtctttgataacgatcctatttccttggcactggggaacagaagaagggtttcataatgctaaattctttggtagcttcatggaaagaaggactgaaatagtgtgatggaggcaaggttggagcagaacatagaggagatgccctcccttggaaggcatagtaagagtcgcaatgaccaccactgcatagtctaccatgacaaatctctcctttctgggagcaaaagcttttgcaatgaacattattccccgatagcccagggcagcatctacctggcccattctagtcactctttgtcccctgggcagacttggaagctgtttgggagcctagtgatactaaatgccctgtgatgtgtgggccagccctgtctactcagccatggtgatctctaaactccagtggccccgccagacaagcagtgcttgagcggagggaagccagaatatgtactgaaccaccaagttctttctcttcttccccggtgtgtatgtgtatgatctgtaacatgcatagttatttctgtgaatgcatgcacttgaccatgtgggaatgtgtgtctgtctgtctgtctgtctctgtctgcatgcgtctgtatctatgtatggactggtagtctacttcagatttttttttcagtcactttccacctttaccttttgagaaaaggtctctcactgatttgactatgctggccagtgaccttctggaccttactttctccacccttcaagcacaaggtgtcacaccctatgtttgtttttttgtgggtgttgttgttgtttttgttgttgttttatatgggtgctggagatctgaactcagattctcagatttttattatgggtagtttaccaattgccccatttttccaacctcaaatttgttattgttgttgttgttgttgtttgagaagatgtctcacatagcttcaaattgactaggtagccaaatctggctgttttcttacatggttgaacatggatgtttaggcctaataatgagatttgtatcccagttctgcaggccagacgagctacttgctctgagtctctgtttccttatctaggaaatggaggtaatcagttctatccaccattgcagtgtggggagcagatgtaaaatcacacacccagcagggcacagagtatcacatgatttttattataatggccctttcatccctggtgcctggaaaaggccacaccagcaaggtagaccagatctcatgggctgcaacgaagcattttcacagatgatgtgtagctggccaagtgactgggacctggtgaattgcggggaaatgtaccatacgccatcaatatccatcccaccagtttccatttattgagccgtacatcattagaatatccctgggctctccacaataaaatcaataagacggcgcagccacgggctgtggtttaataactccaaacttgaatagggggaaagaaaatcagtgagcaggaaaatgtcctgagtgcttggtcagagagtagagggagactctttttggtagtgtgtgggggggggggggagattaagggtgaaccagacatagactctaggtagaggaggggtctggagagaagagatgtgactgtttaaatatagggcatcaaaggtaggtgccaggaagtctgagcacattattgccacctgagaacttccaaggaaggctcaatccaagcacccaacgtcatctcaggcttcacaaagggccccttgcatgaccactagatgccttcattgctctacaaccaccaccaagtgtgtttacacaaactggaatgttaaagcctccccagagagtgtcatcttaccagactacagacttgtgtgtgaatggcccatcctacacctaagtatcatcactcaacataggactgtacttaattcaatatttgtcagggtgagaccaaggaaagatttttttttatttatttttgcttttatttgtttttctgtggtaccgagaaatgagcccagagccttgcacatgctggaaaaggcttgcccacctcatagctagattcaaggccagcattgttttctagatcttatttgcttgtgctttgattaggatgtccatatggttctggtatgctggttggggctgagaatcctggacctacaccagtggttttctattacccttgtcataactaccctgggagagggcttatcacagctcagattttgttccacacactggagagtttctgacttgggagacctgggcgagggctgacatttgcattttgcacaaatcccttcactttggtattgctgctatccgaagaccaccttttagaaatagctgtgggtcattacttctcaactagggaagattttgcctctgcaactccatcaggcattggataatgagctgagactttttggtttgctcatactgggcaggtactcatggcatctagttggtaaggcgggaactgcctaggacagttcccacactaaagagccatctgtaacacacacagcaacacagccaagctggagaacttcatccagaggaggtagtggttagaagtactggagaatggacatctgggcttcaggtgtgcttaacacagagctgtagtgagagctgagctgcctggactcctgttcatcaaagcctggctgtgatgcatatttagatttaaggcagaccctagcctgacctcttgtctgtctgttggctctgtgatcatgagcaagagcctcaccctctctgagcctgagtcagtgatctagaaacagatcatttctatgtgcatcactgtgacggaatgctggaaaaacagcctggtagatgcttactgtgctaaagtcaaaataaaactcaagaggtggtttccacacagatgtctccctctaacagagagatgactcctccaaaatcccacctcaaatgattcccaacaagctcttccagaaaacctggagtgagcaagggccctgcgccaggaaaagtgaatattgcctgaacctcttgagttcctctggggtatcaaggactgcctggcatcacccggctacgaccttgtctcacacacaacacatcctggcggggaaggaagctggtagacttaagtttgcatcatccatgtgccttcttcaccacatgccttcaccacctgctctgctgtatttactacaatagttcacctttgttttttacttcagtgggagcagggcaaacaaatggaagcttctgttctcctggagctgaagttataggcagtgtaagccacccagtgtgggtgctgggaactgaactcaggtcatctgcaaaacagtacatactcttaacctcagagccatttctccaacccaacagaatgctcatttttatatgtcctttaacataatttaaatgcaagatagataggtgggtggatggatagggatagatagatagatagatagatagatagatagatagatagatagatacgtacgtatgtacatacatacatacatatatagatacatagatacatagatagatacatagatagatacatagatagatacatagatagatagggtatgctcattgggactgtgacaagaaaagaaagagtaaaaagaaaggctgagatggttttcccagaatggaactatttctctggagacttaaagatgtcttcctgactctcattgacctggaggagacccagttgcagctgccatgttgggaactccttgggcacttagctggttcctcccagaggctttgctctagagcaaagaaaggtctttggcctaatccaaaacctctaggaaagaagagtccagcctccagccagtttgctgggtgagcaaacccagccacgtgcaggagttcaggctgagtcttgcacgtgtgcctctagggatatgtgcatggctgaagctgtctgccttcatccgtcagtcacaaactattcactgagcattcaccaccaagcttagctgtgtaccaggcccagaggccaggacgtcctacagacaatgaagcacagggacagacaactctcaggaatggcaaccttagatccaaagagtaccattcagacagggtcagttccgtgatcgccttagaattccaaggtatccagttttttccacaaaatttcagaacttttatttctctcactggtaaaataaagcatgggtcctgagcctggcagacccaagtgtttctctccagcatcatatacactagagagggtaatttctcattcagcagtagggggctatcatggtacttacctccatggatctggagataattaaataataaactgcaagagggtgaggggagttggctcagtcaatgaggtaagtgtttgtagctcaagcatgaggtttgaccctcggaacccataatcctgggaaagtagagacctggtgcttcccagctgatcacctcagctaagacaatgagcctcaggttaaggcagagattctgtctcaagaaataaagtttagagcagtcaaagaacatacctgacattgattttgagtctccatatgtgtgagcccagacatgcatgcaacacatacacacacacacacacacacacacacacacacacacagaggtgcacaacccacagcccccaccaggcacacaattgcacaaaagccaacgatgtagttcaaaggtacatcacttgcatactatgtacaataccctgggtttttatccccagcactgaaaaaaaaaaatttcctagtaggaaaaatcctcccttcttctgatcctgacgatgagcctacgagctcagggcttctgccacacccatccttcctacatggtgctgttgctgacgtgtgactgcctctcatctttgaagggttggagacagcctgcacaccacacattatcaatgaagcattagtgagcagagaagttggctatcttccagaagctctgctgtgaaaagctgaaccctaaaccccgttccatgagcctcccacgctatgttaagctagctgtgccccagctcacagcttctgacccaagcccatctgcatgcaaccccatttccacttctctgcagtccaaagaactaagtaagccagaaaatgacactctcccatgccaggaggcactttgagaatataaacagaatcaacagagagccttgttggtagagtctattccaggccagttgcttcttccagttgcttgtgatcagaggcagatactgggaagaaacattctagatgtgggtgttcacttgtgagcaggggagtcagggtgaggtctgctctaacctgagcagattgttaggaaccaggccagccttggactctagaacccctcagggctgagctaactattgtttgattctaacaattgtgggccagtggctaaatagaaatggtccaattacactttcatttgctgagcatttgctacaggcttggtcctgtgctcagcactgaacataaacaaaagggagggaggtgagacatctatgcctacatccacatctatgtgtctatctgtatgtgtctgtatagatagctatatccattcagagtggagaacacaaaggcttgcagagatcacataacaccacctaaaatctcaaatttatcctgaccacaggccaaatctaaaatccttacgtgggagttaatagaactctagttaaaagcacatcctattctttcaggggacctgagtttggttcccagcatccatgttggtaactcacaaccttataacttcaacaccaaggaatccaataccttcttctggttttcataggcactacatttatatttgcaaacccatacacagataaataattgaattttaaatctctttataaccccagtgtctttctttcatctccagattaaaattctacaaggcactccaaggcactccaatcacaaacacacccagcacatatatagaacatatatgcagtaccaacccctgtccttcaggaacccattccaatatagaagttgcctgaggccagatagcactacacacctcaacatactccctcctccctgcccatcccctcactgagtgtccatgattctgatataagattgcatagaatttgcttgtagtcctcaaccttctcttgtagaccattgctagattattcaaaacacccaaatgcagtataactaattgtgtttagagtagaacagtaagaaatgtctgtatatgttcaagagtggcatattatgtgtacatgcatgcacatgtctctgtgtgtgcagatgcatgtgtcagatacttacaagcaaggggaccttctcaagtgtcattccccagacattgtcttgagatttttgttctttacttgttggttggttgttatttctttttttatttttgagacaccatctctcattatcctggagcttgccaagtagactagactggctttcaggcattcttctttttccacctccctagcactaggattacaagtgtgcacttcctggggaattgaactcaggaccttatgtgcacaaggcaagcactataccatctgagctatctccctagcctgctcatttgtgtttaaaataaaccttttcagttggtagttggttagctctacaaatacagatcccacagatagagatgaatgcttgcttcctgattcttttcttacacacacacccctataaaacatttggcttacagtgtaggcataatgataagttcatacaaacaactcataactggatagtgtagtcatagaaatacccctaagttgtttccttctggaatttttgcacttgattcttttgaacagagggtagcataattgatgccaaggaaggtgcatgtcatggaggacaagctggcctttgtggctctcttcctgtccccatccttgacacccaagggttgcatggtcctcttatagcccatgtgatactgagtcatgctgagttgctataagaggcttagcgtggcccaccctgttgccaggggagctgctgggctcctctcctcagtctttactcctgcactgccaacgcgtacttgatattctcccccatccgtgtggcttttagcattcatccagagtcgcggcttctctggctgcctctaatcactctgatttttccacttagtttctattttatgccacaggaatctgattacattgttaagttcctgcctctttcttgggagctggacagagtgtgagttttagcctttcagagaccctatctgaagagacccacatgactctgaccacacaactttatctatccaacagatggagatcagctgacctgcttctgagaacagatgcccctcctttatacagtggggacagttggatggtgcagaatgatagtgtttaggatcctgggacacagactcaatctgnnnnnnnnnnnnnnnnnnnnatgaatgaatagcatttggtatgataggatgtcagatggggagttgaatggtttccctgagtttggatggatggatgaagtaggtgggaggggggtggttaggttgttggagtgggtagatgggtaaatggattgtgtatgtgtgtgtgtgtgtgtgtgtatgtatatctgtgtgtgtgtgtgtgtgtgtgtgtgtgtgtgtgtgtgtgtttgagagagagacagagacagacagagtatatgtgttgtccatataaaatgggtagataggtagattaatagttagatggatgagtgggtaggtagatgaatgaaatgagaaaatgtttgtattgatggatggatgggtagatgcaatcaataggcttatgcataaatggatatatgaaactttattggtcatctagagtcagttcctcatcaaatacagaaattctttaattaacccttttaaacgcctctggacccctgccttcttatctccaataacttacaaaatatttcattaacaaacaccattgtcaacttttcaaagtcttactgtgattgtggagtctaagttagtggttaagggcctggtctttaagagctgggtttccagctcagcttaactaattaaagctgcatgaccttgaacaaatcccttggcctctctaagccatggcttttcatctgaagaatggtggtaatagcaaccttgctgggttgtcaggacgattaatgaaataatgagatcaaggccagaccagtgctccaaacaggtattgttattgggcagagctggcatgtccactcttgaagcttttgttcttcacagagcacctgctgtgcgttggattttacctgagcattatgcatctgatggtaaataagaaggataaagtccctcatctcctgcaccttatgctctagcagaatgctcagataataaacaagcaaacacataaacaacttcagatggtgctaaatgatgtgcagaaaattggaacaggtaaagtgagagatggagagtgaagatgatcttttattggacttgggctggtgacaagaagttgttgccattctaagctccagggagatggtatccaggaacgaggaatcactatcaaaacgccccaagataaaggagtttgtgtaggtaaggtaaaaagcaagaaatcaaggagtaagctggtcacgagactgctcagagcagaggtcagaggagaggctgtgtcaagtcgaaagcccaaccctgtggtttagacattactcctgttggttccagggggggggggttgtttggtttggtttgatgattttgtcattcataaaaaataggtgaatgatttaaagcatgcaggtttcactatgaagcctagactggcctagaatttgtgattcacctgcctcagcctcccaaatactgagattacaggtatgtgtcaccatcctggctttgaacatccttcattttaatcttgtcccctggaaagagccttcatctgacagccactaagctttctggtagccgccaccacacactcccactcccgggctactgaccaccaggctgagcagactgcattctcaggaacctcagtcgacactctgggcacttgaaaccatagcaacctcagtctggatacctgaaaccatagcaatgttctggacctcacaagcccaaagtctgccaaaaataaagttaaactacaagagattagatcagtctgggagatccagacagcaccaagtcagtgtaacttgtaacacactaaaccgggagggtgttacacactggccttggccctggagatggggattttctaaggctgatgttgagataagaggtgtctggaaccatttatccaggtggattggggataggatctggctcttcaaaggtaacatatgatagtccgtgagagtggcagatctccagcctggatgatctggagctcacccgggtcattagggcttagatagcagcagcagcctctcagaagagcttccctctgtgttgggtttcttctggcaacgtctctccatgtaggaatggaaaagttcttaccatcttccagtttgatgtgcagcaagaacttctttatctgttagctcccacaaaaacaaaggcattgtctccttggcaaactgcttgtttgactcaaacatccatccaaaaagtgttgcacgaaggaagtgccaagttctggccagccagtcctgaacactaggccacctctggattgataatcaggatgatgcttcctacatctgtagacggagcaggggcaagagaaggggtcacagaaaatgtaagataaagggctgaggaaatagttcagatggtaaggtgcttacagttcaagcatagagacccaagggcagatcctcagcacctacgtagccagttctgcaatcctcgtgctaaggaggcagagacaagaggatcactattgccgtgatgaaccatcatgaccaaagcaacttgtggagaatagggtttatctggcttcaacatccatatcactattcatcattgaaggaagttaggacaggaactcaaacaggtcaagaacctggagtcaggggctgcttactggcttgctcctcgtggcttctcatccttctttcttatagaaccccaagacgaccagcccagaaatggcacatagtgggctgggcctttccacatccatcactaattaagtacagcctgatcttctggagcattctcttacccgagatcctctctcctcagatgacttcagcgtatgtcaagttggcataaaactagccagcacatagtcaaatgtatgtatcagtcttttcaaactcctgtggcatagagagaacaacataagccccgcagagtctcctaccacctcctatatggacagcacaggggtctaggacttgcttgattcaactgactcaagctctaggattctatacagatgctatcaatgttcctgtcccaggggaaggggaggagaccgttcgtactttctaaagggcagaccatcctcaacctcgtctctatggtcttctggttttccctaggcaaagccaacaagaatgtccagtgggatgaggatgctgtggagtacatgcctgccaacccagtcagaatcgcctttgtcctggtggtccatggccgtgcctctcgacagctacagcgcatgttcaaggccatctaccacaaagaccatttctactatatccatgtggataaggtaaggagccactattcatatccctgtgctgggcttcctctgcagtctgtctgtccatctctgatccttccttccacctcccaagtccaggctgaagtttagagatagaacagcagcatgtgattcctaagtgatctgagtttgtgtgtgtttgtgtgtgtgtgtgtgtgttagtttcagaatgtttcattgtggtgctcagtttttcctatagaaaagcttggttgtttgtctttttaatcttcctcaacacatgataattacacatatttattgattaaaatttgatatgttgctatatgtatgcacagtgagctagtcagttcagaaaattagcatatccatagctttaaattcctttcatttctttgtgctcagatcattccagacgctcccatgggctttttacaccatgttctgcattgctggtagtgtttgtcttcctcctccaaaacataacataacacacacacacacaaatttcttaggcaaaacctagctgtgctgtgttttgttttgttttttacctcgtcctttccctgtctagtgcacactgcctgccctcacagatctgtgaagctagctatcctaggagtgagctcactttttctagagaagtccaggtagttaaaatatccttttagaccatatgctaatcagttcttcccttgcctggctgcagacacagacaactgtcaatcaatgggcgtgcctgtatgctaatacaaccttattaccaaaactcatacttggcttgctgacccaggagccatcttttcctagaagtcccattaatctgttgatgtcacaagatatgtgcatgtctagaaccctagagcgcctaaggcggaggcgggaaggttgctctgaggtcaagttcagccccattcttctcagaaaagcacaggttgaggttctaagacagtggtagaattctcacctagtacaaggcccagttatagctttaacactaaatgaatccaaagaggtaaagggctattttcatccctaagatgtgtttccagtcaccatgtgaaacagtaagggaagagaggtggtcctgaaggacagaacatagaaaccccatctcttacccacaaagactcatcaaatttagataggcccgtgttcttgagcttgatacgttgagataacatgcagcagtcatctaatatcatgtagtgttctaggtccatcacctcaagcccactggttaactaactcagcagtgggcttaaagaatatcaacttaagtagccagtggttaatattggtatagaaagacactgcaggcaagcatgacaacagccagttccactgtgctcagacacaccagctacaagggacagggggagttgggatgtccagtggctgatgttctctaatctcctttctccttctctctccttggaaaagcgttccaattacctgcatcggcaagtgctccagttctccaggcagtacgacaatgtccgagtcacctcctggaggatggccaccatttggggtggagccagcctcctgtccacctacctgcagagcatgcgggatctactagagatgactgactggccctgggacttcttcatcaacctcagtgctgctgactaccccatcaggtgaggcagttgccggctccaagccccagttccagggtcctgcttccctcccctcttcccgtaacaacagtgaggaaacaaaaaagcagtcagcttcctgtccagtgaagcatcctgcatctctatgagatgcagctagcattgcattcagagagcagagggcagaagtgggagtgcattgtattcctaatgaaaaaggccaggagaagccttgtgaataacaatagaagatgaactagaggtgctgccttggaaagtgttccatggcagagaagagctgggccagtcctccctgaggcaggaacatacctggtgtgggcaagaggtggttgggcttggaagtgatgtaacagataatgagggatagagtaactagacacagagtcagagagtactcctggggtatgtcatcaaactgttactccaagccaaatgcaagtgtgttttgagcggaggaaagacagatctgaccttgatgttgagctcaaagcagcctattagaatggcagttgcttaaagcagcccaggcaaggtcacatataggaagtgagaaagaccctaaaatatattctagagcaagatgtgcaatcaaggatggaacacagaagagcaggaagaacattctagaccaagctttgtaagccatgcactattgatgtttgggctggcaaattctttactatggggcttccccttgccctgtcaggtgtttatctgtgcctttggtctttacctacgctcctaatagcatgttctgcccacctgtattcttctcacacaatgtctgacgatgttgccagatgtcctgtgggggcctagatcacctacagctgagagtaccacttctttatatgagaaaacataatgggcaaaattattaataaaaaatgaacattttgcatctgagaaatctaaaactggatggagtttagtgaacaagagcctgatgaaaggtgactttagctaaacaagaatagggcaaggggttgtcttccaataaaggactgaattcagaaatttctccaaaatgcagtatatagcaactactgcgggagggcattccttgagccttttagagaacccagtagttaggtggtcaaactgaggtccacagtcatacagtgaagacatgacaaagcaaggattagaaccagttctgtccatttccaaagtagatgttctttctgcttgaactttacctcttgggaaaatcgggagactgggctgtctgtaagctgcctagaaaatgcagaaggaagcaggacaggtaggcatacccacagctgccacccccaatgctttgcattaattgcagtcccagctgtaaccatgaccactcacccaggagggtaagggtctgagaggatgcaggctcagactctcaccagactgctcagcatggaaatccgagatgagttatcaaagcagcagcagacttacagagacattaattcacccatgtgataccaagaggcagtaacagactctagcagagcaccaggcattgcaaggcacattgcaaggtgcacatcagctgttggcatctaagttgcagccgagtttgcattgtttatctttgcaagggccccagctgtctttctcagaccacgtgctgaaggtgtgttcttcctggctcctttagctttacaactcagtgtttgtgtctctgcctggcttgctcttcctccgtctcccaggtaattgccagagcgtccacccaccctctcagctcttctgcgcactctgtcttgtcagcctcaaggctagcggcagctcgtgctccgggctctgctatttcctcttgctgttgtttctatgaagtcgccccacacaaaaacatatggattttgcagatgaatggtttcatcctgggcaactctgataggtttcacgttccatctgctgttccatctgtagcttctaaaacaactccttccatcccgggaagaataagaaagttaagagctttcccaaagtggggtggaagtgcccactttagacattttcaagaggctttgaggacttcgggagtcttcacggacagaagcagcctgaggtatccactctgagtccccctccccctgcccaccattactgggcgtacagcctctcttccgaggtaattaagactcactggcatgttagctcctggacacgggtagccatgtgagttggtgcatactacttcaattgtgtatgctttaattttctaccttaaaattgagcgtggcagcagtgcttcttgcaagagattgttgggggaggaaaatgaaaaatggtcccacagaggcaacacacagagcctgatgcatagcaagttctggataaacactggctggtcacagccatggggtggtatgtgtatcacaggcaggacttcacactctccctcccttcaaaatatttccccctttcctctgatggagtgaaaagacaagtgattatttcttgactctcatcccttcccaaggtgtgaaaggcagagtgagtctgggaacagtgtttcaagagaaaacaagacatgattcgtgtgtaaaggagattcatgtgtgggtaatggacagactaagtgtgctcacacaccatgctttaccgtcccgctgttgatggcagtactgccctgtgtaagctctggttgaaactagtacatgcacaatgtatagttagacatgagtgttcccaagttctagttctcatcaaaaggcatgctcaccgtatttctcatgtcttaccaaccaagaaagtaaccatacctatcgtccttttgactggccacatgtatgtggggatgaggccatgaacatttctccctcttgtttggtttggacctgcacagagacatccatcgttcggacttttgctttagcaaagggtagaaggttgaatatgtccacagccctgctcagggttcatactctgcctgtggtgtgtgtgtgtgtgtgtgtgtgtgtgtgtgcatgtacatgtgcatgtgtgtagcagaagctgttgcctatgggaaacagtgttgggatatttaaagctaaatccaggatttgccttttctgcctcttggggacacagggctgtaacatgtagcacatgggatccactatgtagacatataagttttgttaatcatagacgcaaacctgtgtcttgagagagtaccagtgttggggaccatgtacttgaataaattagcaaatgcaagtagataagacaggaagcaggtagccagacctctctatgatctctccaaatccgatctgtatgagacctaacatggaagcactcactgcatacctattatgttccataacctctgttggggaatttaacacatattttgattctcatcctataaaagaaagatgtataagaagcctactagtagcttcacaggcttactgtgagtcaaagccttgtcaagatcagtggtttaacagacatactgtgagtcaaggatctggagcagagctgaggtgcccaaagattggaagtcaatgtgggcacccaaattctgtgctcagtcattcctatgtcatcatcccttccatctctcattggctcgtgggggtagaagaatccctgtgactgacatcaagaggtagtcacagacaggagtgcacagcccatgggtgcacagtgctttgtgggcgccaaccttccaatgatgctgtaggcaaggtgtatttccggtgtaattcttgcttactcctgaatctctgctgaacaggagagctctctccagcagttctggttgcctgggacagaatcagagtcacaaatagaaatcagagactagggtttgaaatctaagcttcctttatcttcttcctcttggtcttactgcccaacctcttgtagagcaattcgggggtatattgggggtggaagagttcaagccgccctagtgaggccagtggagagaaccctatatacccatgagtgaattcagcagatgggactccttttaacaaacccagaggtttcataggtctactgtgagtcaaagtcttgacaagatccagtcaaggtcttgtgatcaaacagaagagctaatagaacaggaccttgagttcacttgttaatctgttgtttccccggtgtccacactaggaagcaggagatcttatgtccatcttgagatatagtgttgatggctatgggagaagagatggaagggcccacatagaggtaggaaaaccatggagaaggtcagtgcttctgatgctcccagaaccatatcaacagaactgctctcaatctccaggcagaggcaagcatccagaagccataggagcttccagaatccatgcagccatttagcctcacagctaatatggccaggcagccaccttctgcttggggaactcgagccccacacctgcgcagacatcctccttcaggagactcacagagcatttccgtgggagatggagcaagaacagaacagcccagtgacctgagacaagaatttggcagagcaggttcataagagttgcttgtgagccagagaaatcacagcctatagattcgagcagaatggaggttgtttggaggtgtcttctcttcgtttcctcagccattttataattatggtgaagcagtatgtaacttgaaacttactatctctgtcatctgtaaggatgcgaatgagtggtgctgagtgtgtgttcttgttgggcaatcatcacacccatcatcccaagggctgtcttgaccttgtaacccctcccaccaccaccctcccccgccacctccagctctagtccttggcaactgatccatctctatgagtttgctaactctgtggaccccgtgtgagtagactgtgtgtggttcgtaactgtcttatttcacttagcagtgtgtcctcaagtttcagccatgtgcacttgtgtcagaacggccatctttttaaaagttggtgttttctgtgtgaccacatggaatgattctaactttcaactatttggaataatgctgtcatcagccttgatgtagagatatctcctcaggacactgtctctattccttaactgagtttgtatattgttcaatcatatagtcatccaatcttggtcttttggtgtaacaaccataatgctgtccataatgacggcaccattttgaattcccacagtactgtgtgagagttctggcttcttcacatcctctttcacactgatttgtttgtgtaaagtaattatcctaaggagtttgacgtctctcttgtactttttaaacacataaaccctaaaagcccaagaacccttggacagcttatatacctgtttgtagaccagataaggagctgtctcccaacaagagcttgcaacccgttcttttggtggtggtgatggtggcaatggtgatggtggtggtggtggtggtggtggtggtggtggtggtggtgatggtgatggtgatggtgtctaagtacagatgcacatgtaccatggcatgcatgtgtcaatcagaggacaacctccggtctgtcctcatcttccattttgttagatacagggtctccttttcactatcacatactctaggcaacttggttcatgagcttccaaggattctctttcccttccctcttacctgaccacaggagtgctgggatcacagacactcattactgtgtctttctttacacgagtccttgggatccaaactcagctctgtatatgtgtatggcaagtattctacccactgagtcatctccccagccctcaagccatccttctagaacgtcacccctgcccacagccatctaacttcacatctccccagggcaggtagaaacttgtgtacccttcttagtgctgctgaacccagcatccacccacacagcctaatagtaacctaacagacactctcatatgcatcctcacttcagatgccctccatccacagccaggttggacccttgtcaactcagccccactcagaaacccccaggggatcacaagctaaaccacacccagagagaccagaatttctggcaagcttttaccaggtagcttcccaggttgattccctggaggttggaggctgtagcagggagacatttctctctcagtggggcttaaccatcattatgagttactcagtaaggaaaatctgggctatgagtgattctcagaaatccagggctctgctttggacctactgattacagagtctctatgtataaggatctctgcacatttaaatctccgcatatggttgtaatacaaggaagagggccaaaagccactgtcaggaggtgggggcagagacattcatcacagaatttcagaaacagaaaacaaataactgctgtgataggaggtatgggtactggagagatggctcggtcggtaaaacgcttgccagcaagcatatggaccacggcttaatccccagaccccatgtaaatgatgttgagtgctttgtaatgtcagtgctgaggagatggggaccaagcagtagatctgggctcactggataaccagcttagccaatccttgagttgcaggctaataagagatactgtctcaaaatacaaggtgaacaactcctgacctacaacacctgaaacttcacaagtgaacacacacacacacatgcacacacatgatgcacacacacaaaaacaataaaatatatgagctgcaggaaataactgagcttgccaggaaatcttattttagggtgccagcttgggtctttgagtgtgacctgtgctctttcagcatccgaaccacttttatctgtgagtgctcagaaatgcacaccctctttcctgagaccctgaagccccagggacaaaaacatccaacaaagtctcctcccagataatgtgggatctgaaagggtgcacctgctctgccgctgctgatgcggggactgggatagcgagccttgctggtaattatgctgttaacggccttgtttgcatctagtagcaaaataaacatatctctaggcctgttatttttccagccgacagcccacaccccctacactcacatccctccgcctttgcagaaatgccacttgctttcctcctgcctgatgctcaagcattgttgatctgtattttagatcagacagctcttgggtcttcttgaaactaagacaaacccccccattatctactagacaaaaggggagcagctggagcagctggaattctcttgagagcagagggaaaacattcaggttccttgggaagccacaagtggtcacttgggtttgggacatcatctgtaaataaggatggagatttctggagggatggagaggatgcacagcagcagaaggaatgttgtagaacaaagggcaggaagtggatggaggtttgcctgagcagtgttgccagcaccaagtgctgcagtttcctcctaactcattcactggctttcataggaccaggagactgtgcagcctcctgggagagaattggtgtgacttcctatcacatttcttctttaagaaaaaaatcaggtgctggagaggaaggtttggatggctcactcttgagtggtactaaatctactctctgggctgcaatctagcacagttggctccttcctacaaaggctgctctttgagagactattggaatccaggcaatatgctaatgcagaaccctctagtgacacatttaggggtgatgcaaatgcaccctaacacatcatccaaagcggtggaccatatgatgccacaccaaaaaaaattgaaatgtgcctcatggggcaaagcaactaacttctaaattttattttaacataaaggttaatggttacccagaatccttgtttgtttcacggagcgcaactccactggacaatattaattatttgcttttataatcccaaaagaggggtgagccaatgtttcaaaaaaacagattgctacaacgccctgctgatggtctcaccagatctcaggtctatggtatggtgaattttttaaagctatttcatcccagtttcttccaccgtagacctcaagggtctccatcttgtcctggctgttcctctgtggccacgggaaggaatggtgcgtgcaaggatgctctaagtacatgctgaggatttgaatgtgagcctagggtagtccatggtgcaggcaaacagctctgtggtgtctgttttccctcttgcctgttcctgacacctgtgaacaggtagaagttcatttcaagggcaacctggatagatagcatctcttaaaatgtcaagtggaacagggatttgtgtttgctgcttttttatattgatgatggaagagattcggaggagtacagggcctactgggcagagttatattacaaccgttagatgaataaatgtaaaatgtgagtttttacatctttattatgtatgtctcctcccttggtgacatcctgcatcatggctctgcatgctgagtaacctgtcagggccctaaaagtagacgcccagcagaagccctggagatctgcccttctcccgtagacaatcacagttgatgacatttctaggagcttagtgggcaagatatgctgggccatgtgtttgtcatgcatgatccatggtcattcttggaacagcctcgggtgggagatgccaccccaggatctcattgtacagatgaacaaacagaagctgtgaagtaagagaatttttcaggctctcaaaactcgggcatcaggactaggattcagatctgtggtgcttccatcactggggagaaggaggagctgagttcttctcaagcagttcctgtcactctttaaaaagcatcatcttcatcatcatcnnnnnnnnnnnnnnnnnnnnagagagagagggagagagagagagagagagagggtgcggttattatgggggttagaggacaacttcagaaatctcttctttttctaccttaggttgtagaggtcaaactcaagttactgggttttgctagcaagcaccttcaccagcggaacaatctcacttgtcctaggtcctctcacacttacttcatagctctgacccgaagctctgtggtcatttcctccccatcctagtccctgctggatgagagctgaggagagggttacacacaacagagccaagagccaaccagccgatcctttctgccacgtccttcctgcaccctgtgtgatcacacgaaaagggcactgagagtcactggatccagctaatttgtacaaggaccacagtccagcagggactgcagcaggggttccatagactgccaaagtaagggtgctctgcatagctgacctgctctgccactgtgtcgcataggcagctgacgccaagggggaagagtcagtcactcagaacactaatccatgccttcacagtctgcatggggacttgagggagagtgtttgccccaagcataaacctagggaccagctgttctgcctccaccagtcgcaaccatcacagccctccgtaagcctgcctgctgaggcttggactctacagattctgcccttaagtgcctggctgtggtaatccatgggattctcgggcatttaaacattagtctaattcaggcgcaattaagaaggaatggttgttatcatttccaatatgcaataatcattcccatgcaataataataataacagcaacaataataaatatgctgacttttttactctatcaactgctctaccggggcagaaaagaagccatgtgacctcagcctcctccatgttagaaaaaaaatgttccccacatgcttaaaaaaaaaaaaaaaaaaacactgtttctgggtttggagacagggcttagaaggaggtcattcaggtttactgaggtaaatgaggattggttccaggttctacagaattaggcaaatagacaccaaaacaccatctttgtttctctcctccttgagagaaaccagcaaaaaagtggccatgtgcaagctggggtgaaggcctaaactggaaatcaaatgccctaggactttggtcttagaccttcagcttccagagcgatggggaaagtgtctgctgtttaaacttcccagtctgtacaacctgagctaatacaccattgcccacctcctatcggtactgtgttctcatgatgactgagggcaaccttctgagtctgcattttcataccctcaaaaggaggttggcaccactgtctgtggcagagcgatgtacggagcagtgtccaatgagaacctgatcattgactgcatctagcttgctgacaaaatagccccatgagcagaaggtctcaggcccaagtctacattcccaaatccccttcatcgccacaatctaaacatggttatgctcaaccgtgctgatgttgcacaagaaaacagctgagactaccatcttgtcttggttaacatgcctatcagcccagcacaaggcaggaagagtcaaaatggaaaaatgaggctgatgttgacctcaaagatgcaacccaggccccggggcaagaagtatagggcacagcaatggtactgagaaggaagtcctgatggcatctttccactcactaagtgatgcctctgaccttgaggactgtcactgcctccccaggaggggacgggaggaagatcacaggaggcagcttggtgacctcttgctgccccaataggtttgttatggtcatgggggtgtattaatacagaattggaaagttttgggtttttttttttttttttttttttttttaacaaggaaatcgctctcctctgaggacaatgcagatacgagctaaaaagccccatgcaattatgaattctagacaaaaccatggtctggcctgttagtagatctcctctgtcctctcacctttcccgccatctcatattttccttttccccacccttagactaatgcggaaatattgatggggcatgcctgtgaggagctcagggctgggggtgtaatctcggtctatacagcatgtgtggtgccctggtttttgtcaccagcaccacagaaaccagtggagtgatgtacatctataatcccagctctggctaagtgaaggcagggagatcagacgttcaaggccacccttctcctctgctacaaagaatattcaaggcctgggatacataaaactccacatcatagaacaaatgactttcaaacatgggagtggagaaagtagttgtcttcgtctgcattgagcctccaatggcctcctctcctctccatggttcaggatgctcaattcctcacgtgctcttcagttaatacagtctgccagagcttcaagtagaaaccccctcccaatctgtcccagtgatgtcctcattagccttaccaatggtacctagtctcagaacatagtaggctgcccggaaacactgcccaagtatacttcacagtgtctaaaagtggattggacgtctggactagtcactagcttaggggcatggtcatggcttagatcttaggccccatcactatgagaatgacccctgcctaccagtgctgaaacagccccacagtccagattaggcagctggtttctggacttggccctaccccataatgctggtttgtcagtgggaggagaataggaagaaagcccttgaccactctaggtagggttgtgggtccccagtccattccaccacagtgcatggccaatcaaggaggcgagatgagggaagattgttcttaccccaagccaccgatgctgctgccagggtgggtgtggactatagcaaagcaccaggacactgctctgggggttgggagagcacagtctgagatgcggggcagccagagctggctcagaggaccaccagcctgtgaagtggctggtgctgtggacttcccaggcttttggactgccaggtgccactggaagttgaggaagaactgaaaacagaatctgggcctgcgggctagatctagccttgggctaggggaggggagctctggctggtcccactgtgattatccttggcttgatggtggcagacttggcttggtggcagtcatgtctgcgagtgcagagaggccttctatgggagattagacagcgactctgtaggcaaagaccttctccatggctccccacagtggataccaatgaaaagagacagtctctggttccaaatcatttattgctatggttgaaagtggatgcataaaaccataccctgcttctcagggtgagcctgagattaaatacctttagcagggagaaatatctgggaatttccaggcctctatgtacctcattagaatggcaatctctgtcttgagcctaagtgaccacaggtcatgttcttttcctcggctatatgtggaggagtttggggtgttgtccttacatgactgatggacacaaatccatatggggctgaggctagtgacaggggcctggtgcctgggagcaggtgaagctcctatcatcctttcagggtctctgggggttctagccttagctcaaccaaggaccaggctacctctcatggtctactgccccacagaccatagcagccagcatttccattaaggaaggtgatgtgtaatgtcagcactggtgttctgtttctctacccaggagtaaaaaccatgcccaagagctgctgcccatctccagggcctcacctcctcccgtggaggattcttctttgccctctttaattgtgctcatcactcaacactccttggcaaatcctgccaggggcgcaaacactgccacccctttctcaattatgttccttgtgctgctagactctggtctaaggccagacgatttttgattacagagtcaatctttgtttaaaagttggccaccctggggaagtttctaacaagttctttttaaacaatgaattttctggacacctttagctaaagagttccgttgctcagatcactttcgaaggtacagcataagcattaggcagctggggcaatgtcctgaatgagaggcatggatgcatgcaagaccaagagctgtagcttcatcttcactgagctagctggagtcagtcatctcttgtgactagactgaacactgacatctatctgtaaggatcctgactatttcctggtctctctttactgcttatccatacagcaagagaggaccttcactgtttctgtttatgagacaagagatggtgagaacgtttccacctgctgagagccacagatcagacttcgatcctcccatgtggttaacactaagcctcagaatcttgagtgcggcccacacactcaaggtttgcaaagacctgagacatggtgagatttcagaagtgtgaacgcttagatagttgagcacatatgaggaagaatcaatgcacccaaccggacgttcagaactggaaatctttcttgaaaaagtctctgattaaataagaaaaaaatattaatcaagcaacaatacaataagtaggtggctctttgatcatttgggaaatctctattgaaggcctactatgtgtaagccactttgctgggtgctgggaaagtatagtgctttgatattccacgcttgtgggttgaaagctttatgagcaaagctactctaaagaacagtgtgaactaggaagacactggtagaaataccagaaagttcaagagttcaagaccacccttaccctcagctacagaaagtattcaaatccagcctgggatacatgaaattccacatcacaaatcaaagaaagccaaggcatggagaaggtagaggaataggcaaatggggagacacactgtattggataagggactgatcaacgtgagtgttagtgtgtgtgtgtgtgtgtgtgtgtgtgtgtgtgtgtgtgtgtgagagagagagagagagagagagagagagagagagagagagagagagacaaagctttggttgatgccagacatcttcctcatttgttctccactgtattctttgagacagtatctctcactagaccagaaacttaatgataagctagactggctagctggtcagtaaactccatgcattgtcctatcaatttcccagcattagagtaacaagcacacaccaccatggtaatccaaattctggtctacatgtctacccagcaagtatgttacccactgagctgtctaactcctagatagactttataaagggaaatgtttggtcctgtgagctgcattgttcaatggtctctacattgatgaaattcactgttacagcaataaagcatccacagacaaatatgtaagcaaatggctcttactgtgttccaataaagctttatttacagaatgggccatagtctgcagactctaccttagctcatccggacatatctgccaggtttcagatagtggccttgttcagaacacatgtctcaacctttgcaagtctagtcctgaccattcacacatttccctggatgtcactgtagatggcctcttcagcctgtgtgccagcttttagtcccctcgcagggtcagtcttcaggatcccagatgatagcacattaccaatgccctctgttctgtctcctctgcccttgaacagcaacaactgatgcaccccagtgggcttcttcttcagccttcatctctagcctagatgtagcttgtgaagtacagcccttgcatcagactgtcctgccagagccagccaagaagacaaagatagctggcttgcaggcagaagtccgtgtcattagtttagtctagccccctgctgtaaaactcagccagagccaaccttctctgtgaaaactcatcattaatacctggtgctcattagccctgcagttcaccctgcgccaccagcctcagccagaatcagaaaggctaatggcactggtgccaacagtcactggtcttagctcttgccaagatctctgcttacacacaaacacacatgttgcatgcacacacacaagcacatgcttgtatacacatgcttcacttcttggttaaacattcgtgtttctggctaatgccttaatatcttcaaatgctccaagatttcccagaatccttgtcttctttctgtaacttggtaggtcttgtgtctctgactccttactgtccctctgcctctatctgcacaatctcttctcctgtaattggtctctggagtctgcagcaggtggcaatgtcattccaaagagagaacgaaacactttcaaataatgttaaaaacaaaatgcattttaataacatcagttttaaggcctgtctattcattcattcattcattcattcattcattcatccataccatcaagtcaactagcacttgcttagtgaagacctacagtgtgcctgacatttgcctggccccaagacccctgccattaaagaacatactgatcaggccattaaataattatacttttatgacattgttgcaaaagagatacgcaagcatactgagtaaaatgttatgcatggaatctcctctattctagggggcagaggaacttccctggagaatggattacctttgagttgagagttgaaataagaggaaataactgagtgatggagagctggggggtggggtgagcctggctgtgcattcaaaggtcctcaggcagaagagaataccactcacccagcaaatgaaggagcgctgacgtaagcagtgtgtggcgatggcgatggtcaacaacttacaccctgagaggaaggtggtcagaccgtagggaaccttgaaatctatgttaaagaccagagtgtgttctgacggcaacaggaagcctttcaaagtttctttcttaaattgcacagtgccatagcaatagtgccccagttcctgatcattgtttgccaggaaggagaaagatggcggggaaaagtatagaactttgccaggctccagaggaggagaaattgaaatgcatttttttcctgctagcccaggtagatagatatggtatatctcagactgtgcaaatggacaggaatggtgtatcccagtctaggaaagaggatgataagtacagtagaccccaggctgtacaggtggattactacagtgtaccccaggctatgccagtggatatgcatagtagagctcaggctatacaagtgaatatatcccatctagctcagcctaagcagtatatcctggcctttcctgtgttggtattaaccatagcagctcgtattttaggcaccctgttcccagtggcctgagaagaacatgaagctgaacctaaaacttctttcctctttggcagaacttcccatttgctcaggccgtcagggaagtgtaacaaagatgggtttgagtagtgtggagggaaaatcacttgaccacccagtgcctcggttctctcatctaagaatgaaacaaggcaagttccctccctctgcatttgctgtgagtgttaaaactgccatgtgtgaggtgcctgcttaactcagagagggtaagtcaaccagggacagtggtggcagctcagagagacaaccctgcatggtctgcaggtactcaagggcatagagcacatctgttctagccaccactgtgccttcagtgcctgctacagcacctggcaccttctgaatgccatggaaatgaaagcatgagcccccttggtgtcattgacaaccccgtagtgactgctgtctcagtacaggaagagataccagatgagatgtgttgctgtgctttttttaaaccagaattaatgaaaacatgcctgagttgggacccacaggtttgtctttacttaattgtccctgctagaggcattttcggatctcaccactgtaaaaatggaggacatctgaaaagccagagggtccatttcaaaagaacaatgagccgtgctgggttcccataaatcctgctcagccgcacctctgcttagccagaggagcctgaacagagcctagaagcttgtcagggagcccagcgggacacggggacctcctgataccaagcctgcctggctcatgcaagctttgtgtgttctgagacagagtctgagccccacacaatccattgtcacgtggcagttgcttattgtccctgtcctctgagagaaaggacatcagctgctgcccaacttccctccagtttccattaactgaatcaagtggtcctcagccctctgtattcaacagggctttagttcaggctctctggttcgactctttgatcctgtttacaagtagtctgtttagcaggagacgtatccttcgtgccatctttacttcttcctctgtaaaatgggcttagtaggcagcactgatctcagaagcttgttgggaagagagacacacttacagccgagagcacattaacatgcatgctctgcagacgctcatgttgctgtccatactgacccagctgccctcgcgctgggaagccgtgtttgccctgctgtaagaggggctgcccacccaggatgctgtgactactcagctcaaaaaatctatgtcctatatgcctgctacagctactgtaccatggtcactgtgacagctgtgcattgataactttttctacagtttgaactttttaggctcaactactctttatttgtggtagcaaagtccacacgccataaatcccaccccatggcatttagtgccttcagtgtcatgcagccagcaccacctctggttctaggtattttaatcacctcaaaaactggtactcatttggcagtcactcttgggatctcccaagcccggggatccaccagtctgctttctttagatttggtgaccggatatgtcatagtaatcaaagccatatgtgtcactctgtgtctagcttctttgccttgacataatacattcatgattaatccaggttgtagaaatcatttctgtttcattccatttaatattccatcaaatgtctataccacagcctcttcacctatctttgtacattgaaggaggttcgggttgttcgcaccttttgaatagcactgctaagaaaacccacattcaagttttgcaagtgtgtttttcaattcttttgtgaatggtgatattttagtgtgtgtggctacgtaagagaaaggggagaaacactaagagggtggggtagaaagagaagagatttcagcttcccctttagaggcctaacttctaggatgcttgtgaatatgcacagtgtttttcacatagatacaccagtgtgtgggtatgctctactatctatggtcattgttgtaggaccaaccactgaggctagactccggttgcttcttagcctcttgacacttcaaagactatcctggtatcctaatggctgtgtgtcatagcatggtatgctagggctggagacgtgggacaagccaacctcctgcctctctcagagtcaaataagtcacaagagctatcataatcaaggaataattatatgccctgaattagacgtttcatacacagggactatccggtcttggcctgactccaacaaggaaactgaagcttagaggagaaaagctgcctacaagacagtggtacaggcagacttcaaacacaggtcagctctgttcctgcaagaccagtggctcacctggctgtcacccatttggctcatctctactagacctgcccatgtattttctttagcctagaaggaatctaattcaaatgttaaaaaatccacctcaggaacctggcacaggatccttgggactatcacccagcagtctgtgcacatgaagcaactcttgtgtgctatgtccagctagggtgcagaatgtctgctagccttttttctaccacagcgcctgccttctctgttgtggagaacacaatcagctctcagcttttgcaagcatgttcctgacgtgtccctctattgatatggaggacctatggtagtccaggacgtgcagaaccagagctcgttctcaaagggcctccgtctccatcatggctctccccttggcatcttgaacaggtcctgatttatagtaagtctagcattcatgtttgctgaaggaatgaatgagattacagccacaagaacaaagcaggtgcgtgcttggccttcatctggtatatgccctgctttacaatgaactgcatggccttcttcccagtacagacatgtaaatatccagagatctgaaaatagctcctcaatgatcaatgcgcttgaagtattgcttctttaacgcagctctctgatatggcacctaatggcatttactaaatttttttttttgttagcaaacactgtgtaggttgccatggaaccacacagggagccaggctaagatattgaccctgagtaaataactcttttggaagagatagagattcccgtaaatgagtaaccttgaccaaaggaccaggtcgcgtacatttagacaaacaaccagggctcagttttcccgtggaaatagctccacctgactcgagaggaactcagtggcagagagcagaatttgcgtctgaagccagaaagcacagttggaggcacagagcatctacttagcatatgctcaagtcagagcctggcctcttgagaggctggggaaccacacctcccaagagagcagagcgcacagtaagtctagacactgagcaggcaagccagggtggagaggaaggcaaagaaaggcaacctaacactgaaaagaacagagctaacacgcatggagtgggccctctcttcccagggcctgtgctgacagcgtagtctggagtctcccttttaccctccaagctgccatgtttgccatgttatagtaggattccccatgttctagaggaagtactgctactcaaaaggaaaaaaattgtcatcgtccctctttcctaaaaatataaaaagagttaggcttttatggttgtggaacttttattgcaagcctctaaacctttttactcaatgcaaatttctcccatgacttatgccagtgtagaaacagacagaattgtgtattctacagagaagccttgggccagatgtcctgaggccacagctgcctggaagaggttggggtctgggggctgcagtctgataaccactgatggatctgataaattctttttaaaagaaaatttttttctaaaatcttctgtccccaagaagtgccacattacctactcaaggcctgaactctctacttacagactctgatctcttaaattttcgattcagctctgaggtaaacaaatacccttgagaacgtgtgggtggagaccatacaggaagtaacaattctggtctatcagagactctctgaagcagacatctgtgtctgtacaaagcttgcagaggtgggtggccacagggtttgttttctgtagaagtgtatgtggcttcctgtctgcctcaggagacactgtaaccttgatccagttctgacaagctggtagacgtagtgggctggccaagaagggcaaggtgagcagtggagagtcaccagccctttgagctcagccccaccctcagccagtatccaaactatatggtggtctgggagttaagtcattgtagactccagttctgctgacgtagtgatgatactaacagaagaagggttttcatagaaggactacaagttcttcctcagacctttctaggctgtgtcaagttgacagttaaactgactaggacatatgggaagctagaatttgtctaatcgaagaggatacttacttgatatgtctcataacagccagattacagagaattaatttgtaattaacaaattgacttcacatacacgtgtgtgtgccttgtggacatgcatgtatgtatgtatccaaaccaaactgaacagcatatttaaatattttgtttggagataggatctcactacacagcccaggctggcctcatgccatcttttctcatcaccttccagagtgctggtcttgcaggcatgtgctaccacagcaggctacagttttatttgttcatgcttctagcagcctcagaaccaaccaggccccttggtgctgatccctgtcagtcaccttgccattacagccatcttgaggaagggctggcgtgttcagagttctcactgatggaacatcagataaatggcctcttcagatggcatacgtgtgtttaaaatgagaaatgtgtttctcccaaatgctctgtgaatgtgtcaaggctttgcaaagtgatttgcaggtcccttcaaatgcaatgagcatgttttagtgccacatcattttcatgagtaacaaaaaggtaaatccaattagcagcgattgggttttattatccaggtggctctccagcctgctgcttgcatggagggagggacagtccccacagtctctgtgggatgctttgggtatgtgtctcatgattcctttcattgctggcgactcactccgtatcacgaggaccttgctatactgtgactgttgttgtcacccactgctgtcacaggcatgtggcataggacaggacctgttagggaagaggctgaacagttagaaagcttcaagtcaaatagtcccgaaattgtagtgggcagagtctgaccataagaaacatgtgccttgctaggcagtcagcacactggcctgcccctgagggagagttccgaagcccataaagtgcaagacatatcacaccaaactcatgtgggttttgttgttgttgttgttggtttttggtttttggtttttggttttggtttttggtttttttttttttttttttttttttttttccgagacagggtttctctgtgtagccctggctgtcttggaactcactttgtagaccaggctggcctcgaagtcagaaatccacctgcctctgactcctgagtgctgggattaaaggcgttcgccaccatgcccggcttcaaactcatgtattagaaagttaaggtgaatgcctattggaggtaggatgatgttccagccagttcacttgtcctgggtgcccatggtctgtaattataactatagcatccaggaacaaatacagcacccggaacgccccaaacaatcccccagtatcttctatgcacaccttgactacatttgtaaccaagactggctttattttctgactcctttgcttttcgtctccaaacagccttgaacttcactttttctattgtggggatctgggattcctgctcttcctcatagggagaagatgttgttaatgtctgtactaaaaatatctggggccttgaggaaataggcttgaaagtgtctccactgcctgtgcacccccaaaataaaccaagcaaagaggcctcaatccagtcaggagatggactgtcacgggagtgagagagatggctagctctggttttaggtgagctatggagaaagtcaatcctcacagggtatctgtgttaagtccgctgcacactgtgttaagtaactcgacactcgcaaaagggagcatgaggcttaggaaggtgatggctgtctcctgttcctaaagaaacaaccacattgccgggcgtggtgacgcacacctttaatcccagagctcaggaggcagaggcaggcagatttctgagttcaaggccagcctggtctacaaagtgagttccaggacagccagggctatacagagaaatcctgtctcgaaaaaccaaaagaaaagaaaagaaaaaagaaacagccacattgctgaatcttgcccaccaagtggaaagttgaattgactcatgtttgactgatgcagggaactgaggtcctgaagggatccgactcagtttcttccctgaagtgacagtagccacctgccttgcagggactgtccaaggtactgtccaaggtcctgcttatgcagccagatgggaaaccttagtgttgttacgtaacagatgggcaccagctgtcccagacatgggggagggggtagttttgcccacaccgcacctttacacgttcctgtgaggtgatttagtcctttagaatccctaacattattgatactgtgagaaaggaagaagccttgaccctcagcctggtcagcctaccctggcctgagcacccgcaagtgcttgttagttgctgggatgccatacccagtacttattaagtacctagagtatgtttctcttaggaacctgggattctgtctgctcatgaagtgtcgggttgttctcctcatcatatttgtcccgatattcagaggtgtggccgtgaaaatggtgtcctgtgctctaggggacatcttttatcttataccagtggacagataaggacaagtcccttcaaagggttatttcccactctgtcctctgtagaatattctgtgggtcttaagcaaaaagagccctccaagtccgaggcaaatcgggccctttcattgctttctctggatcaaaatgtcttacgtacccaatgtttcagatgacaatgatactattaaatgacagctaacatttgtcaaagacttaccctgtaccaggtgctatcatagaggtcttacatgcatggatctatttaatactccagcacctgaggttcatgcgttatggagacgaaagaaactcccctttaagtgtgggcattccaggagggcccccgaggagcagatagaggaggaacttgtcgcccagctgcatactcagcagagccgagcagctcaaacttcacaagagcatgcatagcacctgggagccagagaaggcacgttgatctcaagccatggatatgggtcagcaggtcaagtgcttgctgtggcccgagttcaagccccagtaggtgtggtgctgcgtgcttgtaattgaagcactgtgaaaatgaaggcaggcagatctctggggctcactggccaagataatcaagtttctgtccaaaacaaaccaaataaaaccaaaccaaaccaaagcaaggtggacagtaccagaggactgacacctgaggctgacctctgacctccatacagtgcacacacacacacacacacacacacacacacacacacacattcagaaagagaaaagaagttgagtttatctcaataggtcctgggtgaggcttaagatgcagtgtttctttctcttaaagatttatttattttttattttatgtgtatgagtgagtgttttgcctgtctatgtttgtaccacatgtatgcagtgcctatggaggccagaaaggggactcagatgacctaccatgtgggtgctgggtgtcgagaacagaaccctgtcctctgcaagagcagccagtgctcatgagcactgtgccatctttccagccccaaatgtagtgtttctcagagtagcttccggattgcaggccaggctgtaagcatggctccttcctgcgcacgcctctagtttttcttctgctcctgggatgcaattcacccatcctcccactcagtcactctctgtcattttgcagagtgggctatttatcaagagcagcagctgtaacatcagaaccaggtcccaagcctggttctgtactttccctcatgacctaatgtctctgagtccaaccaccagtctgtcagatgagagtgaaactcactgtatggcatcctcataaatatcaaaggaggtagagcacaggcagcctccggcctgaagctagagcatggtgtacgtccaaggatggccgtggtttgcagcctcactgtcttacttatggttcactcctgctttcagcgtttgcttacatattatgtattgaagcagatatttccatggtcctgacggttgcagcaatgggcacctgcaatcaacaagagatagaccagcctgtggtcagtgtcagtagaaaggtggatctggctacacaggtcccagagatgagtgatgggagccacgtggagaaatactgctctataaaagaaaagtgggggtgggggtgggagtctaagccagcaaggccggaatagggtaaaatgtcagatcatgagctgttctttatctgaaatgaacgaaatctgtaggcaataattgacaggagcctgagagaagcaattgggagagttggtccccagctgaatcccatctcctttttgaacaggagcagggattggctggccagagcagccattttacaaagagagggcaagcaaggagctacagagccacccagccaaatggagtaagaggtagttcccctcaccccacccatccagccaatccagcaagcccactcatcaaacagggctttgctttgaaagggggctttatgcaacagctccagcccctccccagccaccctctctccccccaagatgtcatcttttgagatgttttcatgtggaagcatcgctaagtaaattcactaaatgcctattcatccccatcagatggggacctggtgaagcgggaaatgcgaaaatggcccaggctccaaccctgaaagatgctttctggggttgctaaatggagccacagcaggctgaccctgggaggcctgagacttcccagagggggctcccggagcctggccttggccccttcaatcctcccacctaagcttcccccgtgaggccctgtttattattcctgctactgaggacccattcagaggttaacttatccttttattcatcaggacgacaataatgaactgtcgcagagtgtggcaagggtttggtaaataagagcggctgagacagaggagatggagtgggcttccggatggctgggaaagacattgcctgattttctttaataaagtcatggagtagctgcttaacgcagcagctccttggaggccacaggaacctgggaactttggccaccttggttatcgctgtccagactcacaaaggttggcctttagggtctatccttaagattcatctctgtatatgtcggcagagctctgcatctggagcaaatagatttttaccaggctgcatacacaggaggctcttcaggcatcagtcaccccaatatggttggcttctaattggtttttatttcaataagaggctgggacattgaccacatttctttccatgtcagatgtctcaactgctctgttctgcccccacacacacacacttctagaggtctgcctatgtcatccaatgagtggatgaggattcatattgacaatgctgaagagaggcagagaaatagagaagggctgagggctgaaggtggtacagaccgtgcacctatgaggtagaaagaacaaagcaacatgcgttgaatgtgtacctactgtgtgcccttaagcctacccatcatcctcttggtgagaatgtatgatgaacttattgtgtgctcagtgtgctcatatgtgagcagccaggaggaaattaatttacagagggccactcactgtatgagagtttggtgacttgtttgtcctttagtcacatggcaggctgggcttccacttcgggagcttagacattgctttctgagatactacactgattctcctaagcccagcattagagttacagagatgcacacacaatagacagagcacaggttactcaagcataaggacctgagctaaaactccagcccaggcataaagtcataaggagtagtgaacatctataatctaagcacttccactgtgagataagaccacagacagatgtgggggactccctagaaactcgctggccagacactctggggtacatagtggtgaacaggagaccctgtctggaacaagacagtgagggactaacactcaaggttgtctgctgccctcctttctcttgtgcatacacagaagcaacacacccacacacacaactcaaaaggaagatccagcctccctgtgttcccatagagcctctttcttcccatctcacccagtctggaagagtagttaacccctgctctttaagaagcacctcccctcccccaacagaggaccccggtgatggtgacgaaggagctgtcacatcagcaccatttacctgtttgggtttattcagtggaagaggcgactgcatctctggcagatggagacctgtgtgactgccttttaaaatactgtcacagctgtatgcacaagctgattagctgtgacggcactgtgaacgctgagattgatggtgataaatttgggataacaatgctgggaacgatgtcatccgtttgcacggcgcttcatattttttaaagctcaatccacagcccggtggttatcgaggactcgaattcattcactgctctctgtccactggaggggtcagttctacctcagctcatcggaacctagccattccttcagcctgcctgccttccttctttccttccttccttccttccttccttcctcaaacattagtgtcagtcctactgtgtgccaaggatgagcagatctgacgagattctttccttatgggccttatattgtaaggtaaccaagagagtgctttcaaatggtgataaagctgtcaagtcaacattgtgatgtgataaagctgggctggaggagtcaggggctactttaggaggaacagccagaaaagacctgtctcaaaaaatgacatttgaaaacctaaatgacaagaacaggccagaaatggagagggcataatggcctgtgcacagcaagtgtgaagaccctgagtctgatctgtggcattgggttgagtactgataactactgttgaccataaccaatgaagcatataagacactgttcttgtcctcagaattccctgaagagtagagtgtgtgggaaacggatgcacaaacagcctgtggctttaactgtaaacttgacaaaacctgcactcacctgggttaatgaaggactgtttatattgggctggcctgtgtcatgtatggggacaggcattgtcagaattgattgtcatgggaagacccagccacatgtgtgtgtctctgttcactgggtaggggtcctgacatgtatagcaatgaagaagccaggatgagcgtgacaatcaatcgcttgtctctgctcttgacggtggttgtggtgtgtccagcagtcagctgttgatacactggctttcttcatggacaataaccagggcaataacttttccctctgaaattgcccctttctgggatgttaccacactgcagccagaatgaaactagagcacagcgtgttttcaggcaatgtgacaggcccagggataggacctgccaagaagacacatcatcagactgtgtgctgtgtccagaacaggcaaatccaggaaagcagagtgaaatctgctgcctaggactaaaaatggagcaaaccccagtacctctgcagaggaccctgactttctcttctgtttgtttccacaggacaaatgaccagctggtagcatttctttccagatatcgagatatgaacttcctgaagtcacatggccgggacaatgcaaggtaacgcaccacagaggtggaaagctacagctggggcctgtctcgcaggtagacaactaggggaaagtttcctgggtgagagagagagctcaaagggccctcgtgttagccgaggacagacagaagcagatgcttctcaggctcccagcttttctcccaggaaatattttgaacttattcctgtatgtgtacgtgtgtgcatgagtgtttaggtgcatatgtgtgtgcagtggcacatgcacctgtgtgtgtgtgtgtgtgtgtgtgtgtgtgtgtgtgtgtgtgtgtatgggggtgcatgtgtatgtatgcatatgcagtggcacatgtatctgtatgtgtatgtaagggggtgcacatgtgtgtgcagtggcacatgcatctatgtatgtatgggtgtgtacaggtgcacatgtaactgtgtatatatatatatatatatatatagggtacacatgtatgtgcaggtatacatgcacctgtgtgtgtttatgtatatgtatgagggtatacatttgtgtgtggatgtacatgcacttgtgtatgtgtatgtatgggggtgcacatgtgtgtaggtgtacatgcacctgtgtgtgtgggagccaaaggacagcctcaagtctattcctcgggtaccacccacattgtgtttgagacaggaaccctcacgtgggtttaggggattgaactcagatctttgagcttgcacagcaaacattttatcagcagtgccgtctgtccagcccatttagaatcttttatgtcttggtccctggatcagagtagtcatggttaattctcacttggttagtaggtagactggggactgcatctcagtaacattcccacatgctgaaggtgtcctgtggtctccacatgcatgccatgtatgcacacctatatacacacacatatacacacacatgtgagcacagacccatacacaaacagcatcttttcctggtgggagagcgccccctggattctgacattgaatacaatataaaccctggtagttctagcaatcctcacagtctgttaatattttgcatttggcctttttgataattcatgtgggtttgtttgtttgtttgtttgtttgtttgttttggtaaagtgactcatgatatcttccatgagaatctagatttccaattaactacgataaaccttggagtccctcgacctatgtctgactttgctcagagctgacatgcaatccaatcccatgtcccccaggtcatggcagttcctgtctctgttcctgatatgactacaattgggatttgaatttacagtctctgtttaagagtgtctctgctgtggcttgtagagataataggttttgtgtctcaaagtttaccttgttatctcacagaagcaaacactaagctccctgctttgacctttcgaggagtcaccccagaatgcatgggttgcattatttcttcttttacctgtcatttcagcagctgactctgcatccaatggccccttcttgatcatattcttccactgtatttaaaggcacttcaaagctggtcagtgccctatgagtccctaccagttagcatagcacatttggggccactagtggtagagaggctggctggacaaacacaaatcactgtccctgtgggcaatctccctgctgagaccctagtactttgctgggcttcttggcccattgcatttgacattggctttatccaatgcagagtaagaattcatatttaaattctccgtaaatgaaagggaggcttcaagagctcaaatggattctctcaggttgcccagttggtaaatgtcaggactggaacctaggagtttttgacatcagaggtgtgtgttggttacatctagggataattatatggagtgttcattattagaggtgacccttatattagtagtcctctcccattggtcaagaataaaacccatcttctcctccttataacctatatgattggtccatgcaccttacatcatgggcaggaagccagctccattcatcaacacatgtcaaaaatcccatccacactagcagtactgtttcaggctgaccattctttagtctttgctcagtttcccaagtgcttctctaggaacttggtagcacaattaaagtcatggcctttgaggtcccacctcctagaatgaaatgctgatctcctgtgtttcaggctgcattgcactgcttgtgtaacttaacctctctgagaccatgcctttcccagtaaaacgaaaaagtcacagtcttagatagataggattaaatgagatgttgcctgtgatggtgaggatgatgatgatggtgatgctattgccatggtaagcataaaaccaaaatgctgctggtagggatgtatcccatatctcaagcccttgcatgtacacacacacactcagtgtgatccaggtgcaccagcagtgggcagatagttttaacatggctcagagcagtataacatattactaccacctgcctctcaaaccccaaagcccaagtatcacagatcagaattgctcacagattcctgcatttaccctttacatcctcagctgggactctttggtatataggaatgaagtacaatattttagtgttaatttgttaataaaatgaattgatgttaattgattaataaatgaatgagtgagtcacctacaaccttcttctctttgttaatcgagtcttcccttactgtatgtcaaggcttcccacagtccatctcccattgcctctccccagtaggcagggatgaggccagcttacctctggttgccataccactgctgtagcacaaagaattctttcggtggtgagtgacacaagcctactttaggcaaacttgtggacaaggagagttagtggaacaagtcccactgacttccgatttggctgaactgagcagctgcaatgaccgcataaaagcgagatggttccatagtcttgaatgttgacttaagtatctagctttaggttgtgaccatcaacaactcagtagctgatttttatcttacaagcaaggaagctgaatatagagaaatgttggtctcacagaatcagggcagggcagggctgggactcaatcggaatgaacagactgtgtccaaagaggccattctcaaaattcccgcaggatgtcataccttcctatgtgccagccctgctttgtgtcaatgtgccagatgcctgcttgcctgcctgcctgcctgcctgccttccttccttccttccttccttccttccttccttccttccttcctttttataattatcacctttgagaccattgtataatgtatgtcttagggttactattgctgtgataaaataccataaccaaagcaactttggaagcaaagggttgatttgacttatacttccacatcactgttcagcatcaaaggcagttggaactggaactaaacaggaccagaatccaaaggcaggagcccatgtcgatgctattgatgggtactgcttgctcctcatggcttgctcagcctgcttttctctagaacctaggaccaccagcccagagatgaaaccaccaccaatgggtgaggatcactaagtttaaagatgccctaaggcttgcctacagcctgatcttatggaggtgtttgctcaactgaagtttcctcctttcaaatggctctagtctgtgtcaagttgacataaaaaccagccatcataatgtgtttgattatattcatcttttgccccatgtcctctcagatccaccctcttccatacacactttacttagttctttatttttaatcctaaaaaaagaaattaaagccatcaaaaccaatttgtgatacctacatattcttggccttatgtctttttactggagcatggtcaacctaccaaaaactgtgttctccctctctccctctccctctctccctctccccctnnnnnnnnnnnnnnnnnnnnnnnnnnnnnnnnnnnnnnnnnnnnnnnnnnnnnnnnnnnnnnnnnnnnnnnnnnnnnnnnnnnnnnnnnnnnnnnnnnnnnnnnnnnnnnnnnnnnnnnnnnnnnnnnnnnnnnnnnnnnnnnnnnnnnnnnnnnnnnnnnnnnnnnnnnnnnnnnnnnnnnnnnnnnnnnnnnnnnnnnnnnnnnnnnnnnnnnnnnnnnnnnnnnnnnnnnnnnnnnnnnnnnnnnnnnnnnnnnnnnnnnnnnnntctccctttcccagtagctaaaagttgtcagtacctgcttagctaggggaaagacttcatacccgccttccatctccacacagggatttgatctggcttgtgcttgctcgggtcttatgcatgctgacacagtgagttcatgtgtgctgcctgctgtgtccagaagacaccgtttccctagagtcaaccactgtctctggcttttacagtctttctatctcttctccagcaatggtccctgagctggggtgggtggggtggcattaagtagcggtctcatttagagctaagcactttgacatcttttgtcttcttcacagtacccagttgtgggtcttgtgttagtctactgcaaatagaaatatctcagaggagagatgagacatgtctttacttatgggtatgattataagtcgttaggaatcagttttatattatgttcatttaacagagtaatactagtagtagttcttctcctatggtagagataacttgtgtagctataaagttcctgagctgataatgtgctaggtaagtccgaggaaacttctcagctccactggacttcagcattctcccctttgcaagacagcatagttgaatgagctagtttccaaaacccattccagtctggcatggcttgcctctagcctgactcttgtaagagctggtgacaagagcagagagcctgagtggcagaaagacctgagggacaaaagcaagcagttgtgtgcagcacaggttgcaggtacctcagttttcctttctctagaatctaacagccaccctgaccctctgcgcccatctctatacactggcaaccagttttgactttaggctctcactgggaggagatgtcatacaaggaaacttgtattttaatggctgccagattcatcccaactgttcctgtaattaaatgaatgggagtgctgtgctcactgtttccccaagcttccatccaaaaaaccttaaatccccaatggagtgactgacatgtagagccgtcatcattccctagggagtaccagctggaccagagcccgtgccctggagtcgattctgagccctgaattatggaaaagtctctgggagctccttgtctctgctcagatgcagtctgcctgagtctcggtgtggggacaggagaataaaaagggaaactcagccccctctgatccagcagcttcttgtgggacattttctgctctgtgcaatttcccagtcaccaggaagagtgcagtgtttgggatgtgatataatgcaagtggtaagataggaatgttggtatcagaaggtcatctctgctacagcccagtgtgggtctccagcatttagctctgactggccttgcgtctgtgtatagcaggcaaataacagcaacagtgagttggcctggctcatgcaggaagctgcacactttgaatatgctacaccattccaagcgctcttggtggatgctttccttcctattggagagaaacttacagctgagaactagagactcacaatgtctcatcccacccgccaaggtcttaacagcttgtcactgaccgagctgcagcataggctgtaaccatccaggtcaggagtcacctggcctctcttggcactcactgtgctcccacagaggaccacagagaccctctggaagccactaatcatctctgtatttgctccctgtaaactgtctgtaaactgcagtgatgagaataaggtcaacactataattttctagaatttactgaattatagccaagcatgatggtgcaggtctgtgataccagctgcttggaaggccgaggaaggaagatggcaagttcaaggccattctgggagatatagtgacaacacttgactcaagataaaagtccctaagaaggagccacatgagaccagtgagatggctgagtgacagtgtgtagccacagaagcctggtgcccaaagcccatggaaaggtgggaagagagaagcagtgccagagagttgtactctggcctttgcatgcacatcatggcgcgtgcgcatgcgcacacacacacacagacatacgctctcacacacatgcacacacacaaaattaattaaagcaaccagacacacactcaccacatgcacatacagagagaattagttaaagcaaccagatacacacacacacacacacacaccacagagtgacagatagagacagaaagacagacacatagagagggggagtagataatagctgtttattaaaaattaaaaccaaacaattaatttgtttttaaagatggctgacaactcatttggtaaaggaattttttgccaagcttgaggacctgagttcaatccccaacacccacatcgctgaaggaaagaaccaacttctgcaaactgttctcagacctccgcatgtttaccacagcatgtaatacaggcatgcaaacatgcatgcatgcatgcatacatacatacacacacacacaagggaaataaatacatgtgaaatatgtaaatgcaaagctgcataagagggagtgctcagcggcagagaacctgaggacacatgccaggccctgagctccatttcctgtgccgcagaaacaaaggaggaagcaaattaatgtatagcctctcgggatagttgctttgaataggaagcaaacggggatgatgatggagaggcatcttagaagtgccagacatgtgactccagctctcagagaagctcccagagtcttcccactatgggaagaacaagcaggtgtaggtctgggaggggatccagctcctgtgggaaacagcacaggcagctcctcctcttcctgtctggactcacctgccccgggcagcattcccacactgggtaccagaaagactctgagcagcaccaggcattgcccttctctgacactgaattaattctccagctccaatcccactggatgtgtaaacaggtaactgattaacctatagttggcgagtccacagggagcctggccaggagcctcctcctggtagatctgctgtctggagttcccttggtaccatcttgcgtctgcagagggtgggttccctcccctgactaacacccagcactctaatgtgagcacataattaatattgcatctctggtggagaaagcagatcgcattcctgactttgttatttatcacactcctggggtcccgtgagtttcagaagccatgtcaacttagaactctgcgttattcccaccctcacctcccagcccctgcacaggactgtgcatccatggcctcctatttgtccgccctgaacctttctgttttttcaagacagtgtgaaataggtttttcaccccttctcccacccccatctcctagtaaagactgcatgagaactcacacaaacactctctctcctgccccccatctctcctccctccccccccagtgaagactgcatgagagagtatatcatactgggttcacagaccctagactgtggtgtgtcctaggcaaagagtagacaacagtatgtactttgttctctgcctctagatgggagaaaaggacagagatgctgttctcaatcctgtctcagcagaaaccagggtctggaatagcaaagatgctctctggggctgataaaattatgactctccctagccctttagccgtgacaagtctctgcaaagagtggtcatcaaagatgctggagtctgcccagagcagaatctagtgcaaactcctggccaactctttggaaggcaaggcacacatttctcagaacccaagaagtaaaactgaatgtaagaacttctatttgaaattcaggaagtccaccctgaaggtgcaagtctgaatggggcccctagaaaaccttccttcaaagcaaaatgagactcttattcttggacactgtctctttaaggcggcagaaccgctcagatccttcatttccaccctttcagaggggccttggtgagctgaaacagcaaagatggagacagagacatcaagagcctgccttggagcccagttcaagagccctagctcttttacttcaagaaattacttgaccttccttggttttgccttgttttaggcaagtccttgctgtgtagctccagctcgcctggtgctcattatatggcccaagctgatcttgagttccaggcaagcctcctgcctcatttcccaattgctgagatttccaagcctggctgacattactcaacctttcctctaatagatctgctgcatgtcagatgttagagccattgggtgggtacctggttgtgtcatttctctgacttcctgattgtctaatgcttgcagctcctgcccttttgttgttgttgttgttgttgtccattcaccccttgagtaaacatttgccgagtatctggaatatggaatgcattattctagaggttacagcagaaaaaccaaagacaaacatctctgctgtcttgagatttacacctcgtgagcagaaacagatgataaataagggccttgtatatgagaaaaaagatgcagcgaagaacactaaagcatagaaagaattcaggaggctgggactgggtgtcacttatcaatgggagtccgttgaaggttgtccctgaccctcgcttggatgactagtgcttactaaatgctttgtaaagcccttgcagaggcatctcatttgggaggctgttgggactagtattatgggttcatggagatgtgctgagccaggatcagtacctggctcttcacatagtgcctgtgttgttttggcgccacctgttgcccagatgccccagggtaaccatggcaatgagaagtaaagctgaaaggatggagtgaacagaaatcccttctgtccattatgaatcctgtagatgctaactagtgctcagccattgtgggagaggaggcgggagccaacacctacaaagagagggtgtctgtagacttacgttgtcctccagcttcatccttcatgtttcatgttatgatgagtgcacaagacagggaaaataaaaatttttaaattaaatagttggctcaaagtgttgactctgctcccctgatgctcccagattcttggctgctgccatcttccaaagcaaaacaaagtcctcctcggtagtgcctgtggcatgagaaacttctgatcttgaggaatgtgatgtctttatttactcattttaaccaaaatgcatacttgcagcttattctgtttgaaatggcagtaaacatggaacccagtcccccaaggacatgagcatttcattttggagatgattcatacatgcatttgggtattatgatcccggacagcacattaaaattacaacatgctgttagcccataatggaatgtggagtttacatgctgttccatggaaggaggaatttgcttggcccctcacccatctctctgatagcatggtattcatttggaccttcacagaagttatctgaaatttaagattttacatggctctgtgcagccagtggatactattgtgtgattattagtagccagagtcaaggcaggatttgatatttcaaagctcatggcttcctttcagagtccagcatgcttttgtggaagggatagtgtggctaaaaccaatagctcctattggattccccgggtagaatgggtctttatgtatgatctcattagaagaaaataagaccagggatactggacacctaggtcttctgcacagctgggtgttctggtggattctgctggcatgtaagtcctctgtgtgtctttgggaaagaggtcagcccgacatggtgtaggggtgctgcatacatgacaaggaaaagattcacacagaggtttgctaatcaaagcttcaaagatgcatatgcctgcaccagtccatggctgagaaggctggaagatccctgctttgggagccttctggactgtaagctcccacagatacctcgttctttagcataaggatcacctttccttcatgcttgatccccatgagcacctagtagcatgcctagcacacagtaggtattcaataaagactcactgtgagtgaactggaagctcaagaagaaagcttgtttatagctctgcccacagtcctgacatacttacttccttagatcttgtctaaggaactttgattttcctagcgctgagagagacagagacacacagaaagacagagaaaacaaacactacttctgccccatctgccctgcagtcataaatgacatgtgtgtgtgtgtgtgtgtgtgtgtgtgtgtctattacacttgtgtggaagacttcaaagggtcctttcaattatttccaacaaatacagcctgagatcatgtatgtaccaaaacgtgccaataccagtggtcactgaattagctacagactggaattaaaaactttcctatcatgttatagttgatgtacatgcctcaaagcatatataatctgtgtcctctaatcccacacaagtacttatcaaacatgataagacattattgccagaatgccaccacatcttgtcatttaatgtgctaatgaaatacccaaaagatcctaatttgtcatttttttcaaaatattttacaaacccatgtataatgtgtgaactgagaagcagctatgaagagggactacagctcagtggtggggtacctgcctagcacactcaactcaagtgctgagttaacaaaaagcaaacaaacaacaaaaacaaaacaaaacaaaactatacacattaatactaatgcatcatggttttggtctgtttttttttaattaggtattttcctcatttacatttccaatgctatcccaaaagtccctcatacccaccccccactcccctacccacccactccccctttttggccctggcgttcccctgtactggggcatataaagtttgcaagtccaatgggcctctctttccagtgatggcctactaggccatcttttgatacatatgcagctagagtcaagagctctggggtactagttagttcatattgttgttccacctatagggttgcagttccctttagttccttgggtgctttctctagctcctccattgggggccctgtgatccattcaatagagagtgtgagcatccacttctgtgttttctaggccctggcatagtctcacaagagacagctatatctgggtcctttcagcaaaatcttgctagtgtatgcaatggtgtcagcatttggaagctgatcatgggatggatccctggataatggcaatcactagatggtccatcctttcatcacagctccaaattttgtctctgtaactcattccatgggtgttttgttcccaattctaagaaggggcaaagtgtccatactttggtcttcgttcttcttgagtttcatgcatttagcaaattgtatcttatatcttgggtatactaagtttctgggctaatatccacttatcagtgagtacatattgtgtgagttcctttgtgattgggttacttcactcaagatgatgccctccaggtccatccatttgcctaggaatttcataaattcattgtttttaatagctgagtagtactccattgtgtaaatgtaccacattttctgtatccattcctctgttgaggggcatctgggttctttccagcttctggctattataaataaggctgctatgaacatagtggagcatgtgtccttcttactggttgggacatcttctggatatatgcccaggatggtctgtttttatagcagagttataagcaaggttttgtcccgaactttcagtttccccaaaagccttcatttaaacacctaccatgtgctaagcattgttccagatgctcatggggaccaagaagaaggaagggtggtccttacttgtaatgagctagggatccatgtggagcttacatcccagaaggcccccaacacaccgtgtgtgtgtgtgtgtgtgtgtgtgtgtgtgtgtgtgtgtgtgtgtgtgtgtgtgtgtgtatgttgaatgctgggaagataggcatgtgccgccatgccaagcaggttcatgtgatactggagattgaatcccagtgcttcatgcatgctatgcagacattccaacaactgggtattacgtttgtcagtgtgtgcatgcgtgtgtctctgcgtgtgaagaaatttcatagcactgtcctaagatgaggacccttgatctgcattcattcatcaaactaccacagcaaccacgaaaaggctattgggagagatttctagagaagtggaggtgagactgaagtttctgggtagctgcatgaggcagtctgggcttggtggttctgtctagtagggcaatagtgatttctgccccatagttgctgtgccctgcctcactcaggaggaacaagaggtagactctgcaggagacccccagctcacaggaagtgctcagtaaatgtggtagctaccagaatattgcctttaggctctgggaagacatctcttacccaggtcctcaaggccaatttgtttcacccaggttcatccggaagcagggcctggaccgcctcttcctggagtgtgatacacacatgtggcgcctgggggaccggcggatcccagagggcattgctgtggatggtggttctgattggttcctgctaaacaggaagtttgtagagtatgtggcattctccacagatgacctggtgaccaagatgaagcagttctactcttacacccttctccctgctgaggtgagttctaggaaagccccagggcaggagaggggagagaagctaggtgtagccctagcagagagtgaatgtttggcattcacctggctccaccaactgtcctctgaacctccagacagtgctgtcatccctgcagaccttgacctcatggtaagaactgtgatacacacatagtgtcaaggatgctatcctcatcctgcatggtctctgtgtgtgcaaagtacaaaaaaaaaaaaaaagaagaagaagaagaagaaagaatgaaagaaaaaagcagcccttgttcaagtcactcggtccctattcctaatagaaaaaaaaatccaatattctaattttctagaaaaagatgttactgctatttgcaacagaaaaagaaaaaaaaaaacgtgttagaattgcagaccctctgactgttgatggcactctctggaattgtgtggcgcatgcgaacagttgcaggacacagccacatcacatcttccagtcatcaatcatgcagtaaagtaataaccatttgcagcaccagtaatctcttttctcatttgaatacagttctgtccctcctgtcaatccctgatagtgctgtcttcattgtgcgtgtgcgtgcacacacacacacacacacacacacacacacacacacacacacactcctaatccaaaattgcccccagacagccaaatgagctctttccctggccctctccattgccagccatcatggctcagcccttcctgtggagcattttgaacaagcccccgagtcatctgtgacatcaaggtgcagcccccatttcatagggctccaggcttttctaaaacagcctggcacctcctggtttatgcaggccacatgctagacaccgccttctctcagatctaagctgagagcttccggcttcatcttcctgacccccagcccagttttatcctgacttctaacctcaggaaaaccacagtgtttgctctgcttccacagagcctgtggcattgctcatgtgtggttctctgcttcacccctgctgggccccaagctctgctcacacagctgggaacagaccatgcctctctgtggatggtttccatgcattatcaggccaggggtcagcttccgagagggctggctgtacatacacctcactgtgagaagcccagcctcccagagccagattttgctattccgcacgcacgttaagtcatcagcttttaatcctatttcagtgaaaatcaccttttctctccattctgataacctcctcatccattatcttgcagggaatttctgcctcgttataaaggacacagggcaattggtaattgggtactttcccccactgcttgatggaagagaggtgcctctgtgagcttgtagacaattcacgtttaaatccaggtcccctgccaatgtcattagcatcacaggaaggcaagtgagtggccttgagtggcaggtggtgcttcattctgcccatccacccatttagacgagagtctccaggagttcggtagttctcagcggtaagccagccacgccatgggtacccaaggctctgagtgcactcactgccccaacccctgcctcagcacctggtccctagggtctcagtcagaccctcttcctttgttgtgctgtgtccgccttcttgttctttcctagacaactccagggcttagaagaaatctaaaggctgagtccataaatctgccagtcaaacacatatccaccaacagcttcccctaggagaccagagcccagaagaaaatgtattctctggttggcagagattgttataaaatagtgttgaaacagaaatccctttcccttctctctcttagcatctcagaggctctatccaaacactgtctcctctctgtctctttttgtcccagcattacctttctatcagggtcgctggaagagttggccaagagtactacaattagaaaatgaccgtgggtcctggcttattcccacagaatgcatgcagcccaccttgtgttatatggactcctggttcagtaccatggataggaaacaacccttcagtatcctgtttaaccttgctgtgagctcagtgggtcctggataagcaccatggacagcaagcacacacctaactccagttctaaccacactaccctagtgctgtggctgctgtggctcctggtccccagcactgccaatggcagcatctctctcaccaccttttcttgtgttgtagtgaaagtgatgggccttggcttgtcacctttcccttccctcccctgcaccggagtttcactgtatggatgaacccatgatcctggccttcctcatccagaagtgaaatcccagctcattagacattgttacaagtctatttcaaacctgacctgttggttccagtctggctctttgcaaacaagatcctttgcatcccatgtttgaccctggtccctatttattgacacatcttcagaaactcttcctattggttaaatagacagcagatgcccagggtgataatgagcagatatcttcatattggatcctaggcactagtgaagcgatgtccaaggcaatggatttgtaggtaaaattagccagattaaacagacatctgtaccctgagtggactggcctggcagctgacaccgtgtgcctgctgagtgacttaatactggtatcctgggaagccctttgagatatgtggtcctcaggaaggacatgccaatccaacatacttggttgcattattgggttctcagtagccttttttttccccctgcagtcctttttccacacggttctagagaacagcccccactgtgacaccatggtggataacaacctgcgcatcaccaactggaaccgcaagctgggctgcaagtgccagtacaagcatatcgtggactggtgcggctgctctcccaatgacttcaagcctcaggacttccatcgcttccaggtgagcccacacaccccaccacagcttcccagaaggcctttaaggccagacctatgggccaactcctactcactgttcaatctagctataaccagagttagcaagcatgatgagtggctgaaccatcctcccaagattggctcattaaacaccccaatagtcctgccatatgtatgttgctgttattatgatccttccatcttaataataaagaaaccaaggtgcagaaggtttcaaacccttgttcatgatcacacacctccggctagagagatggctcagtgggcaagagtgtgagatgcaccacaagcatgggacctgactttggattcacagcacccatagtaggagccttggatggttatatgcctttaaccacagtgatgaggagtagagagacaggaagaggcatgaggtgtggtagccagcatgggagcagcaggaaatggtgaacttcaggttcagtaaaacacctgtctcaaggcaggaagccctagtgggggcaggaggggtaggagggggtnnnnnnnnnnnnnnnnnnnnnnnnnnnnnnnnnnnnnnnnnnnnnnnnnnnnnnnnnnnnnnnnnnnnnnnnnnnnnnnnnnnnnnnnnnnnnnnnnnnnnnnnnnnnnnnnnnnnnnnnnnnnnnnnnnnnnnnnnnnnnnnnnnnnnnnnnnnnnnnnnnnnnnnnnnnnnnnnnnnnnnnnnnnnnnnnnnnnnnnnnnnnnnnnnnnnnnnnnnnnnnnnnnnnnnnnnnnnnnnnnnnnnnnnnnnnnnnnnnnnnnnnnnnnnnnnnnnnnnnnnnnnnnnnnnnnnnnnnnnnnnnnnnnnnnnnnngggagggagagggagagggagagagagagagagagagagagagagagagagagagaggatgaataagactcatggctgttcacacattcactcaaagatgatataacttgaggcactcatttccgatggcattctcagcatctcctctacattttgggcatgtgcttgaacaccttgagggcagggttggtttgtttgtttgtttggttggttggttggttggtttgttttgtttaccccagcactcttgacattgtgactgggtcactgtgctggtggggactatcctctgtggtatctatctgtaagatggtggttgcacccatcaactgtcaaagttatctcacagcatcccaaaactgtgacctacgttcaaacttgccccttcttggaaaccactggtctccagcaaagtatagaatgttgttgtatttccaaagtataccttggaaaaacctgaggcatgttcagattgggagaacaccatgtactgcacacatgaaggaggactacaaggtggtgtctctgaatggcctttcactgtgttgttctgagcagtgtaggtagcaggtaggaaatgctcaacttcttgccacagccctgagagtgccttggccccaaggttctgcactagatagaatctcttctcattgtatatgctgccccaggacagtgtggtgccaggaaaggacagggctctgagggtcttcctcttttctagcagaattgaaacaaagccccataaaatgcttaaacagagcaggtaggggttactatagtcatcacatggaaatgacatcttgcttctcagaaagatgacaagagcagcaccacaagctgatgacatcacaagacatccttgctgtggtggcatagagccaaaattgcctttgtggagcttcaggtctcttaacctagtcccatggaacattgccacacacatgcagtatctccgttatcaggaggcttgtccaagaccccgagcctcagcctcctccacagctacaagtcagcatgaagcagggactgggtagaagttctccattctgtcccgttggatctcttctttaccagccatgggcctgagcctctatggtcattggctttgctgggttggacatcatctgttctgtaggtgggaaaactgagcccacaaagggattcaaatcactcttctatggccatgaagctaatgaatttggaaaggccaaagacagatgggtatgtaggagctttaccattagtctccactagttctgtgcttctctggacacacaacaagcagccatttttctgttgttatctatacttcccaatatccccacttagcatcttatctgcctatacttggtggttcactaagagcttccaggggaccctccaggcccatgttaacttaagcatagacttgggtggtttgggactctctactcatgcagaaagaatggctgcaaggggaaaatgcctcatctgtctaaaagaagaaaagtggcccatgtttctgtctagggagatccctgcccttgctgcagaccttcagcatttagagatggcagtccagagccttggtatgctgattcttacaggaagttgctcccttcagggtgttcctggatgtgtcatttgtatgccagccccaacatcctggggtcatcacggtctccaatgaagcaaagctaacttagagaatgaactaagtttacacgactttcttttgcagtaagtaaagatcaaggctatcattcaacatctaggctcaagaaactgatgaagcaaaaagaatagatgggttttttttttccccaaagaactctgagaatgagaatgataaaaatagatgcatacccttggggctagagagtacttcctgatcttctggggacccaagttcagttctcaacactgtgtcaaatggatgtaacttcagtcttaggggatacaataccctactctggcctctttggaaactcatatgcatgtgacattcacacacacatgcacacattcaaataaattcttcaaaacaaagtgcatgcttctagaagattattctgtgttcagagaatagcaggtagaggtagaagccatcttgccaatgaggcagattatctgaccctagaaaatgacaatagagaaccccatagccaaattaagtgacaatggtggattccttaactgcaactgagaatgcatgcaagaaactcatgcctgtacctatttcaaaggcaggggaactgaggctggagcagttggatgacatgcctaaagacacacacacctaggaagtagcagtggccacagactcaagtggcctgactccctattgctgtccaacccctcttcagacagacacagcagggctcgggaagtgaaagtgatggagtgttcttcatcttcaggatgtttctctctgaagagcttctgctcactcactaatctatcctagagggatgcggtgggaacagcttagggtttggagctgtgggacttggtgcaagtgttaggctgtgagcatttcctgagtgtcgattcccactgagagataaacatcctcgttggcagaaggggaatgacaacccttcctggcagagactggtgttgagactcatgatgtcctttgttattctctgtgctatcagtgtcagccctgcaactcttagtcctcagaagggtccaccatgtctgatacgcagcaatagttggccagagtgaactcctcaagggacagggctggctgggctttatctctttgtacagtgccagcctgtgggtcagcacaccacagctccctgaccagagtcagcccagcctactcttataaacgaagctgttggaatgcagcctccatagctcgtttacggttttgcctctggctgtacctttgcttcatagttgagaagttgcagggctttaactatttactctttggccctccactgaagatgtttgtgaagccatgccttagaaatagcgggggtgggtggatatgggggacttttggtatagcattggaaatgtaaatgagttaaatacctaattaaaaaaaaaaaaagaaatagcataatgcttacagatgccaggtgctttgtgttttgttttttagatctgtacattgtgtgcatgaatgtgcttgtgtgcacatgtgagtgtgtgtgtgtgtacatagagaccagcttcatcaattgtttctctggacagtctgctgtagagctcagacctttaggcaaaacagtctccatcttcgtgagatcagctgagcctacttgcaaacgtccatcatggtgtggcctgtggactgttgacagtactgcagaggtgggatcagcagcacaattggatctgagtatctagcctgctgtcctgtcctagttgctcatggctgcagggttctcaggaaggggacagagtatacaagctgggatgcttggcaggaagaggcttcatctgtacagctatggagccctcagctctgcttggtgcagaccttctaggtgctccctggtcctccacgctcctgccctgaacccttccccatgctctgtatgtaagcctaggaaactcagtggttcccaagacgagcactgctttaactgaactttggtttgacattgaggtcttttgaagaaggagtagataagtctccctagaggcagtattttaacaacactctccatgaaacagggtctctcagtaaacccagaattcccagatttcactaggctggctggccagcaagtcccaaggatctacctgtctctatctctcagccctgggagtacagcacacatcacttgcccagcgtttttgcactccaactcagatgctcatgcttgcagagcaaacacctccctagctgagctgtctccccctagtcaaggcatatcgtatctttgactttcaaccctaagtcttcaccctggattggccactgatttgctttctatctgagggcaaacccttctccctcttggacccatttccacgagttctcatttcacacggcaaacaaaatcagccaggagcttcatttaggacttacatctctgaatgtcatccccagggttgttgactgagtagagaaaaggtgagagctgtgggtttgcatgttagaagtcttgctcagagcatggtccagccagtcactaccctgggataggttgtatggagtctcattggcactaaggaaacagctgctggttgaacaggacttttttatttctattgtaaaatggttatctagcagatctgtcttcctgattccagatgaactaagacaaaggataatcttaggataaaagagaggaagggtcatagacaaggtggagtctcatatgtgagcgactgggtttttctttggagccacttgacaaactgtgtagactgccatgctcccagcacctggagagtatgaagtgtcgccccctggagtgtcccctgtgagcccacaaatcagctaagatgctaggggacactagggcaatggcaggaagaagagcctgtgtttttgtccaaagggatgggctgccattccattttacctactatggccacctcagaatgtgacccgtgttttcccacaacagccactattgaaaaggaagccacatttgtttccatgaatcttgcgctttgtaaacattgccagtgaatttgattttaaagcattcttccagccaaagaaaatacattcgccctgggatgtttatctgtgacctttgccaaaaagctgggagccaacgctagcactgaacacccacggttcaatttatttcagggtcatttgagtgctgtgtcctaaatgcccaccatgctttgatgccttacagataccaacatcatccactctcagtatgacccattttgtagaggataaagttgaaaacaggtcatggagtcccagggctggagtttgaagctggcaggtttattgcagtgccttgcctctccttgcaggatgtaggatgaagacagcccccatttcttgataataaaacttagggtttttttctctcctgagcacagcagacagcccggcccaccttctttgcccgaaagttcgaagccatagtgaaccaggagatcattgggcagctggactcttacctgtacgggaactatcctgcgggcaccccgggcctccgctcctactgggagaatgtctacgatgaaccagatggcatccacaccctcagcgatgtagccctcaccctgtaccattccttcatccgtctgggtcttcgaagagctgagtcatccctacacacggatggggagaacagctgcaggtgagccaggtgctgggctgggtctcaggcagaacaagatgctaacatcatgctctcctctccccgctcctccttatcaccacgtgactctctctatgctatgcctcttatctttatcctccaaacgcaggctgtaatattgaccctaatcatagtcattgtttatgctacttaaatgttctcccccttccttccttccttccttccttccttccttccttccttccttccttccttccttccttccttcctttctttctttctttctttctttctttctttctttctttcccattggcctgtcttcctttcttttcttcttttgcaaacagtatcatactttgtcgcccagactgaccttaagctcatggtaatcctccagcctcagttcccacatgccaagatcacagatagacaccattatatctgactttgagcaaagccagattgtccaaccctcagtttcttcatatataagatgaaaaggaagtgctcacagccacctctggagtgtatattatcatcctcacttgaatagtacttaacatgctgagtggtcagtagcttgcacatgattctggtaccctagcagccctggataaggtatcacaatggttagccgtgagtgttctggttgggatagtatctggttagctgcccctctcactgctgtctcattgtggctctttatttactgtcccatcactgcagagtctagctttcccagtcattagggccatcaggtcccacactgtaagaagcttgtgtgtgtgttacagtgtatgcatgtgtgtacattcatgtaactgtgggggccacagaccaacagcacatgccctcctccaacacccatcacctcactttctttcacattttttttaaagtgtgtgagagagtatggatagccatggaggccagaagaaggcgtcaggcgtcctggagtttagctagagttattagacaggtctgagctacccattctgtgtgctgagaactgagctagcaccatctacaagagcatcctgtgagcccttactgctgagccgcctttgcagttctctctctctctctctctctctctctctctctgtgtgtgtgtgtgtgtgtgtgtgtgtgtgtgtgtgtgtgcatgcatgagatttaggaagagtctctcactgaacttgtcgctcactgattcagcaaaactggccagcaaccccaggctcctcctccctctaccgcccccagtgctggcactacaggcacatgccacagtttttgctctttatgtggctactcgggatctgaactcagatcttcacacttacatagcaagcacttttaccaaatgagcttttacccaacccctctctggggtcagagagtccagacacccccacctctctcccaagcctaagggacatcacctccaacaggcccatcacatgtggttgtaccacctagtatcaatgtcagtgaatatctttccccctgtccagtctgtgggaagagtatcaatcttgaaaccactgatgcagagcacagtgtcccaaacttggccagcaactgtccttccagcttaatcacgagcctcctaaaacctataagataaatgatcttataggaaattccaagagacactcccgatttatttagggttgttgaaacttcctcctggtacttgctttgaaacgaagcaagccatctagttgcctcaggcccagaatcctttggcttttctccttcattttttattgtgatggagctattgtgccttgccatgggcaaacccatgtatttatgaatcggagactgggaataaatcaggacaaaggacccttatcccgaaaaggccgaggagaatgaattgctacccgtggggcatctagggaaatagcaagtgcctttcaccggatctgggcagttcatgcactctgtgtagttctaggctgtggtgcaacctttcgtaaaacagtgcttattgattcagtttctcattataaagtaatgcatgttcttttgcagaaatgtgtgatatagcagattcaaacataggagaacaagaaaatagaagctacttctgatccaccatgtagggattgagatgccaataatgttactacaaaaccttaactcaggctccagcaaatactactacttgtgagttggtgtgagtcccacagggggcgttgttcacactaacagagactgcctgaggtccatgcacctgcaagtcaggatgagccctgcatgaggcaggcactgtgcattccagcctagaccacttgtggttccaggctcaactcttgcccaatgtggttaagatgtcaacttgaggttgactatcaaatcatctgcttttccaaggcaactagaaacccaaaactgtatgttgctctattttcccaaagctcactttatttaaataagggatgggagaaacataccttgggcattcccagtgaattctttaaattattgcactgcctcttggccatctcccttttcttggtgaagttgctgttgtcattacttagagatggaataatatgactgtaaggtgcagagggccttgtgttacaccttgggttacatggttctcagatgtactttaaaagcacaaagctagagcttatcactcatccgcaatcactgcttgaatacctactgtgtaccagactctttgttaggcacggaacattcacctctgacccagacagacctgaccccaaggtccttacctgcagattctagtgtgaagacacacagttcctaagtgtgtgcatgtgcatgcttgtgcgcgcatacacgcacacaaatacacaagagaaagggggtaaagggagggagagagaggaaaaatattgatagatgttttgctgagttgtgagatagttctcattaagtgtaaaggcaagacatagctcaccatatactcactagaaaagaggaacatccccagcagagagaatgtcctgtgcaaaggccctgaggcacatctgaactcagcacactcaggagcccaaaataaggtaccagtggccaacaagtggtaggtttgggcttaggggaacaaatcaagctgagaaggacagcttttcaatccaggtaagaggtttgagtttagcagcaagtattaagagcctgtggctcgtaaggaggcaacaaggttgactacagtgaagagattcctgtagagcctccatggaggcttgggaagcctctggcagtgctcagcagagcagaagaaggtggagccatacaacagaagctttgatggagatggctcagtggggaaatctcttgtctcacaaacgtgaaggctgagtttggatccccagcctgcactgtaacacctgcttataatcctagcagtggtgagagggagtaggagagatggatcctggaggctcataagtcagctagcctagcctaactggcaaagttccaggccaaaaagagacctcatctcaaataaaaagcagaaggtgcctgccttagttagagtttgattgctgtgaagagacagtatgatcaaggcaacctcttataaagaaagtatttcattggggctggcttatagtttcagaggtccagtccattatcatcatggtgagaagcatggaaacaggcaggcagacatgatgctggaggaaaagttctccatcttgatcctcaggtagcagaaaggaactgtgttacactgaccagacttgagcatgtatatgagaccgcatagccccgcctccacagtgacacacttcctctaacaaggccacacctcctccaataaggccataccatctaacagtgccacttccatgggtcaagcatattcaaaccaccacagtacccaagagtgacctccacgggcacactctgcacacactccccaacaccctccacatatacacagtcatctgaaaacatgcagagaaacgcacaagcacacacccagaagaaagcaaggaaaggtaagtaataaactacagattgctccaatagcaatcctttactggcccatgttcttgacatgcagcaacactcagtatggttgacatactttctcctgtgcctctcagagagcacacactcctctgtcacacccaccttacaaaacaaacactataggtgtattacatgtggactgctgtaatgatacctcataacaaataaacccaggtgggggatttataatctttccttagtgtgggtgtgtgaatcagctaggccacctcccttcctagtctggacctgcctctttcctgtgtcttcagccagctgcaggtcagcatgccagaactacagttctcagctgggaactctcggctgaaccacgatagtgtgggctaggacaactttgatgacgctcatctgttacgctcatcatcttcccgcaggctagcccaaacattctttcatggtgacccaaacaaggctggattagaactggctgcaatggcacctctctactcgctattggccaggaggcagaaaatagactctttctcaacagtgcaaagagatactgaaaacatggggctttggggacacccatgcaggtgaacacagacttccatagctatatcaaggggtccaagtgtcacaaatgaccattttcatttaaatgaactaaaattaagccaagcatggtggcacacacctataatactagcatgtggaagtggagaccaaaaaaaaaagtcaggatttcaaggccatgttcaactatggattaagtcggttgccctcctgggatgcatgagtctctgtctgaaaagaaaaaagaaggggggggggaggaggaggaggaagagaaggaggaagaggaggagaagcagctaagaaactggtttagtgggtaaaatgcttgctactcaagcatgaaaaccagagttcaaattcccagcaaccacaaaaaagccaagtgaggcagcatgcattgttagtcatagcactgggaggcagatggaagtaccaggcttcactggccagccaatctatctaattggcgagctctgggtttagtgagagacactgtctcaaaaagtaagttgagaagttatagagaaagataccttccatcacctttggcctatacacacacacacacacacacataaatatattcacacatgcacacacatatgtgtatcacacatacacaagtaaaatttaaaaacgagtgatctagcattaaaaatgatgcccacatttcaagggctcagcagttgctggtggctaccacgttggtcagcacaggtacccaatccttccatcacctaaaaaagcactgccagacagccaagcaactgcaacagcacagcgccctaggcttcccacccaccatagtcacaccaaaagtgtgccagcgtgggcagggaagacccagccatctgaagtcaatgcaggctctttctgcagagccccagaggcatcccggtaacaaggcagtgatttcgagaggctcgtcaacacgggaaggaggtctccccagccattctaattggacataaagacttaaaactccagatcggaagcagagggaagcctgcagttagcagagaggggacagtgatttgtggaacgctgttattagggagccgctgcagcctcttagtgccgtgcaatttacacactgcagaagcaacagctttttattttgcaagtggagagtttctggtctctgtggctccctcttcccttctgtcctctgctccccacttcctcctctcctgtgctgttttcgggccctacctagccagccaacctgtgcggaccagaggcatacaacgtaaaacaagctttgcatgggaggctgggtgtttgcacgtgtgtgttggcagtaatttttagaaaaagaaaaaacaatgtgggttcatcgacacccacctgaggaagagaacagcaagaagataaatcagtactcctgataaacttaggtaccagatttaaagagttttttaggtgtacgtgtgtgggtgtgaatgaacatgaattccaaaagaatgaaagatatgttacaatattattacccatcaatagatcactggttctataaaatagaatgacacactctcatctgcacagacacacacaatttcttattttcagagacatgtgagagtgtgcaggaagtccaatggagcaagagcctggcatatagactacgattccagctacgcaatgtacatggggctgtggagacggttctatcagtaacgtacctgccacgtgagcatgagaacatgtaccctagaacccacatttaaaaagcaaggcatggtggcaggtgctttgttatcccagcactagggaggtagaaagaggcaggctcctcgggctcgctggtcagctagtctagcccactggacaaactgcaggtgagtgatagaacctgcctctaaaaacaaggtggaagacacctaaggaatgacatctgtggttccagttatcctccatacccatgcacatgaacctacacacacagtgttagccagcccactaggtaacatgcatgcaattatgggcatagaaaatgaagctacaggaaaaggcaccagacatcgtctcactctctggtacccagcaccagaggactccgtagctatctgtgaattggtgttatcatctatggggagaggcatcgaaagcagagctttcttttctttattgtactttcctatagtcaccatgttttatacttatcactcttgttttaaaaaagtaacaatttgcagccgttaagaccctaggttcatggatagcagctttcagactgatgcagattatgacaggctaaatgggggctgctctagaccactgtggattgtggagcctcacagtaacactacacatctcacagcctggtcccctgttctcaggtactacccaatgggccacccagcttctgtccatctctacttccttgctgaccgattccagggctttctgatcaagcatcacgtgaccaaccttgctgtgagcaaactggagacactggagacatggatgatgccaaagaaagtcttcaaggtcgcaagtccccccagtgactttggaaggcttcagttttctgaggtaagaggccaagcagtgtctgtcataattgtctcttgcagctagctctcttgccaggctccgtgcttcacctgacacttagggctggaaatggaggaggaggatatctgcagagccttaaagatgagcatagtctgttcctggagacagttttccggccccataaactgtaaccagcatcatgaacaacccaaacagagatgtaatgaagtgtcaacatctttgaacagaatcagcttagaagcatggtctattgtttttgggtaaaatttcttctcttaattttgcttctcaaccattgatttcttctaagcctgttatagtaatgaaccaggaacaagatagcttcttcataaagtcagggcattagtgccattttatggattgggtaagtgggacttacggacgtccaattattttctaagtaactgctaagacattaaaaaccaaaccaaaccaaaaaaaaaaaaaaaaaaaaacccacagaattgattccacgtctcactggccacaaataccatgccttgttttgtgctgttattttccccttgttcctaacacagggactagctcctatcctttaggagtaggtgggctggtggccatgtaaatgaatgaatagaaagatgggatgatggagctgattgttaattagatgaactgttgaaccaatggatggaggcatgggagtagaggtgggtgtgttaatggacatatggactcatggatgacagatgggcagacagattaaggatagaaatgtaggcagtaggatggataatgatggagatgagtagatggatggacatacagatgcatagatggaccaatggatgacaaatggatagacatgtaaatggatatacgtgtaagcaacaagatggattgatgatggatggattgatgacagatggatggaaggatggatggatggatggatggatggatggatggatggatggatggatatgacatatagaataataggtagatgtatgaaaagatatacagaagtttggttggataatggatgggtggatagctagatgggtagataagtagacagaagtgtgcagaaatggatgagtgggctagcatgggatgtatggattcatagaatgttgttccctctattcacaataacatcagctttctttgtctacaatgtccagaagagcccacatgacctggttgctgtttgcctttctagccttgtccaataccgtgctatttcttgctcacagttcctgtatctttgtcaaacaagatgtccttgttcttgactgaagtttgtcatgtccctatacctagagtgctttttcacaggttgttctatattttgaaatcttttgttttttagtcattctgatctaaatccaagagccacttttaaagacactttccctggctacccccctcctctgccctgtgtctcagtagcaacattatatacctgctacttccttaattgtctcttttagaatttaccttataatgttatcttgatgatttatgaacatgtctggcttatatactggacccctactatcactcactgctgcatcctctgcacactgtcattagtaaaagagccatgccattagtggatggtgaattctgttgaataaatatgactgcccctggggctgggaaatgctggaaggaagaggaggtgtgattgagcttgggcattgtgacaaataagttggagtgccaggtcaaggatgaagagtgacttgatatgcaggaacctgagggtctaggagtctgaagagaggaactgcacctgcccacacgtccttgctggtccttctccactccctgtaggcctgtctttctgttctgccccatgactgaatagatttcccctgtcaaacaaacatgggtgagagtcttgtaaactcgtgtttttaaaaaaaggttccatggggattgactgcctctgagctgctatggcagccagctccataaattacaagagtcagcagggcaattagatgctgctccagttggattctgttctaggggcccaagcagcccattgaagacattaatgtcccattaaagagatgaatgccttgtgtctggcctttccctgtttatcagcctgctggtaggtcactgggtacctctggcagtgacaagagatgttggccacagcatggttagtaatttgtgagtattttcactatgggtcctgcagtccttgtgaccaagatctccatcagcaatgcagattcaggaagcagaggccttaaccttgtcacagaacttttctagacatgcttagttaataacaaaggtgaagaggaagaggaaagacttacagggccacttacaaactgttaaggatacacttgatattagcatggtctcagaatcttacatagtaatggatggtcaatttagatttctctagcatgatagatagcccatgacattgattggagaaagggatgctcaccaaggacccacaatatgctagattcatgagagacagtagtgaaccagacaaggtatacttgaacttgaacttaggataggactaaattctgatgggacaggcagacaagtaatgagtgaagaaaactagttcagctaatgacaaatactgcagaaaagatgaaattcattcctgtgcttgcttaggctggtgatcagatggtcccttcttgttgttgtcgttgttgttgttgttgttgttgttgttgttgttgttcttcttcttcttcttcttcttcttcttcttcttcttcttcttctccatcttcttcttcttcttcttcttcttcttcttcttcttcttcttcttcttcttcttcttcttcttcttcttcttcttcttcttcttcttctcctcctccccctcttcttcttcttaaagacttcttaaaagagctcaggttcaagctgaaacttgttttaaaaaaaaaggaccatatcacccatgggatctagaacattctgagtggaagacagagcattgacaaatgccatgagattcttggaaggagcttggcatgctaaaggagaagcaaggccattttgactggacatggtgaatgagatgatgaccaaggccagtgtgaaggtcacgataaataagctggagactagaggagatcatggttgaaggtgacagggttagggcctgggaaacagtatggtatgcttgaacttgaacatttatttaagtttctgcaatagcccattgtgcaataaatgattgcaggctcccacactaaggccaagtgaaagataacagacatgacagatgtgacagtaaggagactctatgtgagggtgatctcctctccccatgctttgggtagggaccaggagacactcttcatgcccctcagtttaagagaagaccctagtttttacaagataatttacactctccagctcaagtcactttgtttaagaatacaatttcaacgtaactgcccacctccattcctttaggaaacacaagaacaatgctctggagagttccctgatcagttatgaattcattctgtaagacctcagcgtggctttgtaaccattcttcctttctgttagtaatgttacaagggcaggtgtccagagtgtggatatcctgagaaacccttctgctcaaccctgatcattaaatatgtgttcaacttcgagctagctagctaggtagacggatggatggatagatacacagacaaacagaatgaccaatgaatgatagagtagtacacagatacttagacataatggaaggggtggatggatggatggatgatggatggatggattttctggttgatgatacacagataatatatacatgagagattgtttcatgagaaatagatactgtgaaataaataatttataggtagtgcatattgacaggagatgataaatagatggatggacggacagacagacagacagacagacagacagacagacagacaatatttgactgctattaatagagttcctggactcccacagctagttactgactctgagcatcagtttcatctgcacagtgaggagagtggcaaagttctccccttcccagatgagaatatcacatgagcaggcaggtacagcagatgcttcacctcatgcctggctcttcagtgttgactgtggaactgtgtgtccaaggtgaagcatctgcatggtaattccaaacaaatccttggagaaagaaaatcagctaccatttgctgtgcatatacagagacttctcaagagttgtgcagccacactatcacctcaacctgcatgcacactctcacacacagcaccagctttctgttgtgttcagtatctgcctcttccccagcatgcttatgtgcatgacttcagtaagtcacccctcttggagagcatccaccccctcttctttttactaagaagactcccctcatctcagcacagctgggtaccaaggttctatttggctaattcactttttgtcaagcaattcacttacttattgagaaaacattgcctgaacacctactatgtgttcatttctcttgtaggaaccatgaaagagttgtgattaacacatagcaggctcttctcacagggcctacattatggtgatgggaagggaaatattgaggtttcagatagccctaaggagacctttcagataagagctggctatgcaaaagtatgagaaggtaggacattccaggcagggagcatggttcaggacagggagggtgtggcttggtaagttagaatggctgaaggaaggagcatacagaatgggataggtaggtggtggtggagtgaggaaaagcctgaggaccatagtgaggggttggcttagacccagggacagtaagaagccctgagcagtgaggcacaatgtgaccactccagattcccaaatgcatagtagcttaaaggtgacaaagtggaaggaggaaagccaagggatttgccacccagctacccagctggtgtgaggaatagaggatgtgggatgtgccgcatcactgcagtccagagcagaatgctttgaagaagacaaagttggatccctatgctgcagtggtacgggttgctgggctctgtttccaagcttccgataggttgctccaaagccagggctccatccttattcagaaggaacacactaaatttagagtgctatttgtaaaactagagacccaagaaaaacccagtctcactgagcgttgcttggaatggcgtacagggtgatgtccattcacacttgcattcaatgcaagagtttgggggttttgagtcaaagcacacagcatggctttggcacagggggatgctggtttagtggaaacttttgagtgggagtcgcaatctggtcaagagttccatgtcttctgtttaccatctgtgtaacgtgagtcctaggtgacttggagcctcagcctcctcatgggagaaatgggtatgcacaaccacccaagcaagatcctagactttcctaagactctgttctgaagatttattctcttgtttcaggttggcactgactgggatgccaaggagaggctgttccggaactttggtggtcttttggggcccatggatgagccggtggggatgcagaaatggggaaaggggcccaatgtgaccgtgactgttatttgggtggatcctgtcaacgtcattgcagccacctatgatatcctgattgagtccactgcggaattcacacactacaagccccctttgaatctgcctctgaggcctggggtctggacagtgaagattctccatcactgggtgccagtggcagagaccaaattccttgtggcacctttgaccttttccaacaagcagcccatcaaaccaggtgagtgctctcagggtccctgaggaggagagggtccatcccatggagccctgggaccccatgcccaacatgacacatgaggctgccttgcagagagcaaagcttccccaattgggttttttccctacttgtttaccctatagagctggctcatttcctccttgtacacagaggcagtgccatctgtgtgggtgtttatcagctgctggcccactggactgccacaaggctctgttcatatttaagacaagctgggtactaatcctagacacacactgagttttaacatggcttcttggctgtttggaaaatgataattactgatgcaattctgctcatagaatatgtgataccctaagtaaaaaggacaaaccgtacactggtggaagatgtttgctccccaaaatatactaaaaaataatcccataaataagagtttggcaaactatgagccccagttaactatgggcatttctggtctttatttttaaaaaaaatcttacagggaacatggccatgggcacttgtggacacagtacctatgtctgctttgggctttagtggcagactccaacagtcaggacagagactgactcagaaatgctgtctcagaaatcaaaaccatttagcccctgaagacgatgagtgccattggcagctataacagagagagaaataaggaagaaaaaatgagaacaaaataaagaggaaaaaatgaatttcccacatatgtataatttaaagcaaaagtaacaacaaaaaacctcaccctcattaataatgagaggcaataatgaaaattacaagcaaaaagaggttccagaatgggaaataaatgtgtgcctgtgatggtcagtcagtgccacagggcaggtcagagatgcatggacatctatccaaggctcctgagggctcagtatataggctgcgtttgtgggacaggtgacgcccttctcctcatagtgcatacacacacctaccacagaaatcccacattcaggagtaggcctgtggaagagacagaggcaggaattgtagcagaattgttcatagcacacaaaaccacaaacaagctacaagttgcccactcaaaagcacagtgtgtggtcggtgtgcacagtcgcgtcctgtgtcctagagacagcaatcaagatcagtgccatgcaactggaaaacacgctggatgaggaaaactgatcacagaataagccatgcttaggattacttcatttaaggttcaaaaccaggaaaaagtcaacaatatcttaactatttcgggatccacatgggagcaggaagctaagagaacgaaggaggctgctggcctttgcttcctgtgagcacagagtccagagagacagagaccgagcccctaatggctaccttgtttttattccagatttacacttgggtttctattttttcatagacttccatttgtcaataacatctcttttggctaaattcttgcccttcggggcttaccacttcggccagcctgcctgagcacttctttctaacacctttgacggtgttaaaccataagcacaagcctgtgtcctaagcacagagccagactttggatgctgtggtacattctgtaccaagcaggcttttgtagccttctaagtcggtgcatggaagctgccagctagagaaattccaccattcaaaccacaggctgttcctttctggacacagtaccttctgttgtttgatgatggctttgtggcagaaagtgctaaaaggaagattctggaaaataaaactgtatgttcccactcccagacagactcatagaaacaggattcctgagtttcctagtacaaccaccccttggtgcctatggagaattggttccagggtctttcttgattataaaaactgcaggtgtattagttccttaagagcatggcatttgcatatgccattctccctttcactgtaaatcatttctaaatggctcatgatgcctaatacaatatgaatgcatacacacagctgtggtacgttgcttaagagatgatgacgataaaagctacgtagacctgaccagcatgcacagttttccccaggaactgccctgagttacagagagtatctggactgtccgtctgcatgttacacaacacaagcccaggagctagatacacatgacagtcctgctaagtgggaagcattcccacttggcagataccaagtgccatactgataacacatcccaggaagacacagatgtgggatgggtgcctacagtcctggaaaaaaaggtcttggcttgaatcctggcagcttctgctgagtctttgtgctgaacaagcaaatacctagacacctggtgtcttcttaaagtctgggcctctgctccagaattagccaagacacagcccacctacttagtatcttcaagtgtcccttcacgagcatcttttcacatccttaaagacctaaaaggcaagtgtgaagaagagggactggagccacacatcctccctgtgtcaggtacagctctgggacaggacaaaggatgctctaaatccacccaccccacaaaaggagtgcaggatcctgctggtggtcgtgatctctccaatattttctcctgtgatttccaagaaggtgggagctgctcccagcatccccagaaagaccttgggtcagaagtactctagggaagcaggtcccctgttggcagtaattgtatttgttaatgagacaaggaacactgaggtgggagtaatgcaatttgtgaaatgattcatcttgagtaatttactattgatgcgtccctggtaatctaagaagtctgatgaggtggaattgaggaaaatttaattatggaggcaagcatccgagctgatgccgtggtgctgtttcccacattaacctcttttctcataaagtgctatggcttttttttttttctgtatcagccacagtattttgctcccaatatttcaatgtctgttagctgttcctcttgctttgaattgccccaccgtttgtcagcctgggaatctctcaatcacctcctcctacctctgcagggtagaagcacaaagagactcatagagcaattaggacatgcagcaaagacagaaggcccttttctcctgcacatagtgttggtgctaccaaccctgccttccagtatcgtgcctatggtcaaaacctgacttgttgaaatttcatttgaccaagaatcagatccttttcaaataggatacaccttgcttgtctcctacacccccaaatgcttacaatatgcacgttcctccctttagccccaaggaaactcaaccgtcctcttgtgtgtcccttgatttgatttcaaactatgtgaacttgtagccagcctcctgtagatctaactaactggagccaggttgagtgcctacatttgccatatggggacaacaaggtttcagaatgctggtaccaagatggaaagatagcaactccactttagctgtgagctgattattgaatctgcatagagcatcatggtggacagcatggctttggagtcacttgggatcgaactgactatagcatctgtttcctcacctagaaaatgaacaggagaaaaaccaacccaataggcgtgtttggttggtttgttgtagtggagaacttagcttcagcaccataggcagagcattaggagtcactgcatcaacctcagagttacacagggggcacagcatggcgggtgaggactcactggtaagatgagaggggccatcagagaaaactggggcacaagtcagaagtcacacaccacgtatgtgggacttgggtactgagaccagttggcccaactagctcccacaggcagaaaggctggcgaccaggacatgatcaagcagacagagccgttaggagggtggcccaacccactctggcccatagcaggcttccagggaccactttgtagtgctgagttcacatgctatgcttgggaccaggctgccaggaagcaagaacctgcagcttctcaaggtcacagcagtcccttggcagcccagaactgagccactctgcaggctctgtggccttggattcatgttctggctccaacgtccctacttgtgtgatttggcaatgaggcttcacatttctgttccctctacctgggattctcctctctggccttatacacgtcaatcaacacttcattccaatgatgcctcctcaggaaagtcttccctgcccaccccagactgctctccacgccagagcagagcaaacacttcccataaatgataagtagtgaatattttcagcttttttttttttttttttttttttttggggatacacttagccaatttgaatattttgtgacttatatacttttgttcacagatatttacatctatcggtgacttctgtacaacattatggctactgtggtatttgccaaatgagaactttatggttttcccatcacttttgcatttgctaactgaaattctaacaaaattggaactattgttctttctttattaatttatggcagtataaacttaaaagtattttttattttcttttttttttttttccattttttattaggtatttnnnnnnnnnnnnnnnnnnnnnnnnnnnnnnnnnnnnnnnnnnnnnnnnnnnnnnnnnnnnnnnnnnnnnnnnnnnnnnnnnnnnnnnnnnnnnnnnnnnnnnnnnnnnnnnnnnnnnnnnnnnnnnnnnnnnnnnnnnnnnnnnnnnnnnnnnnnnnnnnnnnnnnnnnnnnnnnnnnnnnnnnnnnnnnnnnnnnnnnnnnnnnnnnnnnnnnnnnnnnnnnnnnnnnnnnnnnnnnnnnnnnnnnnnnnnnnnnnnnnnnnnnnnnnnnnnnnnnnnnnnnnnnnnnnnnnnnnnnnnnnnnnnnnnnnnnnnnnnnnnnnnnnnnnnnnnnnnnnnnnnnnnnnnnnnnnnnnnnnnnnnnnnnnnnnnnnnnnnnnnnnnnnnnnnnnnnnnnnnnnnnnnnnnnnnnnnnnnnnnnnnnnnnnnnnnnnnnnnnnnnnnnnnnnnnnnnnnnnnnnnnnnnnnnnnnnnnnnnnnnnnnnnnnnnnnnnnnnnnnnnnnnnnnnnnnnnnnnnnnnnnnnnnnnnnnnnnnnnnnnnnnnnnnnnnnnnnnnnnnnnnnnnnnnnnnnnnnnnnnnnnnnnnnnnnnnnnnnnnnnnnnnnnnnnnnnnnnnnnnnnnnnnnnnnnnnnnnnnnnnnnnnnnnnnnnnnnnnnnnnnnnnnnnnnnnnnnnnnnnnnnnnnnnnnnnnnnnnnnnnnnnnnnnnnnnnnnnnnnnnnnnnnnnnnnnnnnnnnnnnnnnnnnnnnnnnnnnnnnnnnnnnnnnnnnnnnnnnnnnnnnnnnnnnnnnnnnnnnnnnnnnnnnnnnnnnnnnnnnnnnnnnnnnnnnnnnnnnnnnnnnnnnnnnnnnnnnnnnnnnnnnnnnnnnnnnnnnnnnnnnnnnnnnnnnnnnnnnnnnnnnnnnnnnnnnnnnnnnnnnnnnnnnnnnnnnnnnnnnnnnnnnnnnnnnnnnnnnnnnnnnnnnnnnnnnnnnnnnnnnnnnnnnnnnnnnnnnnnnnnnnnnnnnnnnnnnnnnnnnnnnnnnnnnnnnnnnnnnnnnnnnnnnnnnnnnnnnnnnnnnnnnnnnnnnnnnnnnnnnnnnnnnnnnnnnnnnnnnnnnnnnnnnnnnnnnnnnnnnnnnnnnnnnnnnnnnnnnnnnnnnnnnnnnnnnnnnnnnnnnnnnnnnnnnnnnnnnnnnnnnnnnnnnnnnnnnnnnnnnnnnnnnnnnnnnnnnnnnnnnnnnnnnnnnnnnnnnnnnnnnnnnnnnnnnnnnnnnnnnnnnnnnnnnnnnnnnnnnnnnnnnnnnnnnnnnnnnnnnnnnnnnnnnnnnnnnnnnnnnnnnnnnnnnnnnnnnnnnnnnnnnnnnnnnnnnnnnnnnnnnnnnnnnnnnnnnnnnnnnnnnnnnnnnnnnnnnnnnnnnnnnnnnnnnnnnnnnnnnnnnnnnnnnnnnnnnnnnnnnnnnnnnnnnnnnnnnnnnnnnnnnnnnnnnnnnnnnnnnnnnnnnnnnnnnnnnnnnnnnnnnnnnnnnnnnnnnnnnnnnnnnnnnnnnnnnnnnnnnnnnnnnnnnnnnnnnnnnnnnnnnnnnnnnnnnnnnnnnnnnnnnnnnnnnnnnnnnnnnnnnnnnnnnnnnnnnnnnnnnnnnnnnnnnnnnnnnnnnnnnnnnnnnnnnnnnnnnnnnnnnnnnnnnnnnnnnnnnnnnnnnnnnnnnnnnnnnnnnnnnnnnnnnnnnnnnnnnnnnnnnnnnnnnnnnnnnnnnnnnnnnnnnnnnnnnnnnnnnnnnnnnnnnnnnnnnnnnnnnnnnnnnnnnnnnnnnnnnnnnnnnnnnnnnnnnnnnnnnnnnnnnnnnnnnnnnnnnnnnnnnnnnnnnnnnnnnnnnnnnnnnnnnnnnnnnnnnnnnnnnnnnnnnnnnnnnnnnnnnnnnnnnnnnnnnnnnnnnnnnnnnnnnnnnnnnnnnnnnnnnnnnnnnnnnnnnnnnnnnnnnnnnnnnnnnnnnnnnnnnnnnnnnnnnnnnnnnnnnnnnnnnnnnnnnnnnnnnnnnnnnnnnnnnnnnnnnnnnnnnnnnnnnnnnnnnnnnnnnnnnnnnnnnnnnnnnnnnnnnnnnnnnnnnnnnnnnnnnnnnnnnnnnnnnnnnnnnnnnnnnnnnnnnnnnnnnnnnnnnnnnnnnnnnnnnnnnnnnnnnnnnnnnnnnnnnnnnnnnnnnnnnnnnnnnnnnnnnnnnnnnnnnnnnnnnnnnnnnnnnnnnnnnnnnnnnnnnnnnnnnnnnnnnnnnnnnnnnnnnnnnnnnnnnnnnnnnnnnnnnnnnnnnnnnnnnnnnnnnnnnnnnnnnnnnnnnnnnnnnnnnnnnnnnnnnnnnnnnnnnnnnnnnnnnnnnnnnnnnnnnnnnnnnnnnnnnnnnnnnnnnnnnnnnnnnnnnnnnnnnnnnnnnnnnnnnnnnnnnnnnnnnnnnnnnnnnnnnnnnnnnnnnnnnnnnnnnnnnnnnnnnnnnnnnnnnnnnnnnnnnnnnnnnnnnnnnnnnnnnnnnnnnnnnnnnnnnnnnnnnnnnnnnnnnnnnnnnnnnnnnnnnnnnnnnnnnnnnnnnnnnnnnnnnnnnnnnnnnnnnnnnnnnnnnnnnnnnnnnnnnnnnnnnnnnnnnnnnnnnnnnnnnnnnnnnnnnnnnnnnnnnnnnnnnnnnnnnnnnnnnnnnnnnnnnnnnnnnnnnnnnnnnnnnnnnnnnnnnnnnnnnnnnnnnnnnnnnnnnnnnnnnnnnnnnnnnnnnnnnnnnnnnnnnnnnnnnnnnnnnnnnnnnnnnnnnnnnnnnnnnnnnnnnnnnnnnnnnnnnnnnnnnnnnnnnnnnnnnnnnnnnnnnnnnnnnnnnnnnnnnnnnnnnnnnnnnnnnnnnnnnnnnnnnnnnnnnnnnnnnnnnnnnnnnnnnnnnnnnnnnnnnnnnnnnnnnnnnnnnnnnnnnnnnnnnnnnnnnnagttgggtagaataccttctacttctatcttgtgaaaaagtttgtgcagaactggagttagatcttctttgaaggtctgatagaactctgcactaaacccgtctggtcctgggctttttttggctgggagactattaataactgcttctatttctttaggggatatgggactgtttagaaggtcaacttgatcctgattcaactttggtacctggtatctgtccagaaatttgtccatttcgtccaggttttccagttttgttgagtatagccttttgtagaaggatctgatggtgttttggatttcttcaggatctgttgttatgtctcccttttcatttctgattttgttaattaggattttgtccctgtgccctttagtgagtctagctaagggtttatctatcttgttgattttctcaaagaaccaactcctcgtttggttaattctttgaatagttcttcttgtttccacttggttgatttcacccctgagtttgattatttcctgccgtctactcctcttgggtgaatttgcttcctttttttctagagcttttagatgtgttgtcaagctgctagtatgtgctctctcccgttttttcttgaaggcactcatagctatgagtttccctcttagaaatgctttcattgtgtcccaaaggtttgggtacgttgtggcttcattttcattaaactctaaaaagtctttaatttctttctttattccttccttgaccaaggtatcattgagaagagtgttgttcagtttccatgtgaatgttggctttctgttatttattttgttattgaagatcagccttagtgcatggtgatctgataggatacatgggacaatttcaatatttttgaatctgttgaggcctgatttgtgacctattatgtggtcaattttggagaaggtaccatgaggtgctgagaagaaggtatatccttttgttttaggataaaatgttctgtagatatctgtcagatccatttgtttcatcacttctattagtttcagtgtgtccctgtttagtttctgtttccatgatctgtccattggtgaaagtggtgtgttgaagtctcccactattattgtgtgaggcgcaatgtgtgctttgagctttactaaagtttctttagtgaatgtggctgctcttgtatttggagcatagatattcagaattgagagttcctcttggaggattttacctttgatgagaatgaagtgtccctccttgtcttttttgatgactttgggttggaagtcaatcttatcagatattaggatggctactcctgcttgtttcttcataccatttgcttggaaaattgttttccagcctttcattctgaggtagtgtctatctttttctctgagatgagtttcctgtaagcagcaaaatgttgggtcttgtttgtgtagccagtttgttagtctatgtctttttattggcgagttgagaccattgatgttaagagatattaaggaaaagtaattgttgcttcctgttattttagttgttaaaggtggcattctgttcttgtggctgtcttcttttaggtttgttgagggattaccttcttgttttttctagggcgttgttcccgttcttgtattggtttttttctgttattatcctttgaagggctggattcgtggagagataatgcgtgaatttggttttgtcgtggaataccttggtttctccctctatgataattgagagtttggctgggtatagtagcctgggctgcagtttgtgttctcttagtgtctgtataacatctgtccaggctcttctggctttcatagtctctggtgaaaaatctggtgtaattctgataggcttgcctttatatgttacttgacctttttcccttactgcttttagtattctatctttatttagtgcatttgatgttctgattattatgtgtcgggaggaatttcttttctggtccagtctattttcagcttttcaggaaaaaatgttacctctgtctccactacagacatccgctagagtgtcagagcagccacggagaatacatcagcaagcaggcataactgggctcctatgaaacttggtaaaaatcagaggatgggctagctttggctaaaggcttacccggtgctgggctcagccccctgtttaaccccttcatcgcccttatccctgtttgcaatgaccttcatttcccaactgtctctttcctttcctttgtccatctcgctccactctgaaactgatgtattttgaacaccactgcagcatcacctctctgactctccggctcatctagaacagaacctttgttgctttgtttagcgtatctgtgtccaagaaataaatcactgcttgccttccagatcagagaggtttagtagaaagtagatgctaaaaattaagtgttgagggactggggaggtactggagtctgtaacacactgatcatcaagcacagggacttgagtgtgcaacctgaacatccacatacaaagccaggtgtggacacgcacctgtgaccccagtgctgggcgctgagcgtgcagatccctggagctcaccaccaacagcctaactggacagatgagctgtgggttcagtaaaaggtctgtctcaatgataataataaggtataaggtattgagatgactcagtggctaaaggcatttgccctagcacctacatggcggacggagaccttcacacacatgcacatattcacaattgcacacacacaaacatacacacagagataaagaaaacacttaagaataatacatacatctttaaagaatgtcttgttgaatcaataaatgtctggaccactgaagatgatccataagtatgtgtcagtaagtaagtgtgccatgccttgcacacatgagaccgtcatgtgaattcagtgagctgatgcccagtgtgcaccgcggctctggttcacagtaagtagatgcctggttggcgactcttctaaacacatcggtgttccctttggctttcagaggaggctttgaagctgcacaatgggccacctcgcagtgcctacatggagcagagtttccagagcctgaacccagtcctcagcctgcacatcaatcctgcccaagtcgaacaggcccggaagaatgcagccttcaccgggacagcgctagaagcctggctggactcgctggtgggtgggacttggactgccatggacatctgcaccacaggccccaccgcctgcccagtcatgcagacctgcagccaaacagcctggagttccttcagccctgatcccaagtcagagctgggtgcagtcaaacctgacggacggctcaggtagcactggccacaggggaccgatgcagcctcaaccctggcccctgatcttatatgagggagggggaattccttttgtataaggacctcggccgactgtaggacagtggagagagagggtttggaggccagagagaagtcagcctgtatttgtgaagctggtctctgggctaggtgacccagtcccggagctacagtggtctccctctaccagttgtcgctcagtcctgcaggctcctgttctccccctccgatggcctgcacccctacaagtgagttttaaacttttattttgagcggcagaactttgttgactcggcacggtcggggtggaagtgcaagaccaagatgaagtccaggctgctctggttgaagctgaggttgtgtgaggttccttctcaaaactcagccctccaggtagtcctttgccaagggcatctctaaggtacctcttctgaacccaagggctctgtttaagccagtttgacaagcactgccctgacccagggtgggatcgccatcccagcccttccatttatctcttagtttctgtggctgggaaaccctgtgcccgtgctaaaagtatcgagctgctagaagccctgctcccggccttcccagggaggcggagacaggggaggcttccaaggttcctgttgccactctgtaagctgttttctctgaaaaccagaggttcaggatagcctttcgatgtgaagcagccaaggtccccagacatgtgactgccaacttgccatctgtcctgatcagcctcttccaaggctgtcacaaatggtaacaggaacagggtaaagcattacagagcctgagcttcaattctccttcgtgcccctgggctaggagacagctactgtggcctcttcggtacttgaaagtgggagcggtgccgaaccggggctctgaatctcaaaggggattatgtggacccaggcttctgacctggacagctgcacagtaacaccccttatattctgaggtcaggcgccccagacctttgtgaactgtgcccttggtgctgttggctgtgaccaaactgcatggatcagacttctcccacgcaggaacaaacatttcagattgggtccttaatttcatatccttcctcgccagggtgcccacaggctcagcctggccataccacaggagaataaagttaagtttcaacagtgggaaggtagttcagaaaatagtgttattcatattgcttgagttaccagaaacccaagggtcttcttgccatgtgtattcaaggggcactgaggaagagcaccccttcctcctggagtctcccaaatgagagttctctaggaaaagtttcatccattcttgtgtctctcccagcatggataaggtactgaagtccaccttgatgtgtcgactgcacagccctttccccatctaacatggcgggcatagagaagggacccttgatatttattatttatatgttttagtcaatgactaattagtaggtgctgtttttgcagcttgtcaattatgttatcttactaactgaaattgcctttattcacaaaaggctcccccacccctccctttccctggtctgcctgcctttctccctcatcctctctctatctgtctctcagtgtccaccctacatcctgcacagtttcaaccagtgctcccactctcaggaagtagacccatttggatggctggaacctcctctttgcttacccaggatgctggtctcacctgtccctctatattcaaaagtgttacaatgcctgagttctctctttaccctgaccgctgacctatggacgaggatgcgatgggctcatggcttggggtcggagaagtgtgccaagtctagaactatagatctacccagtttaaccatgagcacaagctatcactagcagaggaagacaggctccttccaagaatgattgatcttaggaggaggaatgggggtcagacccaaaggagagctcaggaggtagctactgtctgtgctggtgggggagccttcagtgtcttcctctaaaaacccacaggatttacattgcttttactaacccatgggaactgtgagcccagtgccccattctctcaataccccgagcctttgccttggtcaaagcttctctgggactatggaacctctttgagttcccccttgacctctcttgttttaaagatttgtgtattctgtcctggaaggtccctgggatccacagactctgagacagggtctgtctagacccagtgacactcaatgacatttttcatactggaatgcacttggaaatggcagagcctacttcctctgaagacactcctctccctctttattcaccacaagtaatttgaggatatttgtttcctctggtttttgacccagagaataatttttcttttagtaaaaacaaacaaacaaaaacaaaaaaatggagaatttaaaagaagttcagcataatttaagaaaatatgttttcctatggaaaatggcataactccttatttcttggtgttctcctgcctgaaaaccatgtatttgttggaggctattggtgaaacaacagccttgggaggtggctgcccaagagttttgaaaacacagaaccatcatctccgggaaccttaaagtctgcagcctgcagaagcaagaagcctgggtttaacgctgaccaggtcccttatgggaagaagtatttgagatggcacctctccatgccatttggtaactatggctcccaaagccaacttcccaggctgtgcaggctgtgtaagtctctgagagggaagggagcaactcccagtgccccttggctttaacaatgaagttctttttctgttccccaggtgactttctggtggagatcaggggcctcctggtttcatttctcattattggtttaactttttaaactgagattaagtttagagggtatgaacacagccacacaaacacacacacaggcactcatacacacacacgcacaagcacatgtgcaaacacccctaaggggtttgttgctactttggatgtagtctgggtatttacagagcataaccccttctggttgtctagttttccgatagataagaggatgttcattgaaactgtaacctctctcccaagacactccataacagagaagagcaatcaatggccacaaagtgtagagtatgaagaagaaaccatttaccaccgagttcatgagggttcggatcagcagttcctgagagcattgagaataggcttgaaaccagtgtcaaccttgtgagcttgagcatgcagagaaggcttgccagaccagagaaactctaccgcgggggccataaaagcataatgaggtccgggacacaagcatagatgggtaaaaccacaggtgaaagacaaaagggagtggtggggagtgtggtcttactggcacgcacatgaatcctctggtaataaaggcagctgtggctcagctcccagcttattacagcaagcaagaaagcaaaactcattgcagtggactctttaagctaataagggaagccaaatatatccagctcctgtttgtttttgtttgtttgtttattgtttttgtttgttttgtttaataggaaatctagttgttcaatattggctactattattttaattttatttatttatttttaaagatgcgggcagaaaagtagcttcatggttgtgcttaggcaaaatcctctttctggaaaggtgggttgaaatgagggaaagaatttaggggtaaggagtcatggaaagccagagttaagagtgcaaaaagaacagctcacattaaactataagactccaggtttctgcttagtagttccctcctgagaaaacctgtcttctgcaggagggctggctcattcacttccctggcctgtgctgacgaggaaagagtgtgacctggggtctgaggtttgaatctgctcaggcctccaccttcgggcattccatcaaaccaagccgagatggcaatggtgccatccttaagatgaggctggggagtactaggtcccactccagagtccgcatgctgccactgtgctggaaggttcttcagaaaccacaaggggctgtgctagcttaagtagtcttctttgcttctgcctcagttaccttactttgcccaagggtcaacccaggcactacctcaatgtctgctgagaagtttacctgggggtggggcggaatgaaggtgttacccatgctgaagctgaatgtacaatctatgcaaatccctctctctctctctctctctccctctctctttccccctccgtccctctccctcagtctgactccctctttttctttcccttttacttacaagcctgtgtgtgtgtgtgtgtgtgtgtgtgtgtgtgtgtgtgtgtgtgtgtgtgtgtgtgtgtgtgtgtgttatttttttaaccttatgaacaaggacctcttaagaccgaggagggttgtcacccaccacctgtgtatgtccctcctgttgtctttggttctgttcttgccaagcccccacactgggagaaagtggcctctctcctcccctcacttggctaggaatattctcacagcttcagcctgcagacatcaccaggaagcaggcaccccatctcacctcccccatcacagcaccgtcttctcctttctgcatttttctcctacctccccaccttcatccccacccctctaaaaagccttaggtttctccgttttgaaatgtggccttaaaattatttttggaaagctggcatcctccccctctaatttcccccaccatcacagaagagagaacatcttgaagcctgggtgtgtggcggcctcctgagcaaagggactgccaatctgtagtctgcagatgcactaggaatgacttaaatgtcatctttaagaaaaaatgttctcatattttttcctatgggcaaaatgaagtcttggctgctcgcgcagttctgagcactctccgtgttgccgtggcactggctggcaccaccagcagatgttcactacagcttcagtctccccttccctcgggacccagtgactttaggtacttcatttaaggatgaatcaggagtgtttctccgtgtatcgcttcatctttcttgcctggaaagtgacagcatggagtattcccagtggataggtcacgttcttgaaggggtggtccactctgtccttcagactccacctagaatccccttccatcactccagtgctgatggaagccaaagacaaccccagggttttcataggaagttcgctggtattgggcataattgtctttatccatcgatctttacttttaaaggaaaaaagagagaggctcctcatgtcatctgtagcatttgtcttgatgtttgtttttagaggcctggagataagtcattactgcctccttctttgttttcaaagatatgtggtgatatagtttttaaaaataactattttgttatagatcataatatgcataaaactgtacagaaatattttgtaatgtattgattttaaaaaagagagaatctgtaaataaaagtttaaaaaaataagagagagttcacatggcacacactgaaagatgtagatattttgctatttatttaaaggagtaagtattttaagagatattaaactatctgaaattgaccaataatgaaagttctaatcatctgaagacttgccatccagtcccgttctcgcagacaactgtgttaccgcccatatctgcctctttcctgtcttttgattttagcagaaaacaacaacaaaattgtgccttagctgtatttctgtctaggggaatttgtttctgtccaacaaagcaacttttttttttttttgcagaaaacagtggattattaaatactgtattataccaaaaacaccacaggtgtacatagacgctttctgccatactgtgttttcagatgcagaattttaaaataaaaaaaaaatgtctctatgaaatctcattttatggttactttttagcaatttcaacaccttcacatacccttcccttctcttccacaccctgtgccatctcagctggagtaatcttgaaagttgacactaactggaaggatcctgaggccatagacaggagttgggacatgagggcacacctcccttaagggctactgttatctccccagaagataattatagcaccctctggaagagtttcctctagctagagcaaaagaatataattttcaatataagtttaaacacctctttgcagagaaaaggggtgagaggctgtcctgtaaaatagaagtttttaatatctgcctagaatctaggtcctagatggacatggagcaagcctggcatcttgcccacttcagcacacaactggtctacattccctagatggcctttacacttccctgtgactacatggccaactgtcaatcaatgagatgctgacatcaatgaaatgggcttatgataggtctaaccctgtcccatctgacctcccaggagccccagtggctccaccattcactgttcagctcagatgctttgaactagtgtttttttaggagatatcacagcaatattaaagagggcagagccacaacacagaaggagcctagaccctggatggacatgaaatttcacttggcctaagtcacctctcttgacaatgacaggaaaagaaacctgtgggggtagggtagggggtatatgtacgtgttcatgtgggtatacatggaggaaagcatagatcagaaattgacattagatgtcttcatcgattgctttccacagtttttgaggcaggatctctcatggaacctagagttcagtgattcagctcagatggttgatcaacaagattcacagatagatccatctagacttccatcagcccctgaaacattttaatgcaatttgcttgtagcagctaatagtatctcaaatccatcaagcactagaaaaccaagtcatagcttcttcattctataggcaaagctatagagagatacatggctgaagccattcataatcatgtccagaaacatgagcaagtcccagagaccagaccatccacttttatgatgctcatatgaagtttctgaaagccatggccaaaggctgggaatgcctatctggatgtgttgtggcgatccctccgactcagcctttggagtctttacaggcaaagaatagcatgagattcaaatgttagcagcaagaacaaaacctgctggcagttttctcattaaacaggcactgggtaaacccagagagagctgcaccagcatcagcctccctgacctggacttgggaaagagggtgggcaactgcacactgctgaagacgaatggacacagcatgatgcatttgccaagcgttttccactttttcttgatgccaacttcatccaggggtaacttctcaaaaataggcctagtagcaaagaaagagcaaagttccaacatctctgtaagagcaagggtcatgggcgccttggttgtttagtcggctgtttctggtatttaagcacagggggtccataaaatagacactttgtgacaatttcatgaatgaacaagcaagtgagcccatttttcttaattaatactacagacatgaggtcatttgtccaaaatactatgttgacattcatcatttgattgatgatacttgtcaaaacatgggttaatagaaagtaaaccttcattttcacctctaataatgaggtttcttagaacatggcattgaaggctgcttggaatttctttcatacctcatttatttgagcagaggttccttcaaattcaggaatgtggtaaataccccatccctcctgggacatagagaatagcaggactttatttaaatctatctcactaatagttgaaaaggcctttctctctctctctctctctctctctctctctctctcccttccttccttccttcctttctttgtttccctttctgttctttgacagtgttgtttgttcacatatggacgtaatcagtttggttcgggtcctttccaccactcccatcgccctctatagtcctctttcctctcccaacttgttttctcacactgatgtctcttgttagtggcctgctgagttcatttctggttgtttgcatgagcataagtggagttttatttactggaaccatttcttaaataaaagtgaatgtctattaaagccccaacatataggagagacttaaatatcagacttggaagaatgccccaattggaactggagcataaagttctgccttagcagccaaccctttggtattcccaggtgttaacaggtaaaaatcctggtgaactcagtgctttaccacacccatacttccagtgggaggagccatggctcctgtagagctctgtgacctttttctgagggctctatatatctgttgtgtctgtgtgtctatgtctgtatctaagtgtgtctgtatgtttctgtgtgtctatgtctgtatctaactgtgtctgtatgtgtctgtgtgtctgtgtatggtctgtgtttgtatgtctgtgtgtgtctatgtctctctctgatgtgtgtgtctgtgtttctgtgtgcctgtttgtctgtgtctatatttctgtgtctctgtgtgtctgtgtttctttgtgtgtctgtgtctgtacatgtctgggtttctgaatctatgtgtctgtgtctatatgtctgtatatgtgtgtctgtgtcatctcagagagagaaggtgatgacaaaccaatggaatgattctatccaattcagtttggtaaagcaatgagttaactagggatggctccaggatcaggagtgagcatctacgtatagaatcgtggatgaggatgagtccctcagagtatggatgaggggttactcatgggaatgggaatgcatctggcctttttacattggttggaggaacagactcagtagtcaggcattcatagtatcattggtaaatttgctcctcaactagacacacctgagaagagtgaatctcaattgaggtattgcctccaccaaattggcatgtggacatatgggcatgtggtgacagcattttcttgattttgttaattggtataggagggcccagaccactgtgggcaggaccatctctagacatatgggcctaagttgtataagagagctagctatgaaagtcagaaggactgccgggcgtggtggtgcacgcctttattcccagcactttggaagcagaggcaggtgggtctctgatttcgaggccagcctggtctacaaagtgagttccaggacagccaaggctacacagagaaaccctggctcagaaagaaagaaagaaagaaagaaagaaagaaagaaagaaagaaagaaagaaagaaaggaaggaaggaaggaaggaaggaaggaaggaaggaaggaaggaaggaaggaaggaagaaagaaagaaagaaagaaagaaagaaagaaagaaagaaagaaagaaagaaagaaagtcagaaggaacaaatgagtaagcaaaattcctccatggtctctgctccatctcctgctctgacttcattccatgatgggctatggcctactagccaaagcaaacctattccttcccaagttgcttttggtcatagtactcatcacaggaacagaagacaaactaggacacacaacagtgcttttacctgctgagccgtcactggacctgcacagaagtttaatcagtaaataatttattgaagcttgagcctgtgggaaatagcagcattaagctctggggttcaaggccaaggcatccacaggaagcctggagaagagtgactgggcttcagccctcccaggcctctttctccatgatcgctgactccagctcctatgccctttcagacagactgctgactctacaaggtatataaaggagatcccagaggttgctgcttcctgccaatcaaactccctcaaaaaagatattaacaccccttcttcttgttgggaaaaaaaaaaaagatgagtttgactc

SEQ ID NO: 1038 - DNA, 2477 bp, Mus musculus
gatggctacttctctcaccgtcccaaagagaaagttcggaccgacagcaacaatgagaactcagtccccaaggactttgagaatgtggataacagcaacttcgcccccaggacccagaagcagaaacaccagccagagctggcaaagaagccccccagcaggcagaaagagcatttgcagagaaagctggatgcccaggacaaacgacagggccagtcagtcctggggaaaggccccaaggaggtgctgcctcctcgggagaaagccacaggcaacagtagccaagggaaggatctctcaagacacagccatgccaggaagagtggtggtggtgggtcccccgaaaccaagtctgaccaggcccccaagtgtgatatctctggcaaggaggccatctcagcactgacccgcgctaagtccaagcattgtcgccaggagattgcagaaacctactgtcgccacaagctggggctgctgatgccagagaaggtggctcgattctgtcccctagaaggcaaagccaacaagaatgtccagtgggatgaggatgctgtggagtacatgcctgccaacccagtcagaatcgcctttgtcctggtggtccatggccgtgcctctcgacagctacagcgcatgttcaaggccatctaccacaaagaccatttctactatatccatgtggataagcgttccaattacctgcatcggcaagtgctccagttctccaggcagtacgacaatgtccgagtcacctcctggaggatggccaccatttggggtggagccagcctcctgtccacctacctgcagagcatgcgggatctactagagatgactgactggccctgggacttcttcatcaacctcagtgctgctgactaccccatcaggacaaatgaccagctggtagcatttctttccagatatcgagatatgaacttcctgaagtcacatggccgggacaatgcaaggttcatccggaagcagggcctggaccgcctcttcctggagtgtgatacacacatgtggcgcctgggggaccggcggatcccagagggcattgctgtggatggtggttctgattggttcctgctaaacaggaagtttgtagagtatgtggcattctccacagatgacctggtgaccaagatgaagcagttctactcttacacccttctccctgctgagtcctttttccacacggttctagagaacagcccccactgtgacaccatggtggataacaacctgcgcatcaccaactggaaccgcaagctgggctgcaagtgccagtacaagcatatcgtggactggtgcggctgctctcccaatgacttcaagcctcaggacttccatcgcttccagcagacagcccggcccaccttctttgcccgaaagttcgaagccatagtgaaccaggagatcattgggcagctggactcttacctgtacgggaactatcctgcgggcaccccgggcctccgctcctactgggagaatgtctacgatgaaccagatggcatccacaccctcagcgatgtagccctcaccctgtaccattccttcatccgtctgggtcttcgaagagctgagtcatccctacacacggatggggagaacagctgcaggtactacccaatgggccacccagcttctgtccatctctacttccttgctgaccgattccagggctttctgatcaagcatcacgtgaccaaccttgctgtgagcaaactggagacactggagacatggatgatgccaaagaaagtcttcaaggtcgcaagtccccccagtgactttggaaggcttcagttttctgaggttggcactgactgggatgccaaggagaggctgttccggaactttggtggtcttttggggcccatggatgagccggtggggatgcagaaatggggaaaggggcccaatgtgaccgtgactgttatttgggtggatcctgtcaacgtcattgcagccacctatgatatcctgattgagtccactgcggaattcacacactacaagccccctttgaatctgcctctgaggcctggggtctggacagtgaagattctccatcactgggtgccagtggcagagaccaaattccttgtggcacctttgaccttttccaacaagcagcccatcaaaccagaggaggctttgaagctgcacaatgggccacctcgcagtgcctacatggagcagagtttccagagcctgaacccagtcctcagcctgcacatcaatcctgcccaagtcgaacaggcccggaagaatgcagccttcaccgggacagcgctagaagcctggctggactcgctggtgggtgggacttggactgccatggacatctgcaccacaggccccaccgcctgcccagtcatgcagacctgcagccaaacagcctggagttccttcagccctgatcccaagtcagagctgggtgcagtcaaacctgacggacggctcag

SEQ ID NO: 1039 - protein, 822 aa, Mus musculus
  VARIANT (1)...(822): Xaa = Any Amino Acid
DGYFSHRPKEKVRTDSNNENSVPKDFENVDNSNFAPRTQKQKHQPELAKKPPSRQKEHLQRKLDAQDKRQGQSVLGKGPKEVLPPREKATGNSSQGKDLSRHSHARKSGGGGSPETKSDQAPKCDISGKEAISALTRAKSKHCRQEIAETYCRHKLGLLMPEKVARFCPLEGKANKNVQWDEDAVEYMPANPVRIAFVLVVHGRASRQLQRMFKAIYHKDHFYYIHVDKRSNYLHRQVLQFSRQYDNVRVTSWRMATIWGGASLLSTYLQSMRDLLEMTDWPWDFFINLSAADYPIRTNDQLVAFLSRYRDMNFLKSHGRDNARFIRKQGLDRLFLECDTHMWRLGDRRIPEGIAVDGGSDWFLLNRKFVEYVAFSTDDLVTKMKQFYSYTLLPAESFFHTVLENSPHCDTMVDNNLRITNWNRKLGCKCQYKHIVDWCGCSPNDFKPQDFHRFQQTARPTFFARKFEAIVNQEIIGQLDSYLYGNYPAGTPGLRSYWENVYDEPDGIHTLSDVTLYHSFIRLGLRRAESSLHTDGENSCRYYPMGHPASVHLYFLADRFQGFLIKHHVTNLAVSKLETLETWMMPKKVFKVDPSDFGRLQFSEVGTDWDAKERLFRNFGGLLGPMDEPVGMQKWGKGPNVTVTVIWVDPVNVIAATYDILIESTAEFTHYKPPLNLPLRPGVWTVKILHHWVPVAETKFLVAPLTFSNKQPIKPEEALKLHNGPPRSAYMEQSFQSLNPVLSLHINPAQVEQARKNAAFTGTALEAWLDSLVGGTWTAMDICTTGPTACPVMQTCSQTAWSSFSPDPKSELGAVKPDGRLX

SEQ ID NO: 1040 - DNA, 170506 bp, Homo sapiens
  misc_feature (1)...(170506): n = A,T,C or G
ctgtgagaaactatgttagtgtttcaggccaggcgtggtagctcacgcttgtaatctcagcactttaggaagccaaggattgcctgagcctaggagtttgagaccagcctaggcaacatagcaaggtcctgtctctacaaaaaatttaaaaagctgggtatagtggtgaaagcctgtgtagtcccagctactcaggaggctgaggcaggaggatcgcttgaggtcaggaggttgaggctgcagtgagtcgtgatcataccactgtactccagcctggggaacaaaatgagaccctgtctcaaaaaataaataaataaaaaagaaagaaagaaagaaaaagaaaaacaacgttagcatttcattcaagtctttataggtaaagctgagaggcccagtagaaaaagggggcagaggaggctgactagagtttgatcaaggactaactcttgacagcaggtcattcttcctccctgaggatgattcaggacttgaggggcctgggttcctctctctataggaaagtatttatcggctgggcgcagtggctcacgcctgtaattccagcactttgggaggccaaggcaggcagatcacctgaagtcaggagtttgagaccagcctggccaacatggtgaaaccctgtctatactaaaaatacaaaaattagtcgggcatggtggcgggcacctgtaatccgtgctacttgggaagctgagacaagagaatcgcttgaacccgggaagcggaggttgcggtgagccgagattgcaccactgtactccagcctgggcaacaaagagcgaaactccgtctcagaaaaaaaaaaaaaaaaaaagtatttatcactcaacttcgatttctatctgttctgtgtgtgtgtattgtgtatggaagtaaaatacaaatcaaaaggcttggcatgtagcaaaacagcctacataaaagaatcctaaacttttaattttaataatcagtaaatatttctgattgtacttatgtattatgtcagtagttctcaaacttggtctcaggattgctgtatagtctcaaacattattgaggaacaccaaagagctttggcttaggtaggtgctatcaattacttcctatatagtaatatttaaactaaggcattcttaaaatgtttattaattcacttaaaaacagtcataataacctattacttgtgtatataaaatatatttatgaaaagtatgcatatttttccccaacgaaaacaaatttaggaagaagggaggcactgttttacattttttgcaaatctctgtaacacctggcttaatagaaggtagctagattctcacatttgcttctgatttctgatgcagtatgacgtgcagtggagtttctggaaaactccactgtacactcatgagagagtaagcgagaaaggaaaataatgtctttatattatcgtgaaaatagtttgtcattaaagatcccctgagaaggcctcagggacccccaacagttcccagaccacactttaagaaccactttaagtcaccattgcaatcattaattctattttaataaattatacctaatatttattaagttctaggtattaagtgttttaaattcattgactcttaattctcataacagcctcattagattgggtactcattattgtccccattttacagagaaggaaactgaggcagacaaagttaggcactgtgccctgggccacacagtgagcaaaggccagggtccagatttcaacccactgtgcctcaacactctgcctttccaaaaagtctcagtcttggccgggcgtggtggctcacgcctgtaatcccagcactttgggaggctgaggcgggcggatcatgaggtcaggagattgagaccatcctggctaacatggtgaaaccccgtctctactaaaaaatacaaaaaatattagccgggcttggtggcgggcgcctgtagtcccagctactcgggaggctgaggcaggagaatggcgtgaacccgggaggcggagcttgcgatgagcgtgatcgcaccactgcactccagcctgggcgacagagcgagactccgtctcaaacaaacaaacaaaagactcagacttgctcatcaagtgacaaggcgctagcttaaaatatcatcctgctgccacttgagtgcttaacatgtatcaagcctctcacccaatgttgttttgttaaatagaattatatgtgcatgacatattagttaatccccaccttacatttgcaaagtaggtcttcttacccccttcttttgtagatgagaaaaatgaggctctgagaggttaaacctcttgccctccgtctcagagttaaggagcagagactggattccaacccagccctatcagtctcactccttcctgcctcaccctgtgctgttttgcatcccattaacatgatgctacattgcaaagggctttttacttagggttctgttaaagcagggcctgcctgcgtccagcgtggtccacgggtttctaagtgctggccagccaccttttgtgcatgcagatgagctggacgaggggcctctgttaggtctatttgcattggcagcctgggtaattgcatgttctaattggtacagccacacacactgtgcttccaccgttcgcctaccctggcacggaggtccttttggaagcaggtgcaggcctctccctgtttgtccctcccagtggccttggtagccttggtgattggaacgaagcctcggacactgagttcaacaccaaataactacccagccggctgtgcgtgcacatggcacaaaaggaagccgtaaactgatcacgatgagcgggtgggccgggcgccctcatgtgtgagcagtgcacctggctggggtttccctttggccctgtccctattcctaatagctgcggagaggcagtggggtattgaaaggcatgacctccagacctagacagcctgggttcaaatcctggctcctctgtttcctaggtgtgtggacttagtcatttaacctccctgaaccttaatgttccaatctgaaaaatgggtagaaaatatagcgtcttctttatcagctcatcatggagattaaatgagttagtacatgcaacaggcttggaacggaacctaagacatacgtgtttcttaagcactttggacgtgtcaggcactatcttctatgcttgatcgattcagtccctgggaagtaggtgccatcttcggctctctgggatggatgaggaaactgaggcaaagagaggcgaaatgttctgtcccagcttgaagaaccccagcaaatggagaagggaggaatcaaactcacttcttcctgagtccagacctctgaatctcagtgtgctgctatagacgataatagagggatagggctgcagacgggatgcgctttgaagcttccattttgtcctcagttcctggtctcttaaggtccatcgaattgttttaatgagctgaagtggcagaattttgttcattgaatatattgattaataactaactcagaatggttagtaacacacattcgggacacatcattttacagataagaaaattggacatcagctaatgcaatactagtacccaggtcttctcctacataaacaataagagcaaaggtggatagtttaaaaatcacggcaacccacccccacccctcagaaatgggagcaaggggccaggattcagtagactaagtattgattcatcctgaaccaagagaacctgggaaaaatggaaacagacccacgtgtctttgcagcagcagcgtgggtcaggtaacctgcttctcggagccatattatgtttagcatatttctacctgattgaaattgactctaaacatgcccaaggttgaatgggaatggaggacattattgcatttaattatttctccagaataaaaatggattctagcagcagcttagaggtaaggcaacagcagagcaattagagttttggagcttgcacacaaacatttgaatgtgcaatcattgtaataagtacattaaaataaagtaagtcaaagggttgcattagcataaataactcaaggtgagagagttggattgatgaagagtagagaagatgatgccagttgatcacaattgcgaaataataacccatctgtcctctaggcagagactgtcaggggagagagagtgttaattggtagagttccccagtctggtttactgctcattcttcttccagctttgtgtggtgggcatattctagtagttttacatacactcttcctcactgaattacccaagaggtgaggtgttgtttgtttgttttgagacagagtctcactctgtcacccaggctgcagtgcagggcacgatcttggctcactgcaacctccatctcctgggttcaagcgattctcctgcctcagcctcctgagtagctgggactacaggtgcgtgccaccacgcccagctaattttttgtatttttagtagagacggggtttcacagtgttagccaggatggtctcgatctccggacttcatgatccgaccgcctcagcctcccaaagtgctgggattacaggtgtgagccactgtgcccggcctgagatggatattattatcatccccatggataccaaggtgttatcatcccaatgttttaaatgaggaaactgagacacagagagtttgaatcacttcattactagcagtgtagcctcggtcaagttatttaacctctctctatgttagtttcctcctcttaaggagtactaatactgtctgttttggtgagttttcaagaagattcaaaggacacagagcatgggccacttgggtgctgggcatatgatggttattttttatgggtctgcctggagacctcccaagattggttttgtgaagggaagggatcctgggtttggctttctggatcttgagtctccacagaaaggacagaaaagccaaaatctgtttgccccttggcagtcagatgaagagttagggggaacatgaagtgatatgtcatgtccatccttggatggctggataaagaaaatgtggcatatacacacaatggatgttagcttcaaaaagaagaaaatcctgcaacatacagcaacatggatgaactctgaggacattatgctaactgaaagaaaccagtcacagaaggacagatagtacacgtgtttattctgcttctatcagctatcgaaaatagtccgaatcctagaaccagagagtgaagtagtagttgccaggagttgggggattggggaggagcatggggagttgctgatggacaggcataacatctcaatcatgcatgcacaatgaagaagccatagagacctgctgtgcagtactatagccaacaatatagtagtacatgcaacaatatacaacaatttgctgtatgttgcatatagtactatagtgttgactatagctgcatagtcaacaataatacacacttaaaaattggttcagagggtagatctcatgttaagtgttattatcatagtagtcccagcacttttggaggttgatgtgggtggatcacctgaggtcaggagttcgagaccagcctggccaacatggtgaaaacccgtctctactaaaaatacaaaaattagccgggcgtggtagcacacacctgtaatcccagctactcaggaggctgaggcaggagaatcacttgaacctgggaggcggaggttacagtgagccaagatggcgccgttgcactccagcctaggtgacaagagtgaaactccatctcaaaaaagaaaagaaaagaaaaaaatgaattgaaggggggaagccagagagaacgccgcagtcactatagaaaatgacagtgactctgagggacagaaattctcaggcctccaattctcgctgactgcgcctctctctgacttttctggaagcgatctagtatctgtgagcccttttgttccagaagacaaaatattttccttccctcttatactcaaatcttttgggttcccatggcagctgagtagcatctggggccaggcagaagttcacagggccaccacaagctaatcatcgccattgtggtggcctgtcttgagtagagagcgggtattaatcatgagtcccatcagaatcaatggtggtgcctcttcctgatattacacattagccagaggaattggccattctctgattgtcagattagcttcattggccgtggggggtggagggagatgatcgcagtgttttctgtctggttttgcttggcaaagttcagccagaaagtgatggagaacaggagcttttgaaatgggggtttgtggaggttttctgttgtgtggcggggaaacttgctgataacaaggaaagagaagggccccagaatgacacttaggatatgtctgaagagagaaaacgaagatgtccatcagggcagtagctcttctggcttactccctgccctttagacatttctagaaacttctagaaaatgggcttagggacagaatttaaatttatgttcttggagcatgggagtcgtcaatagatgtttctgtctgttggagggagaaaaaaattggctcctgtacctgactcagctcaaaggaagaaaggagatcaggttagctcctggattaatcgggatgagttagaccatgctacagtaacacagatcccccaaatctcagtgactcaaagcagcaggggtcaatttctgcacactgagggttggtagagtctctactccacatgggcctcactcagggatgcatgacctccaccagcaggagtgtggctggatattgtggtatccagggaatgacaccttatgggttccagtcactgctcttggccatagcatgtttcctgtctgtgcctaatatacaagggatagggacatacaatcctaacacatccctagaaggaatggaacagaaatgatttttcatagctttattgaatgccacccctgccccatcagctccatcccgacagacgctaatatgagcaaagatggtgatacccattattccactgcaggggaactgaatgcttcttgatttacttctcagcaaaacacaagaggcgtgatacaatagcagattttagaatcaggcagatgcaagttcgctgcctccccaacatgaatttgtgcaaattactcgacatccccaaccttattttccacccttttctgtaaggtgggcgaacagtagtgcctacgttggaaattatttccaggagttaagtgaggtactgcatccaagggcttagcatggcacctagcacgtgatccatagtgaagaatgtatcacaacaagcgttggctcctcgttctataaaatggcaagataaatacatccaattgtcagtaccctataagtaatacctgtgaataacttactgtggtgcctggctcatggtaagagctcagaaaatgcgcctgagaggctgcttgggactcttcaagggcctctggatagaaaaaaagggaaaagaggaacatcagcaggttttgtttaggttacaagaataaagatgtactctaggtaccaactgaaggggattttttttgtaggtatctgtggagaataagaaagaccagaagcagaaggccctcatttataggtcaggatataaaagcagttcctgtgtacaaccagtagccgccctgtgacccaatatggactggtcagctgtttttttcttggttctttttccttcttcctaccttgttacctcccagctcctgcagcctcaaactccacgtgcttcgtggctgctgcttactgtctctatatgacttcctgcaacacaataggccactagccagcctgaagattgcaatttggaggtcacacacctctagcagattcatttagctgggtgggaggggccagatcttgtggttcagtgtcagcttgcagtacttaagggttttgggtgatgggtgtaataaggatcatacaatttcttggaagtggatcatgtccctggtagcccagagtgtggggtctgtgatctgcctggtttgaattccagcttcaccgccaactagctgggtgaccctgggcaagtcacttgttcatgggtgcttagtttcccatctgcaaaatgaaagtcatagcagtactcagcttacagaatggccacaaggtgtcttagtgtcagagcctccaacaaataggagaaattcgtgcttactgctaggagcaatggagcagaggctagaggagcatctttttttttttttttttttttgagagccagtttcactctccccccaggctggaatacattggtgcaatctcagctcactgcaacctccgcctcccaggttcaagcaattctcctgcctcagatttctgagttagctgagactacaggtgtgcaccaccacccctagctattttttgtgtgtgtgtgttattggtagagatggggttttgccatgttgaccaggctggtctcaaactcctcacctcaagtgattcacctgcctcggcctcccaaagtactgggattacaggtgtgagccaccacgcccagtcctaggggcaccttcttctccaggccatcactaagtcgtatatggatggtgaggacagaagcaactaacccagtcccagaggaggaggccttttaactcacactccagcagagcaggggtctgcatacattttcttaaagggctggatagaaatattttaagcttttcagaccagaaagtttctattgcaactattcactctgctattgtatcaggaaagcagccatggacaatacacaaatggacaggtatggctgtgtttcaataaaactttatttataaaaaacacaggcagttgtttgctgacctgctggggtgggagccttgctgagggtcagctgctcttgggtacccctgcagatccgctgttcaggccccgacacctttttccttgggaactggtaagaggcatatttcagccctccttaaaaggaggactagcagggatgccgcccattgcccctgtgtttccgtagcaacaagggcagctatatggagccattactcttctctgtggcttcagaggtcaggggccgtgttgtaggacactggatatgctttcagattaaggccttgggaatgagctttaagcagaagcaacatgttgcagaaacaatttggggcattggttgaatgatgcatttgatcattcgactgatcaaagtaaccaggacccatttacccatggaggagctgagtttggggtccagcccttctggaaacatccatgccatgcgtggtctccagaatgactcctgatctttgtcttgaccccaaatgacttcatcacttctgttccatgtacacacatgaagagccaaactcaagcacaagagtgtcgcaagtttgctttgctccaggacttagtgtaaagtttattctacaagggctgcattcctcttaaaaaaaaaaaaaaaaaattgcggctggtttctttcccacagaatttacaacggctcagtctgatttctcttatgggcatagatatatgagcatgtcctaaaggcaatggaatgtatgtaatatcctaccaatatttttccctttataactttattatatcatttccagcccttaagtaaaccatcacagcactttcagctggaatttaaacgggacgctggaacaaaatgtttgttacccagtggcaaagacagtcaaggaaagaaactgacttgaaaaggtgtggttaataagaagcattgagaatcgtagtcatggcactttagagcttgaaaaagccttggtttctggttggaacatctcctatttccagatggggaaactgaggtccagagagagccatcttaccagaggttaaaccagtagcaaaagtaggatgtgaaactatggccccggcttccaagtccgtatgactcactcttcaaaggccagtctgcttagcatgatctctcagtcaagtttctcttctgtttctctcccctcttctccaggatggctacttttctcatcggccgaaagagaaagtgcgaacagacagcaacaacgagaactctgtccccaaagactttgagaatgtcgacaacagcaacttcgcacccaggactcaaaagcagaagcaccagcctgagttggcgaagaagccaccgagtagacagaaggagcttttgaaaaggaagctggaacagcaggagaaaggaaaaggacatacattccctgggaaaggccccggtgaggtgctgcctcccggggacagagccgcagccaacagcagccacgggaaggatgtgtccagaccgcctcatgccaggaaaactgggggcagctcccccgagaccaagtatgaccagccccctaagtgtgacatctcaggcaaggaggccatctctgccctgtcccgtgctaagtccaagcactgccgccaggagattggggagacttactgccgccacaagttagggctgctgatgcctgagaaggtgactcggttctgccccctcgagggtaagttccaaccccgctggctcagagagggatctcctggccacttcctcctcctgcccagccccattctgctcaccttctcagaccttctgagaaaggccaccctgttttccaaaccccagatgagcacacgagatctgatgtgttctagtactccctgagtgttgaagtcttgtatcagaaaaattttgcaaaatcagattaccttttgtaggtgctttaacccattgcctttatggcaaaggatgaaattatagtgaaatcgggagctgatgtgatgctggcaggagccaagggagctgtattgatatggtttcgtttctctttcagtagaatattgggattagaattgatatgaatattattgtaattgattatgatttgagaggtttctaattggttgcattaacttcagaggctctgtaactttccgttttccttcatcaaaagtttctttccctcttctcttctctttcttcctcatatgtttcctgtttccctccttctttccttctcattcctttattttctttctccctttttcctccctttcttcctcattttcttcctggtttgtttctccctttccttttcttccctcttctcattcccttccttattttcctctcttcccccttccttctttcctatttcctttcttccttattttaattttctttctctctcctttcctcttttcttcctattttctttcttcccttctacattccttcctgctttctgtcctcttctttcctaatttttctctcctccctccctcctttcttcttttccttccttcattctttacttccttccttccttccttctttccacctttccttgctctttgcttttcccctccctctttcccttcactggcactcttttatgtgcggatgacctgatgataaaccagctctcttgctgagacacggagggatccaagctctgatccagaaattcacaggcagagtggaggggccatctgaagatggggagtccagtttcactagcgcatgtgcaatcgtgccattgatgtgtatttcttggtagtgattttcaccttctctagtgcccttggaaggggaatgacagcagccacagggggctgctgaggcttcgctgtgtgctagacaccgcaccaggctctgtgcagtcaatttgtttatcacatccaacactctctgaggctgatgctgatgtcatgagcccaatttttttcagatgagagatgtaaaatccctctcccaaggtcacatggcctttaagtgatcttacaagcttactgttatggcaggaaatttcggacccactcagagtagagagaaccccaatgtaccatcacccagccacgtggtcgctggttattgactcgtggtcactgttgtttagggcacgcccccttccctcccgctagcccctgccaccatagcttacgataatccagcctctgggagcactcttaaattttacttttttccttggagaagatattctcaaaatgtttgtgaattcgtttgctcagtggttttctctgtggagagggcggatagcatccaaaaggcaccttcccacgaagagttggtgccactagcaacaaacagagaggaatgcatttgaaataaacgggtgtggatttcattcaagctcagctaccagctaacagggagagtcctttctgctctcagggcctagatttcttatctgtccagggagcagcttgcattctaggggtctttttgctccaccttccctgggagcctacttcactctttactcctggccatccctccttctcattgggccacactgcaaggccagcccagctgtccctcacaaagtggccaaaggttcacagtacccccttgtcgcttctaaatccaaataccaacccctgcttttgttatctccgaagggaaaagacccttaaatgagcacggaggccagcaaggaggcaacagagagctctgggggctccgatggggttgggggcatgtcagagtcgagctagatggagattggggaggtgtcagggtcaacagatgcagctggaagggatccactgaggtgctgctcaatgtcaaggcataaagtcagagaatcaagccagctgcagaattggggaggaagggctttccgttccaccggcatcggtgcatccgggagccatgcaaggctttgcctggtgtcctcctgagaaggcaaatggtcaattcacccaactctcttgatgaagaaaggaagtgcagcaagagaatggctccccagaaaagtagactaaaaagacctcttaagagaactcttcattcgctactctttttttttttttttttttcgagacggagtctcactctgtcatcatgctggagtgcagtggcatgatctcggctcactgcaacctccacctcccaggttcaagcagttccctgcctcagcctcccgagtaactgggattacaggcgcccgccatcacacccagctaatttttgtatttttagtagagacagggtttcaccatcttggccaggctggtcttgaactcctgacctagtgatccacccgcctcggccccccaaagtgctgggattacaggggtgagccaccgcgcctggtgagaactcttcattcgattccctggacagataagaacatgaggctcatagaggggaggagacttatgccaggtcccccagttaattagaggtgtttttcattttaaatatgtgcctctgtgtttaccactggtcacagaatagaggatttagatcaaataggaggtggccacctacactcattgcacagaaagagggctggatggatagacagcaaaccttccttatggcccccccatctgcagggacagggtggcagcagggacaactttaacaagtgcatctatattattttagtttctagtagcaagcatgtgtctgtgcaatacttttgttttctatctgttttgttttgttttgtttttttgagacagtctcgctctgtcgcccaggctggagtgcagtggtgccatcttagatcactgcaaccttcaactcttaggttcaagtgattctcctgccttagcctcccgagtagctgagattacaggtgcctgccacctctcctggataatttttgtatttttagtagaggtggggtttcaccatgttggccccgttggtctcaaactcctgacctcaaatgatccacacacctcggcctcccaaagtgctgggattacaggcatgagccacagtgcctggcctacacgatacttttaaatagaaagatttagaaagaaaagcttcctttctgccttgctgtttcacccttgtctaagtggtcgaggtggttcctgtctatattcttgattagatttggcacacagagtgtagcaataattaagtggagtgcaacgtttccagcatcttttgttaacctgtgcctggtggagaagttttggaggcctgagttgaatgccattccatgaacgaaatattgagctccttctgtatatcagagacagcacatttgttctgtgaagggccagatcttaggcatttgaggatttgggggccagtctttgtcacagctattcaagtctgccatccgtcatagggcagaagcagccagagaccacacatacacaaatgcgctatgttcccattaaacctaacttataaaaataggctggctgggtgtggtggttcatgcctgtaatcccagcactttgggagactgaggtaggcagatcatttgagatcaggagttcgagaccagcctggccaacatggcgaaacctcatctctactaaaaatacaaaaaaattagctgggcatggtggtgtgcacctgtaatcccagctactctagaggctgaggcaggagaattgcttgaacccaaggggcagaggttgcagtgagctgagatcatgccactgccctccagcctgggcaacagagcaagactccatctcaaaaaaaaaaaaaaaaaagaaaaagaaaaaaaggaaaaagaaagaataggccatgggccggatttggcccttgggcttttagttttcttaaccctgcaaaatgctatcactgtctatagttgacccttgaagaattctggggttaggggtgccaacctccttgcagtcaaaaaatagagcacaacttttgactccctgaaaaccttaactgataatagcctgtgttgactgaaagcttactggtaacataaacagttgataaacacatattttatatgttacttccattatttactgtattcttataataaagtaagctaggccaggcacggtggctcatgcctgtaatcccagcactttgggaggccgaggcaggtggatcacccgaggtcatcagttcaagaccagcctgggccacatggtaaaaccctgtctctactgaaaatacaaaacttagctgggtgtggtggcgcatgcctgtaatcccagctactcgggaggctgaggcaggagaatcgcttaagcttgggaggtggaggctgcagtgagctgagattgtgccattgcactccagcctaggcaacagggcgggactctgtcaaaaaaaaattgtaaataaataaataaatgtaagtaagctagagaaaagaagttaagaaaatcataaggaggagaaagtatatttactgttcattaagtggaagtggatcatcataaaggccttcatccttgtctttatgttgagttgaggaaaaggaggagaagaaggaggagaggttggtattactgctgtctcagggatggcaggagggaagaaaatctgtttataaatggacccgtgtggttcaaacctgtgctgttcaagggtcacctgtgctaatatgtgcaacactgccttgtcacactgtgtccccacaccagccctacaggctgagtctattgtgaaccctttttgtcagtgaggaaatcgaggctcaaggaaggggagtccttggccagaaacacatggccagcagatgacagagctggtactggaactcatgttacagagcctgtatccctttccataagcctgtccctcttggggaggcagaagggtcactttatctcacattgtcaagccccagaggtgttcttccacctgcaggctcgctctctctctctctctctctctctctctctctctctctcaagttgcaagggagaagaaggcagggcattattgggaaaccaggggtgctgatgctgtcagtgcttaagagcctggggtggtggaggcagaccacgtggatctgaatcccaggtgtcccgtgcacaagctgtaggactttgggcaagttgcttgacctctctgtgcctcagtttctccatctgtaaaggggagatgagcatcatcacacttagcttagagggtttccaagggcctagtacacagctaagaactgtacctggtagtgctaatgtacattgcatccctatttgctttatgactgctccacagttgttcaaaaaaatcagaacctcagcatcttaggccaggggttcctgcacttctcctggtcatgctgaggttatctccggatggctttgcagtgtgagtttgccggagtttgtcctgaggcctttagtgcactggccaggatagcgcaccctcccaggacctgtgagctggttaataagattggcatttaaaagccattgcacacccagcctcagcgacgctttaatttgctacaccacagactcccccatttgcaataaatttactgtgaatagactaattgcaaaataaccctaattgggtagttatcaatgaacaacttcccatggaacaaaacggcttacaattaatagcatttaagccataaactattcttctgcagaaagctaagatgtaattacaccccatacggggattgtgttccctttctggaaaccatgacacccagatttccctctgcttaggagggatttgagcttcagcccagtggtccttttatttctttgctaaatgaggagatggagacaggggtggagggaaatttaatatatgagtaaatattcatatacatatgagcatacacacagatggatgccctgtgtttctcattttgctttacgcaacatcacctaaacttcagccaagagtgtgctggaagttgaatataattaaggaaacaattcctcatggctgcaagtctgaaaaattcaggggaagagaaatagattttaaatgttgactttggtacagcgcccccactcctcctgtccctcacgctctctgtcccctcaccccaccaccactcagggaaaatgtcgagtccagaagcccaggagatggtttgctttctgtgagacattccttgctcttgggacttttctcctttactttccagagaaaagggatttagaaggaagccccagctccatcccttttcggtaacagctgttttcacgaggggaagagggattcctctggctgtccactggcaaccgtgcagagggagatgcagtgaggtgtggggaagggactctgctgcatcacccccagtgatggcctccgagaaatttgttttgagccacacaccctagggtctctggtcattcaactggaacccctagtgtttcagggcaacgaaccaggtcagattgaaagtcaaggacagcttgggcaatggggtttaattcctggctctgccgttactcatgacataaccctaaccgctcagtgactcagtctgcacagtaaaatggacacaaaaactcatcttctgtctttatagcgtggttggctgaaatgagacaatgcatataaaatgctgagtgcactggggaagttaagtggatgtgcttggcttgttagtattaccacaatgacttttttttttctgcaattacttttgcaccaacctaatcgtcgcaatggaggagttgtctaaatgaaggggcgacaagaagaggaaaggagaggagaggaaaagggtttctttgatggtgtcagccattgtgcagccacgtcttgctgggtctgctcttcagacacagccccagtagcttccagtcctccccagccccctccctgtccccacaactcccactcaccccactttggctgttacctcttgcctctggagatcccaccctgaatgcgcttcctctgggaagccttccaggaccacctcttccccagaagccctggttgcagggaacacatggatcctgggtgaagggtgcatctctgcccctttcattgtcaaagcatcttttccaataaaggctgtttcacctgcgacccataggaggcaatctgtgccagctgccaggtgacacagctttttctgcctcattacattttgaacacctgcatgtcaggaagcgccctccgtgcagtggccctcacggccaccagcctctctgtgtcttgagttaaaatgtcccaagaaaggccctgctggctccttgcgttgctcctgcatttcttcccctttgctgggtctggttaagccaccacatagatgctgtaagtgacctgtgggtctgcagtctagacatccaggtgaagaattagaaatgaaaaatgtgagaagttccagggaagatgattggctgggagctgggtgggttggacttgagtggggaaccccggtctgggcatctgagtgaagtcggcagttctccaatgggtgatgggcaaaggaaattgcgcatgactggggaagctggcacaggtgttaggggtgaggatgaacagaagggggttctttgtggcagcaacaaaccgtctttacccatcagcctttgcaggaatggatttttggatatggggattctggggggaaggctggccgctcgctgcagagagagactggcagatgatactgccagctgcttaagggcagtctcttctacatccctcctgccctgggggcagtggggtaactacacagcgtgagtagccggcttctagaaagcatagctgacagccgcagtggagggaaaatagaactggggatgtcacaagtggtcccaggtaaatacctcagtttccccatttgtcagccagagatactactttctcccagatcctttgctgtatcaccaatgatgagaaaatgagggaatagctgtgaaaagttaaaaggtaccacgctaatgagggtgatgtgatgaagccacattgaccaggaacagcttggctaagtgggtggggttgacgggctttcccaaggcggcccttgcagttccaactgggccctttggcatctccttctgaggagcccaggaaggaagaggtatccagtaacagttcattggagttggacaaaactagtcccaaaggtcttccttgggcttgctggggaaaggcaagagactggcaaatccagagaacatcagaagacccattcattggtcagccaccacattcaaggctgtgctccaggacagggcctcacacacacagtttctataaagggccagatcataaatatttgggactttgtaaaatgcatggtctctgtctcagctattcaactttaccattgtagcgtgaaagctgccataaacaacacatcaacaaatgaccattgtgggcatgcttcagttcaagtcatttatggtcaccgaaatgtgagtttcacataattttcacttgttgtgaaatgctgttctacttctgatttgttttctacccacttaagatgtcaacccattcttagctcaagggccatgccaaaatagatagttacaggctgtggtttgccaatccttgttctaggacctggagttagagctgtgaacaagagcagagaacaccttgtgccacttgagtaccatgtccattggttctggaaatcaattgggcgtctagatggctgtaccctcatggagcttctacctgaataggagagaccagaggtgacaagtgaatagccacatctgcaatctaatgtctggatatgactctatgatttatttgaagacgttgagcaggatgagaggacaggtgaggtggggaaccatttagataggtgcctacaggctgtgtgtggtggctcacgcctgtgatctcagcactttgggaggccaaggtgggtgcattgcttgatgccaggagtttgagaccagcctggccaccatggagaaacaccatctctactaaaacaaaacaaaacaaaagttagccaggtgtggtggcacatgtctgtaatcccggctactcaagaggctgaggcatgagaattgcttcaacccgggaggtcgaggttgcagtgagctgagatcacaccactgcactccaacctgggtggcacagcaagactttatctcaaaacaaacaaacaaacaaacaaacaaaaaaactacataggtgcctagagaaggaacagaaatagatttggtctcattgtggaagaacttgctaagaattaagctgcttgcaaatggaacagttcctagtctttggatatgctgaattcctttattcatttaatatttattgagaggctgctttgtgcctgacattggtttagatggtggggaaagacatgccaggggcctgatcgtactcatctttgaatatctcgtgcttggcacatcataatcctcagtcttgccctcactgggaaagaagataacgtggttgcttttagcctcagtggctcaacctcccttcacactggggtctctacagaggcctgtgtgcaccaagcaaagcaatggaaatgggcatctagaatctctgtggaggtggtattctgagcatggcatccaccacctgggacctgaaactgtttgtcaccagctcccttcaatataccctcattcaacaattagtcatcgagcatcccctgtctatgccaggaactagtttggatggattcatttgggaggaaagcagatagaatccccgtcctcagggagcttgtggcctgttaaagttgggtagggaaacacaggggtaaacgatcattaaaatgtgcacgtaggccaggtgcggtggctcatgcctgtaataacagcactttgggaggcaggtggatcgcttgaggtcaggagtttgataccagcctagccaacatagtgaaaccccatctctcctaaaaatacaaaaattacctgggtgccagctactcaggaggctaaggcatgagaattgctttagcccgggaggaggaggttgcagtgagctgagattgcaccattgcactccagcctggatgacagagcgagactccatctcaaaaaaaaaaaaaaaaaaaattcacatgtaaaattgcaacagcaattctggggagttgcatagttgtgttttatagttgagctaagagatgaagggtggtgaaagttaactagaggaaaagctggagggggacattccaggtcaagggagtatcgtgtgcaaaggccctcgggtaggcagaggtgttgatagtttaaaacactcacaagaccaacaggggagctcttcctataagcaaaaaggttaatctgctcgtaggccaagttgtaattcctaaaagtgctaggtttagaggatctgtgtctttgctttgagcaaggagaatggaggtagaggcatctctcagtactgaactgaaattgccagagacctgaggggaaggtaggcccccctgtattagtctgttctcatgctgctgataaagacttacttgagactgggtaatttataaagaaaaataggtttaatggactcacagttccatgtggccgaggaggcctcaaaatcatggcggaaggcaaaagacatcttatagtgtggcaggcaagagaaagagcttgtgcagggagattcctctttataaaaccatctgatctcatgagacttattcactatcacgagaacagcaagggaaaaactcacccccatgattcagttacctcccaccaggttcctcccatgacacatgggaattatgggagctacaatttaagatttgggtggggacacagccaaactgtatcagccccaaaggtaagggtctggcaggctgggactggggggcaggtctcacatcctctctctacagaatcatgcttcttccacttttgagccctgaacaagaggtcatcttggatcaggaaagcaacccctgcccccaagttcttagccctggatttagggtacacatctttgggaggtctttcctcctcttacagtgctgtttctcatgacatccaagccatggaaggaaatcctcagtgcctccagcaatgtcatagactcagtgtcctgggctgtttcactatcattgacctgaccctggattaggagaagcctttgaaccaaactcaaaagacttgcggcccctctgccactttatcggctgcgaaagccttgaacaaggcacttgtgttctctgagcctcacgtctttcctataaaacagattgcacaagggcctcccctgcctcctcaggttgctgaataaaataccgtatttgagtgtactttcattaatccatcggtctagccagcaaatatttaccaagcacctgttacaagtcagccataggccacctctcgattggcagctcttgtggttctggaagcctgcaggtgggcatgggagactcgcttccatggcagggtggtttgtgatgattttcttggcgttccatgagttcttgcccagtagctgccccagaacaaggcagagaatggagattcgaagagcacatagaattcttgctccatgagaggcttgctcccttgggcacaactgattgtgtgtctgccacccagggtccccaagacagagacttagtgcaagaaggaaggagcccagacatggcccttgaatgaatgaatgagtgaatgagtgaatgaataaatgaatgaatgaatgaaataagccctagagtgaaaagactagctatctctcctttctgcataagtcaacaaaactagctggccttttctcctctctcaaattacttggcagtccagggctaggaattcatatcaatgccacttcctcctggaagccttctgtgatgctgtctccccacactgcacctctccaagtctgtgtgaggtgctcaagctgtgtgcccccaaaccaccttgcctgttccctgctggggtacatgtcacaggatagcgtggttgctggagtgctctgtagcccacactgagccacaagggctgagtacccttaattctgttggggacccttaggtgagactggctgctatagcatatcctgagtctccaccactggatctccagcccctgcctgcacggggctaggacacgagaacccacatttcttaggcacttcctgaatgccaggtgtggaggcgagcactttgcatgtgtgatctcatcgcgactcctgcacagccctggagaagggatgttctctagttccattgaacagacgaagaaactgatcctcagagaggttaagtagcttgcccagggtcacatttgcaagtgacagaccttagactcaaacccacttctgcctaacttcaaaacccacaccttaacttgtctgctctgtggtacccttagtaaatgtggaaccagatgtgttaaatgactgatctagcttctccagagataaaggaaaatgcactgcatgttaatcaacacctttctctagctattgatacttgttactctccatctctgcagccagaaagaacagggagctaaggtctctatacaagaaactgctcttaaataataacacttaacctctacgtagggattgttaaatgccaagggctatcctaagaaggtttagccacattaactcatttattcctcataacaactttgtattcaaagaagttgagacacagaaaacttacccagaattacacatttcaccagtagcagagccaggctctgagctcagagactttggttccagtggcgtggcaaggggcttaaccactgcactttggtgtctataggagcagctgcattcaggctgaagcaagccctttgcagcttacatttgctccttgtgctcaatctgtctgttgcaatgagacccacccacacagtcagataattcacctgcttttggaggcgggggcgccaatcccatccaagacgctaaggacttgtgtttgaagtcagttcattgcctggggtgagaaatagccagccgcggttacctcccatttctctgccagtttctagttgctgtggtatatttgtgttagtgtaaaaatgacaaagcaataatttttcattgtatccttcagtcacccatgagagattggatttaggtcacaatttattaccccgtggaattgaattcaatttttaacaccatgtcagtcattctggtgttagagccttttaatggctgtgaaatttatacagtgataaagtaatttaaaacatatgtaggaagaacatcagacaaattgatgtgtatagaaccctctggtaaaaattgaacaggagataaacacggaaaatggtgattgattaagagacgattgaaatagtgcttgctttgataaactcttaatggcgaaattagtaaactaatttattcttcgcaattttgaggagggtttatgttgccctaaatcagaatcgagctgagccacaaagcgcaaattaatagctcacctccaagtgtggcatggatagagtgagaaacctttcagaggaactgggaggctgccaagagccagtccccggtgatatttgcagcgaccaaagtgaaaagatggtgagaaggcagggaaaggagaattctcctcacgatttttaataacttgcccaaataatgcagaaaggatgcttgttaaaatctaattcctcaagtcaaggctgtatacattctcattattttaaaatactgaaacattgcagataaggggaaaatccaccctgatccgtcagtcccatctgagcagtggcacttgtgtgtacatttttgtttttctttagatatctaaactcaacacatgtcaaaaaaaagagtgtggttttgtgacaagagattcataaatcatatgaaactgatgtataaatctgaaacttgtaaaaaatatattaatagtatctggctgtgggatgaaagaattcacaagttagatgatttttttgttgttgttgcacatgtccaggtctgaggtctgtttccttgcctggagctagagacctaagttatttctttatagtagctgaccatataactctgggtatggatacaccacagtgtaattggtcattcccctattgagggacatttaggttgttgccagttttttactatactaagtgactgttttctcagatctctcaaagatgtacataactagtaccattctggatacatcagagaaaagctaatttgctacctacaatggatgccccaggacattcgagcttaattctcttggggatcctgagttgagactggctgctacagagcatctgaagaatagaattggcaggtcaaacagcttgcccattttaaattgtgatagacagcatcaaactgccctgtgaaaagcctgtattggttataacagtatatcctgtattggtcaccaacaggaccttgacagcctctaaaacatcctcatcttccatcctgcattctgcctgggatccctcttcaggtttcacgttagtaacatctctcgtgcctagtcctccgagatcccagcaattttcttgcgtggtcaaggacagtgcttgccggccacacttgggcttgtgttggcaacagaccccccaaggccccacccccagggattctgacccaggtcgaggacagaacctgagaaatcacacttctgccagaggctgctgccctccagaactacactttgagaagcccggacctgggagaacatcctgttccccctagttctgccctttccctgattcagtggtttgcaaccaatgctactgagcccctcgggacgtctggacatgcctagagacatttggttgtctcgactgggaaagggggtactactggcatctaaagcgtagacacgaaggatactgctcagcatcctgcaatgcacaggacatccccacaatgattttccagtccaaaatgtccatggtgccgtggccaagcatggtgggagacctgggcatctgcttctctccatggggcaagttcacattcggtatggacacattggcatccacagtctcactcctgggtgtgaaaagcctccccctcacccctctgactttctcagcccttgatgaccctttgcgtcctgaagacccctctccccagcctgaagagtccataatgagacacctcacattgattgctgaccgttgccgctccttgtgctaagcacatagaactgtgcttagcagtgaaagcttgagtcggtcggcttgggtttgaattttagctgtgcccctccctcactcgggaccttgtgcaagggacttcactgctctgttgcttgatctttaatctatagaatggggatgatgattggtatctggtttgcccaggacaatcccgatctgtgcctgtcatcctggtatagttagtaatggagcccctttttcctctcaagagttctccagtctcactctaacctgatgaggattctcctatagagtgagactggatgatttgtttcagataattcgtttgacctttagggagccatgcatgggttttgagcaagacagtgctgtgatctcatttagactttaacaaagggattggcaggcttttcataaactgaccataataagttatctggtcaccctaatgatgatagtcttaatagttctcaccttgtagggctgttgtgaggatagaatgagaggatctgtgtgaattattaaagcagaggctgtctctagaaagtgctcaataaaagttagctcttctgggtgtgtacctagaagaattgaaggcagagtcttaaagagacatttgtacacctttgtttataggagcattattcagagtagtcaaaaggtggaggcaacacaggtgtccatgaacagatgaaaggataaacaaaatgtggtctacacatacagtggaatactagccagccttaaaaagggagaagaccctatcgcatgctgcaacatggatgcacctgggggacttcacgctaagtgaaataagccagtcaccatagatcagatactgtgtgattcccccttacacaaggtatctagagtaattaaattcctagagacaggagtaggatggtgagacctaggggcttgagggagagagaaacagggatttgttttttaatggccgtagaatttcaattctgcaaaatgaaaaagttgtggagattggttgcacaacaatatgaatatacttaacactattgtgcacttaaaatgattaagacggtaaattttatgttgtgtgttttaccattttttaaaaatagctcttctgaaacatgcattgcctcatttaaatcttgctctaaattggtgaagtaggcttcttcattctcccatttcacagatgacaattctcctgcagagtgaggctagatgatttgttccagataagtcatttgacctttactctagggtcgtagggagccctggatgggtcttgagcaagacggtagcacaatctgatttacactttaacatagggattgacaaactttctgtaaaaggctagataataaatagttcaggttttgcagagtagaaggtctctgtcctaactactcaactcaatgtgtagatagtgcataaatgaataggcatgtctgtgctctgataaaatgttgtttacaaaatggatggctgggtttggcccaagaccataattcgccaacccctgctcatatggtttggctgtgtccccacccaaatctcatcttgaattgtactcccacaattcccatgtgtcatgggagggacctagtgggaggtaattgaatcacgggggtgggtctttcttttgctgttcttatgatggtgaataagtcccaggagatctgatggttttataaagaggagttccccagctgaagttatctcttgcctgcggccatgtaggacgtgcctttcaccttctaccatacttgtgaggtcttccccgccacatggaactgtgagtccattaaacctctttttctttgtaaattacccagtctcgggtatgactctatcaacagtgtgaaagactaatactcctgctttggagagctccctggctgctatcaccttccaactccagcatgtggagaagacagttccagaagataggctagttaactgcctcttccccacactgtatcccctaaaagtcaaccgtttcataacctgggagtaagagactcgtaaggaagcagcaagttcccaggggtgccccatcagttccaacgtcaatgctgcctcttgtcctccctctcctcattgttgcattgattgtgcaacccatctccagaactttttcgttttgcaaaactgaaattttatggccattaaaaaccaaatctccatgcactcacgcactcacactgaaagctcccaagaaggagggccctggcaaggtgacctggaggcccagcgaagccacggcagtgggccaggcatgaagaaactgtagtctctactcctgatgctggcttgacagcgctgtttgtttcaagactttattagcattgcagtgagggacctggagaatttagaggtgctgttgccattgctttctcagcctaaacctcaaagagcaattaacctggttatccaggcctccctctctccccttgtttattgccgtgaacacaggaactgcaccattaggtgcatgaaacgctatcaaggaatttaactgtaatttaaaaggctctatggggaggaccccagtggctgattaataatgcatttgtagagcaataaagactgcagcagatcagcggagctcagcctccagactttacttatgcgtctggaatcctatgaggtttctctccggggtggcagaggggtgtctacgccggagttctctggctccaaaaacatggaataggatcctgtgaaatgtggaatactggaaatggtcctgtccagatggtcaaggacatgggcttctaatcattggggttctagagttgaatcctgggtctaccaacagctatggaacattgagcacatcacctaaacctctgtgtgcctcatttttccccgtctctaaaatggggctaatgatagtatctatccaacaggttctcctaaatggaatgatgtgtaatacataataaagtacctggtgcttgtagagtaggtgcttgttcagtgctaattatcttattactatcctcatcattaaagaaagcattatttccttctggaaagctcaggccactgaggctggttcaggcttggtcccgaagagcttgaaaaaggttagttctcattctcacatttcaaccagcagcaagaccttccaattctacatcctgaatatcactgctgggtccatttctctctctgtctcttctgcaacatccctgtcatgtagattgtggcaatacattcctaacttacctgctcacatctgcgtctcatacccgctccctgcctctcccaagtgaatcttcattctgcatctagagtgtgcttcttaagatgtacttggaactgtgtggctcgtctgctgaagacttgccaaggactttccccattgcaagtcagtgagaccttcaggactcactgcagtctggcctacctccttcttcaaccttatctccctttattctcacccattctccctgttcctgcatcccctagagaaagcagactgtagctgaaggcttccccacatgctagtcttcctgtccatacccctgttctcatgcctctcccagcaattcatgcagttccttggatctgagtttaaacccagttatgctttctcaggcaaaacttttcttttatagcatttattccagtttattaatatgcatgtatttgtgtagtttgtttagcatcccttttccaaattaaactaaaagatccaggagggcaggttctaaatattttttttcactacttacaccacctggtactaagtagatacactggatggataaatggagggatgaatgagaagatgggtggatatatggaaagatgggttgagtggatgaaaacatggatgggatgagtcaattaatggatggataaaaagataagtgaattggacagacagatgaaaggatggatgaatggactggctgagcgagtgggtggttggtggatggatggatggacaggctgggtgggtggatggatggaaggacagacagactcggtgggtggatggatggatgggtggatggatgaatggatgaatggactaggaacatggatggatgggctgggcggatgagtggatggatgaatgggatgcatggatggatggatggatggatggacggactaggtgagtggatggatggatggactgggtggatgagtggatggatgaatgggatggatggatggatggatggatggatggatgaatagatggactgggtgggtggatggatggatgatggatggatggatggatgaatggactggatgagtagatggatggatggatcatggatggatggactgggtgggtgagtggatggatgaatgggatgaatggatggatagatggactgggtgagtggatggatggatgatggatggatggatggatgaatggactggatgagtggatggatggatggatcatggatggatggactgggtgggtgagtggatggatgaatgagatgaatggatggatggatgaatggatggatggatggatgaattacaggggtccaagtctgcaagtgaagagtccagtaagcatgcctttggggtagtctaggcaagaaatgacaataggttcaattaagaaagaggaaaagttggatttgaaaacaattcaggaggcaaatttggcagaatttggcagtctgttggctgtagagatgaggctggggaggaatcgaagaagacacctggattgttcattagaggacctgattggtgttgctatcactgactgaaatggagaaattactgcatctagaaaatgagcagatgactgccctacctcatatcatgagatatctcaccccattgtgagatcacgtaaactcctcgacttatttggaaaagttgatagaagtgggagaaactgaaaaggatggagtccagctccactggtgccgttgaaactgaaagaacagctttgcaaaagtcctaaagttgccacacacttggcatgactaagagccagaaggcggaagggatagctgaagtttaattagcaataagaagcatagatgctgaagacaaagaggagggcagggatctggtcatgcaggaccttgtaggccatgaaagggaatttagagttttcccttattggggtccgacagcatcacaaaacctgatttctctaagacaggggtcctgggtccaaagacagctgccagtctgcttttgtaaaaacactaccacgcccattcatttatgcatcatctgtggctactttccaacctcaagggcagagctgagtggttgcaacagaaactgtgcagctccaaaagcctaaactattaggttggtgcaaaagtagttgcacttttggccatcactttcaatagcaaaaaccgtaattacttttgcaccaacctaatatttacagtctaactctttacagaagaagtctgctgactcctgttctaagacaaaagctgaaaattccggcctgctatttcctgtgtgtatttgaacattttacagatttgccattgtcttcaaaaaggattaatgggaataaattacagatttaacaaggaataactgcaacttgtttctccagggtttcagttgacttttagggatggggtggatgaatggaaaggccaggggaaaaagtgctctgacttcagctcatgataaaaatcccccagcctgtgtgccaggtaccactgccctcaccgaaaggatgctaagtgaaggtggaatggcctgacatgtaccagatgctctacaaatgtttgctgaactgctaatgcatgaacaatgaccttcagagggatttggagccagccttacgcctggaccattttaatactgacttggaaataaggacagacacttaccagcctgctactgacttttacctgggctctcagctaacttgcttggaatggactgaacccccagtgtcacccaagtgacccgagaggaacccctgcattttgccagcagatggcatccagcaacaacatcccatggtctcccaggaagcagaactaggcccagatgaatattggagcatcctgtagaaacgctggtaagaaatgctgatgaatccgtctccggattctaattacaccgctgcgtctctcaggaaggaagagaccttttgccacaggcacacttcactaatctgaaacccaacacagactcagtttaattacatgtgcacttcctggagtcatgagaaaggttctgaaaaaccagttcactgcctgtcaggacgaagggcattgatcttaaacctccaaccagtatcttcaaccaagacacattgctgagtgtgggaaggcagaggagagggcaggagtcaccccaagggaggccaacttgtggggtgagaaaagtccatttggaaaaaaaaattaatagtttctctaatgtattttggaacttcttcctggaatgagaatggggaaaaaatactgaaaaacacagatctccttctggagcccttcaaataataataatgtaataattgggattgtaagttgaataccagtatttctactttatggacattaaagtttgagaagcaccaaacttcgtatattacacatccttagaatctttcatcttttaaatccccaaacaagactcacctgaacattgttctttacgttactttctgcgttgaacagccacctaaatgccaattatacctaaatcaagcccctcttcagaatttcagaatcctatactcaattgctaagtagatattatggattacattgtatcccccaaaataggttgaattcctaagccccaggacttgtgaatgtggccttatttggaaatagggtctttgcaaattatcaagttaaagtgaggtcattagagcgtgccctaatccaacatgactgtgtccgtataaaaagaggacgttcagacccacagatagacatgcacactagaagaatgccaagggaacatggacgtaaagacaggtgatgcatctcaaggccaaggaacatgaattaccggcaattccctaggagccagaagaaaggcatggaatagattcttccttctcagccctcagaagaaacgaaccctgccaacgcctggatcttggacctccagcctccggcactatgagacagtaagtttctgctgtttaagccccccagctgtgtgactttgttagggcagccccgggaaactacaatgggcatcaccagtccgatgtcccactgaggtcacagtcccacatcagtttttccacactgtcccctcaaccaagtccagccttttttttttttttgtactctccatttcagttgtgatactgacactccttagtccctctaacaaaaagtccatgtgtctttgattcctgatagccatttagactcgtaaaggaagaagaggtggtaagaccctacacatgctcactttcactcttagcatggagactaaagccagcaagatgccaggcccaggctagatgcttgaattttctgaattagttgctaataattaaaaatcagatgcttgtatttaaatttcaagatctccagcttccctcaagataaatggaaagatctagcaaccttaagccttcagggccacacatggccatgctgatctgttgatgaaaaaggcatctccagaccagcctgaccaatatggtgaaaccccgtctctactaaaaatacaaaaattagctgggtgtggtggcgcactcctgtagtcccagctactcgggaggctgaggcaggagaattgcttgaacccgggagatagaagttgcaatgagcagcagttgggccactgcaccccagcctgagctacagagcaagactctgtctcaataataataataataacaatgattaagtaatagagagtgatgtatgtgattaaaaggctagggatggttgcccttagaacctgggtttggactaaagctgttacttggaggacactcaaggtgcaaatttaccaacacgtcagattttctgtaaacagatgcaggcactaggcaaacgttttttaagccagaaagctatatcaagagagacacagtccttaaaggaactgcaaagaaagcatttgtcataattccccactcagtatcctgaatgcataatttctaccgtgactcagcgcgtctttggggactgagaaactaacagtccctttcgtgcatacaagaaatactgagaggcattgagacggggcccttcgagtttgcagtctgccactgcctctttccagctgtgtgacctttggccaggttagctgacctctctgaaccccatttgtaaatggggatactggtacgtccttttgcaggatgggtgggaggactggagagaagagctcacccagcaccatgctcagcacattcagcacatagtaggtctccaaaaaaaaaaaaaaaaaagatgataatgatgatgatttggctgttagtggttccaggccactttcaacacgtctcaacttgtgtatgacttgaacagctttgtctgacttgtgtgagataagggagcttttccctctgaaatctagaactacatttaatcaggcatcagtaacctccattcccaaactgaactggaacaagctacttttcacactaaaacaaagcgaggaataaaatagagcaagatgactctacttttttttttttcaggaagttttcccattttctcataatgagagatgattaaaataaccaggagacaaatgacaccaaattaataaaaatgtagatcaaatgatcctccattacctattttgctcagttgcagttgaagaatgcattgattaaactgccgcagaccattatggtcgtattcattactatagcataatctgttttattatgataggataataactaacacagtcttgcagacagacgtttctctgtgggctaagtaatcatttactgtggatgtgcaccaaggaatgctgggttcactttgctcagggtagacttgaaccttagggttgcagagaagatggtttatttatttatttatttatttatttatttattttatcacatggctcagtttgctggattcccacatggggagggttcttcgagtgctgctgtgaaatgtataatgatcccagagagattttagaaatgccaaaaaaaaaaaaagagtagtcaatgagctgttagttttttgttgttgtttttatctactctctacccactagctgatttgattgatttcttatgtgcttatttacccattatttatttattaggtatttattcattattcattaggcaaacgggtgatagctgtgcagaacttagtatctcaagacttagcgttgatcagagcctcatcggaaaggcaaagatgtaactgaacagttaagcggggataaaggtaggcccagagatttgcaagagctgaaatggagggatgattttgccacttgggagtgaaacatctagagttggaagtggtgatgacttgggtgcagaaggcaggctttctgcaattgaatccaggctctgtcactcacaagctaggcattcttgggcaaatcacttcatccctccagtctaaggtttttcctctgcaaaatgggcgtggcagcagtacccgcctcactgttgacacaggtaccagttatgagaatcactccataagtgtgtcttaggtccggtcttcttgaatccttcagtatggaggagccatgtcattagcatcctttgcttggcccatgaggaaactaggacttagggagagcaagtaaccttgcctgaaatcacccagctacgcaaaatcagagccaagatgtgaagccaagtctgccgcacccccaagcacgtgcgcttaaccaggatgaagttggcatttcatacactggtggtatttatagcaagcgtcacaaaataccccaaggggccaggcaggatgtcaatgcctggagtaggcaggtagaagctgccactcacttagctccacgatagtgtaaagccccaggctcccttgccttgagaactgcaggcccaggcttgcttgctcactcttccaattattattctttttgtaagaaatctgagttttaatctgaaatctcttgatttaactgacaactattttaatttaaaacaaagcagcacaacagagtgtgagcccaagaaaagctgtctgcaggctgggcaggcccaggagctggcagcctgcaatctctgctttgaagcagggcgcgtctgcaggccgcttagtatgcgcagagccctgcaccacaccttcctacttaaatttctgctctgaggactcttgctcgcttccgcagtcagaagtctccatcactagcttgcagcgggaaaccaggctgcttcctttccaggccctccttttgctttgctcagcactggcatccatcactcactgttttcaagcaggatgggcagtgcctggcctgcaatgaaacttgtcttctggtgccacctcccattttctgagtgttttgaggctgggcatgagtttgccttgaggtctccttgaagccggcaggggatgcaaaattctcatcgagttgctttctgttgtcatttttcctgtggagttggggagaggcttgttggaaggttctggtgccccataatccaccctatttgatgtcaacatgcatttattaaacggcccctctttgtatgtggcaggtgaagggaaggtgccccctgaagagcagaggagacaagtcctgatagtgtatgtcagagagtgatatggtggaggcattaaaaaaatatgacacaaaagaggaagaattatgcccaaagggggcaatcagtgaaaacgtcgtagtctttgagataaataagtaggcgagtatataatttcaccaggtcaagaaggacagtccaaatagagagtacaataccaccatcaccaccgctgccaacattatcaccaacaccatgacgaaggccgccacctcatatcatcaccatcttcatcactaccaccattgccaacaccactatcacctctaccactgccgcccccatcagaatcaccatcaccaccaccttattatctctttcaccaccatcctgttatccccatcaccaccactgtcatcgccttcacagtcatcacagctatcaccatcacctccaccaccatcactgccaacaccaccgccatcttcatcatcatcaatcaatcaataatcaacattactgagaacataccataaagccctttgcaagttttatctaatttgagattcagaactttttgacatgggcaatatatatatatatatgtatatatatatatatatacacacacacacacacacacacacagacacagacacgcagacacagtcatgcactgtatgtttcagtgtttcagtcaacggtggactgcatatacaatggtggtcccataagagtataatatctattatagatatagatattataatcttattataatagattataataataattatatataatatattatatataatcaaatatgaaggtgtatatataatatatattatatattttatatatagtatatattgtataatatattatatataatcgattataatctattatctattatatattataatatatataattatcgattatatataataatagattattataataagattataatatcttacgggaccaccattgtatgtgcagtccatcgttgactattcagccctattataggggctgaaaaattcctatggactagttacattgtagtcataacatcatagtttatttttttataaattgagtgtggcctaagtgtacagtgtttataaagtctacagtaatgtacagtaatgtcctacaccttcatattcacccacgacttactgactcacccagagcaactaccagttctgcaagctccattcatgataagtatcttatataggtgtaccatttttatcttttataccatattgttactgtaccttttctatgtttagatatgcttagatgcacaaatacttaaaattgtgttaaagttgcctacagtattgagtacagtatgatgctgtccaggtttgtagcctaggagcatataacctaggtatgtgctaagccaccccatgtaggtttgtgtaactgcgctctgtgatagtctcacagcgacaaaatctcataacaatccactcctcggaatgtatcccatcgttgtgatgcatggctgtaccctcacttaaaggtaaggaaattgaggcttagagaaatgaaggcatttatgaaggtcacacagctcaactgatgtggctgcaaattccaagccagctacctgactccagagccaacactgttatccactgcaccccactgccccccactgcctgtggggagaaaggccctgtaggatgtgtgaagtgcttaggacactctagaacatggtaaatgctcaataaattgttagatactgcagcttacttcagaagaatgatagtgattattgcctaaacaaaggatttctgtattcaaatacattaggaaatggtggattaaacaaatgcaaagcaagtttttatttggctgcagaccttgtcagagcctttcaagggcaaatgcacattggaaatctccaagaagcaatgcgtgaactgtttccttctgaacacattcaagactagagttccttgagaggcacaagtcatgagataaatgatcaagagcatcaaagtgggattctgttagctcagggtttttcaactgtggtcctgttgacactttgggctggatcattctttattgtcaggtgctatcctgtgccccttggatgcctttggcctcgacttactaggtgccggtagtacagggtcacccagttgtggcaatgaaaaatgtctccagatattgataaatgtatctagggggctatatcacttccagttgagggccactgagttagcttatttaaagcatagagaagagaataggcctgaaatgcctacattgaagggaccggaggatgaaagaaaaggctatcacggagccaagggaagtgatgaaaggtgctcagatgaccttggaagggcaggaccagggctgccaaaagagcagggtattccaaaaagaggaggcggcctccagctgttggaagctctggaagaaaaacggagaatggatgaagacaagcctttggattttctcatcagcttcctttggaaaacaactccagttgactgacagacagcaggcagatttcagggtgcagagcaggaccatctactgctcacggaaggcttagagtggccaatatcaggaaatgctgttaaaatggggacatcggaactagcccaggaaggatggaggccagcatagtggacaggcagcaatgcaagggagaaagtgaatcagtcaagcttcagacgaggaggtggacagggacaggatcaagagcatgatcctgtgatcatgggaaggacagttgggcacattcctctcgcagccctggtgggtttggctctttgttttagttccctacggccaccataacaaatcgcttcaaccagcgtggcttaaaacaacatgaatttattctctcgtcctggagaatgagagttctggaggtcagaagtccacactcaaggcatgagcagggttggttggttctagaggatctggagaagcatccatggctctctcctaggttccagttgctgctggcgttccttggtgtttcttggcttgtagatgcaccagtgcagtccctgcctctatcagcacgtgaccttcctgcatgtcttcacatggccttaggagaagatgagtcattggatttctagcccattctaacccagtatgaactcatcttaatttaactaattatatctgcagagactgtatttctaaataagatcacattctgagattctgagtggacatgattttggagggatgccgtttaacccagtacactcacatacagcttatttttttacaaatgtgaatttgtaaccattttaaaattgggataatgcccataagaataagtatttctggagtcttctggaaaaccagaagactgagcaacttggaatgcattccccatggtaaaatgattggcgctgagaatggatcacctctgttagggtgaatgggcttgttctaatttgcctctgcccccacctggcctacttctctcattgaccttacatgggtagcccagtgtggcctggaatttgagatcccagcataagccataaggctggggcctagcccagcacttggagtagactccatactctctagtttcctcgtggtctgatagagatcagaggcatcacctcctctcagatgttgtttgtgatctaggtgtaactacagtcacattcatccggtccacataagcccacagctggggtcacatgcacaaggaggatggaggcaaaccagccctcacatggacatgcgggccaggactggcccgggctacagttcaggaggccttttgcacattttttgcacgtcagttctggaatctcacctcagaagggcatggtgccagaggcgaatgacactaacttgagaaaccaaacagatctgtacaaaaaatacaaaaattagccgggcttggtggcactcattggtaatcccagctacttgggaggctgaggcaggagaattgcttgagcctgggaggtggaggctgcagtgagccgagattgtgccactgcactccagcctgggcaaaagagtgagactgtgtctcaaaaaataaaaataaaaggaaatcaaacagatctggatttgaatcccagctgtaactctagctgtgtggcctgagacaaatgccttaatctctctgagtcacagttttctcatccttagaatgaggatacaatctactctgcccaagggtgttttgggccaggtgtgtaaaatgccaggtatgaagtgggccctcagtaagtagcaatcatgtaaaaatgattgttgttcctattgtcagatgagttccagccaccagacagacagttgtcacacacaggtccggaggagcaaaatggatggagagaaggggagatgaagctgcctccaatcagaagccttctccaatcacaagcctccaccgatcagaagcctcctccaatcacaagcctcctccaatcacaagcctcgctgatgaggacatggagcttctaagtcccctattggctgcttgagacaggacatattctcaacagcagtcacctcctcccctcagcccccaaccccatcaccgttctgtgcccattttgtatgcaccactcagtgtttaggtgacaccttattaaacaaggtttgcctgtgaccaggcaagtcacaatgaagtcaggaattaagatatagcttcctgcatcacctaattggattacaaggatcatatgaatgctgtgttgactatgaaatgtgcaggggattattcagtaatgactttcttctgtcgtccttcactaatcctgtcaatcgggaatgcctttagattaggaaagaatcccactggaaggagctgtctttctcatttacagttgggcttccccaggggctggagaagcagggtcactgtagctcacttattggccagtgaagacagccgccatatctaagcaatgactctattcctcatcactggtctgggttcctgatccaaacctacaacagtcaatggacatttctaccttggggttccacgagctaagggtctgaaaaataacctaccatccttctgcctccaaaatctcctgaacttttttcctaggtgaataaccctgttattccccaagttgcccaaaccaaaaatccaagagtctctgttatttctactcccttaaatccacaaagtcgctatcatttctaggtcctaaataccttgtatctgtctcctcctccccagcctcctgctctgccctttaggcatgtattgtctctgtctggtagtattacagtcacttcccaactctttctcctgctccatttctgcctctgtcttctcttcaaaaacaaaaacaaaaaaacatggcttccagagtgagctttaaaaaatgtgcttctcctcacatcactcccctgatgaaaaccctcatcaaacaaggaaatacattgcagcttgagcctcttctaccttcctgggccaaagcagacattgctaatcaatcactgcattgcgtcctgcaaggcaggatttggactcagctttgctatgagttcattgggttgacaagagagatgagaactatttgacatctcaggatccttcctcatctgccctctgcctgccagccttgttcctgctgctcctcctcccttacctgcattgtagaattcacctcccagccgtcctgagctcaggggagttctgagtgactcataccaccatacctttgcacatgcagttgcctctgtgtggaatgcccttccccaagtgtgtctgcctggaaaacttttactttactcaggtgccatcctgtccatgaagtctcgagatttaggtatttttctccaagcccccattgccccatgaccaggtgttcattttagggagcacccccttgcactgacgttgttggttagcatgtctgagacagagataaggcttatgcgtcttcacacccctggtacctgccatggctccactgtgctcaggagctgtttgtaaacaatcaaatgggtgatggaataaatagcatctgtcttactgaatgcttgctttatgccagacaccaggctaagcgctctatctgcatcattgtatcccagcctcacaatctctctgtaaggtaggcatgggagtttttttgcacatgtggaaactgaggctcaaagcaatgaagtcatttgctcaaggccacacagtgatggacccaggtctatctaaagtagtatttttttttccagggacatttggcaatatctggaaacttcgtttttattttttgagacagggtttcactctgtcatccaggctggagtacagtggtgtgatctcggctcactgcaatctctgcctcctgggctcaagccatcctcccacctcagcctcctgagtagctggcactaccaccaccaccacacctggctaatttttgtattttagtagagacagggtttcgccacgttggccaggcttgtctcaaacacctgacctcaggtgatctgcccgcctcagcctcccaaagtgctgggattacaggtgtgagccactgtgcctgctggaaacatttttaatggtcacaactaaagaaaggatgctcctggcatttagtggatcgagtccagagatgctcctgggcactgcacaatgcacaggacagcttgctgtcacctccaatagagagttatccagcccatagtgctagtagtgctatagtacaagggtactacggccctgaggctttgaatgtaacggtggccttgaatgtccctacggtatgtggctctgtaactgctgctggtgtttcattggtttcagttgctcagagtcacaagctgcacaaatacattcagaaggtgctgccttccctttggttgtgtcaagaatggcagagagaatagggacataggtccagatatgccttctactaaatcttgggacttcatcatttaaccataacagcctccaaggataatagttctcagtgtaagccgtctcccccattctgtccatcctggaggggtccccttcaaacccactacctcatgcaaatttccagcagctgaaatgaatacatgcagatttttttttataattttttgcagatgttcttaggggtaaggtaaatatgtaatttacaaaaatccaaagaacttatgatccgaatctgcttaagccacatgaagtcaacagagggttaaaagcacccaatttattttcatcaagaaatttgaactttggtcgtagaatgcaacttagctgcgattctacattatttatgattcatggggcattgtaacttaccacagtctctgagtaatctttttaagcctgccaaaagaaccggtgttaattgcttacactggaacatatttgctgttggaaatgtcacaccataattatattccatttcgctgtctaacaagtaatatactaaaagaaaattgggttttttttttttcctccttcttcttgtgatgtgcaaaaccattcctgaaacgcttcaagcagctcgcaggtggcaagtttctggacttgtcaagaaattaggcagaaaactttctgggtttgctgatggtaatacaagccagaccagcagggtctgcttggtggactttgtaacctgagctcatgctcagaaagccccatgttagattttatgctttgctttcaccgtcttgacactcttaatattttttgaacaaggggccttgcattttcatctgtagtgagccctgcaaattatggagttggtcctaaaaaggaggaggaaagggagagggacatggcccatggagactgggattaaagatcaggaaacagttgacgtttcagaacatgatgagaatttcagagacacagaccaattataaatagagagagagagagtgtgtgtgtgtgtgtgtgtgtgtgtaaaataagaattggtggcttacgaggtcacacaggacaaaatgtctaatcagatgactcttcctggaagactaatactatatttggtaggctgagcatctgttaaaccagggactggcaaatgatagcccacaagccaaatccggcccaccacctgttgcgtaagttaagttttattggaacacagccacactcatttgttttggtcttgtctgtggctgccttctctctacagtggcagagttgagaagttgcaacagagaaccatatggcccacaaagcccaaagtgtttactgtctgtcctcttatagaaaataaaatatttaagattcctgtcttaaaatctagggagagcctcatgcacctcgctacaagagaggctgagaagtgttgaagaaatgttgataagtgtcacattctcatttgtaattgtgtataacagaggggaaaatggatgttgatggatggttagctgtctctggcataccccttttgcagatttggaagctgaggaggcttcaagagttcatgaagccatttgcccaagaccacagatcaaataagtgacagagccaggacgcagagggaagcctgacttgaaagtataaagcacgtgctttctaaattgtgatagcttccctgcatctgctaacaagtgcacgtacactgagtaatcttttgcacagatacactgataagactgcgaaataagactgtgaaagaaaacaagccaaatcacagatggctcttgcccccaaagggtgattaggcatgcacgtgcctggtcttcatagaaggcagatgctgctaaaagtgttcgttgggtcattcatttgttcatgtaagaaatgtatggaaagtttaggctttgtaaatggttcaccttcacccatctcaatgccttgcttttcctcctgtccgtcttgtcgctgatagaatgtggtcaacaatcagaacatctgtacaacagctcctagatgaccaatataccacagccttcaattaaaatatgtcaggttaccttcttcagtatttcctttccattttccactttgggaaattgaagctcaaaggttctggtagcttctctagataacagagctagcgaggtctggtcctagaatttgaacccaagcctttctgccttcagtaaccaggtatagaatcactatattagttagggaacatcagctgctataacaatcaaacgtagcaatgtttgtttgcgttgaggtcacacagggcaaactgtctaatcagataactctttctggaagactagtactttatttggtagatagagcttctcttcaaccagagatgggtaaactgtagccagtgggctgaatccagcccaccacctgttttgtaagtcaaattttattggaacacagccaccagtgtataatgtctctaacatgaagatggttgatgtcttcatcctctgccatccaaaatagatgttcctgattgactcccctccatgttgtaattcagggatccaggccctttccatctgactccactatctccactatcttcaacacacagcatccaaggtcaccgtgctcttctgcacccagacagtgaagagggaaatagcacagagaagcatgcacaggtgtccatgggtaagcctagaagttgtgtgcatcacatttctattttattggctaaagcacagcctcttggcaagacctgactgcaaacgatgtgaagtaggttgtagtgagtgccatgaataaagcagacgtggttttgaccaagagcctcaaccactctgattgccctactgctctgcccagagttgcttccctttcctttgggttatttccagccccctggcccctgtgaaatacatgtgaccacgtggctctgttcctgcaaaagggtcagcttccccaatgctgggaacacatctccaggaagcattcctctgtgagtgcgactgtgcatctgacagggatacggggcacagcgggaggcaaggttagtaatttagttgttactggctgacaggttagtcttagaatatgttccctgcaattcaaggcttgcacgaaagagacagagagaggcacttaacaaatgtcagcctttcttttttttttttttttcctggcgcagttgcctcacactgaccctgaagcatttgaggggtgtctctgtgtgagttcatcagcgcctagtcccagcccccgcttggtgttcttgattcctctttcctgtgaggtttccctgagtgtggttcacgaagagcggccgtcacagttgccagagggcccctgaaaatactgaaatactgccagggtggtgatctggagggaggaatgcaggattctttttttttttttttttttttgagacagagttttgctctgtcacccaggctggagtgctgtggcacgatcccggctcgctgcaatctctgcctcccgggttcaattgattctcatgcctcagcctcccaagtagctgggattatgggtgtacaccactgtgcccatctaatttttatatttttagtagagatggggtttcgtcattttggccaggctgatcttgaactcgtgacgtcaagtgatccacccgcctccacctcccaaagtgctgggattacaggcgtaagccactgcgcccggtctagattctgcattttaataagctcctcagacaatctttttcaggatcacgggtttcaagcagtttctcaaccttggcatttgacattttgaaccagataatcccttctgtgggggccgtcccgtacatggtgggacgtttagcggtatccctggcttctacctcctaggtgccagtagcattctttcttccagttgtgacaaataaaaatgtctccagacattgctagatgtcctcagggagacaaaattgtccctggtcaagaagtgctggcttagggcataacttagtatgtttctgtgacataaaatataaatgttcctctaggacccatgttcttctctccattactaactcccaggtatctgggtcgggtcctaggattcagtctccctcagaggaacgtgagtggaaatgatggttacttcttggccaagccagttgacgggctgtgaatttgtcatgccaatcgctgtcctctctgtgcactgcaagagaagggtgctaaggagtgggattgtgtagttgaagcaatttggatcctcaagtcacctcttggaggacggccctgtaggagagctgctcaagctgcataggagcaggaaataagcctttgttgggttcaagccactgcgattttgggatccatgtgttgagcccagcattgccctggctcatactggattttagtgctctatgtaaagcacaaaggaactgtcaacttcctctcttataagtcatctgaaacctgttctttttattttttcttggagacaaggtctcactctgttgcccaggttagagtacagtggcgtgatcatagctcactgcagccttaacctcccaggctcaagcgatcctcctgcctcagcctcccgaagagctgggactacaggtgcaccccaccacactctgcttaaaacatattcttaatacatttaaggcaggttggagtaatggctttggaagcaggttagtctgggttcagatcccagcttggccactagctgtgtgatcttggttatgctatataacctcttgagtctcaacctgttcttccttggcaaaagtgggataatgatggcatctgtctcagtgttttgagacgatgaactggaaaaattgccaccaaccaaccaaccaaccgaaaacactcttgataccatgcccggcatatagtaagtgcttaaaaaaatgctggcttttgtcaatatatttctggcagggtcagtgtgtatgcattgtttctggggttagcatttttagtagagacctgttttttgccaatcagtcagcttcccgtagctttattgactataggacatggttctgtgaatattgaaaaggagtgatggctgccggagagggacgaggaccccaaacaatatgttaggaggtgatgattattaacaagaggcaaggaaatgttgttgccaccatgaagccgtaagggtggaaaacatggccaaggagtgtctggatcactcactcattctgcatttattgccctagtgcctattttgtgccaagggacagagataaaacagaaagccaatctttccacattttcatgtacctccaatactacacaatctgttgcttttaagaaaaggacataaacaagcaaaggcgcactttctgcccagggtgagatctcagtcatagttggagagacaagcaaatgattttatctgcccaggcaaacaagcccaggaagagcatcagaagttaacacaggccgaacgtggtggctcacacctgttatcccaacactttgagaggccgaggcgggtgaatcacctgagatcaggagtttgagaccagcctggccaacatggtgaaatcccatctctactaaagatataaaaagtagccgagtgtggtggcacacacctgtaatcccagctactcgggaggctgaggcaggagaatcgcttgaacccaggaggcaggggttgcagtgagccgagattgcggcattgcactccagcctgggggacagagtgggactacgtctcaaaaacaaaaacaaaaagttaacacagacattgacctgagttccccaaatttatccagactgcctccaatcccggctacccactgcttctctcaagtgtgttatatgagaacgcctaggtggcctggcctgggtgacagcttgctcagatttcaattgtgctcatattttttttttaaatggcagtttcaacaaatcctacccactgatgcattgtttaaccaaatgtcatttctctgcctttctcatttaagtatcatctgttaggtttacacattggtacacccatgaaattaacattacatgtgtttccttttggagctgactaaatttaatttaatttaaattgttttcactgtcagtggccttcccaagctgtggtagcacacgttctgtctccttaaaggcttatcttaactgcatcctgtcaaaaaatcctaggacccacccactttcccctgcagttctctggtctaggggccagctcatgtttaaaatgagcttcctctgtcagttcattcagagaggttcttatttagaaaagtttattctcctgcctcagcctcccaagtagctgggactacaggcatgcaccaccacgccctgctaatttttttgtatttctagtagagacggagtttcaccatgttgatcaggctggtctcgaactcctgacctcaaatgatccacccgcctcggcctcccaaaatgctggaattacaggcgtgagccactgcacaggagaatcacttgaacccagaggcagaggttgcagtgagccaagatcgcaccactgcactccagcctgggtgacagagtgagactccatctcaaaaagagaaagaaagaaaagaaaagtattctcaggagccccctggcttaaatgaagtttccaagccatcgttgagaaatcagggtctctctggtcttccaggtaggtcgaagagtgacctgcctggagctctcaaaccaatgttagggaacttgactcgattaatacaagcaccaagacagcataatggttatcccctcaatgatgctgtaatggtaaaagacaagacgtagcgttcattcatttcacatttatttagagattcgcctatcatgtccatctggtccagtgtgcagccctgcagtgtgtcacccagtagcaggcatttgataattatttctctttttttttctttttctttttttttttttttttttgagacaaagtcttgcttagtcgcccaggctggagcacagtggcacgacctcagcacactgcagcctccacctcctggttcaagcaattcttgtgcctcagcctcctcagtagctgggattataggcatgtgccaccacgcccagctaatttttgtatttttagtagatacagggttttaccatgttggccaggatggtcttgaactcttgacctcaggtgatccacccaccttggcctccaaaagtgctgggattacaggcatgagccaccatgccctgccgataattatttctcaaataagtgataagtccatcctgtccactgctgtcttccccctccacctcacaccctgccccctgccactgccccagggtatagcacactcacaggcatttataattattcatcaaatgaacaaatgactttgtgctggcacatgcttgggaggtatttcaaagtttttacagtgatctcaggctgtgcccgtggaggatcttctagtcactcccaggaagaaacatgacaaagagaccttacatgttgtaggagagaaattgaatgagcttggaatatgcaggtggcttagatttggagggagatgggggccggagtaatagcaaaataacaatttccacatatttgagaggttggtttgccagagaagcagcagcactatctttgaagaccaaattaggacctatggatgaaagcttcgagcaggcacattttggaagcgatagctcacaatcactgctgagcacaagccctgctatgtaaggcactgagccttccatctttggaggcatctaagaaaaaatacccagtggccctgaattacttactcagtaagttcttgtcattaccctacagaagtcttaaaaatacagaaaagcaccaaaggaaagtaaaaaaaaaaaacaaaagtccgcactactcccctctccccacccctgagtttgctttttcgctttgttttgttgttcttgttgttgttgtttgtttttttggtgttttgccttttcttgagaggaagcctcactctgtcactaggctggagcgcagtggtgtgattttggctcactgcaacctccaccccctgggttcaagcagatctcctgcctcagcctcccgagtagctgaaactacaggcgcgcaccaccatgcctggctaatttttgtatttttagtagagatgaggtttcaccatgttggccaggctggtctcgaacacctgaccttgtgatccacctctcaaagtgctgggattacaggcgtgaaccgctgcgcctggacccccaacgttttttgtcttttttttttttattattattattattcaaaataagaccctccctgccttgagaccttgacacatggtcttccttccttccaaagtgacatcctttcacctggctcactctttatgtttcacagctcagcttcaccgtggcttctttggaaaggtctatagacctggtttgcatcagatcacctggccccatctctctcctcccctggccgcccgtacttttcattcattgcatccaacaccttttgtaaaatacgttgatctgttttctccatccaacatccactggactgtcagctccttgaatacagattcaacactggttttgttcatttgggcattctcagtgcctggcagcgtagctgctctgtgaacatttgagaagggaaggaggagggtgggaggaaggaaagagagaatgcctgtattcactgacagtgaaaagatgtcaggagtacattactgaaaacagaatgcatatgacaaagcagaacatacatgattatatataacgtgagtgcataaaactatttgcaaaatgttcactgaacgtttgttaacaatggtgatattttggcactaatatctggggttttttttacttcatattgttctgtatgcttgaattttctacagtaagtattatctttgtagacagagaaatccaagaaacaatcagaagcacctaagaagtgaagctagaacagagttcgaaacgaggtcctccttggttttctcccaggaactgcagctccccaagtggtgtggtctccttgtctgtgtatcagagccccggcctgaggctgagcccagctcacatcattgcagggagagggatctattgagatcccagtgcatttgaggtgctcgttgttacccactgttgtgaaccctgttgcatgtgtgtttctatgtccatttattcaacaggaatttactgtatgttccaagtgctcctggcattgtcaccagacactctcctaggccaagtaaatgaaacaccatccctgccctctaggagcaaaaccaaatgttgtgttgactattgctgctcgttgctgttgtgatcaaccggagatttcattagcagtaggcttgacgaagaggaccactgtgcttagagatgtagtccttatatttcaagaggcaggatgacagagtatcctggaatcagtttgcttggactcacatcctagctccattacttgctagcatttgatcatgggcagattacactctttctgtctgcctcagtttccccatgtgtaaaatgagaatgatagcaggacctcataggtttgctgcaagaactcaatgagatgatatgtgtacagggcttggccgagtgaccagcgcaaagtaaatcctacccacatgagcttttataattattcctgtctgcattatgtgacgtgacagcattaatgtgacaaatgggaaacgatttggagaaatgtcccttttttaaaagaaggcacctgcagaacatatttatggtttatgatcaggaggcagcgttaatggcccataatgtgattactatgaggatttttattaggaaaattccaaccaatttggcattaattaatgtactgttaactttagagtgttactcacttaatccttggagagttggagaaaataaacctgttgtcaaaacccttcctctgagaagtaaataagagttgttccctcctcgagaggctccctttgtaataaaaatagatgagtcgctgcgtttttccatggcagtatttattgagcctgcgagtcccttcaagagaggagaaacgagggcagagatgaaaatgtcaagcgacaggaaggctcgtaggagaacttgcacacagcagcctctgggtcaagagggcagggagtacagatagagcaggctttctggacacacgaagcacagagtgcaggatatgggggcccctgcctgtctttccaccccatgaagcaaggcatcccacaccaccccatctgggaatttcaaaatgtgtcctgcctgccacccactcctcaaccatggataacaagcctgatgaaagggcttgttactctcttcaattgcagtccttaaggtggtacccaagaccctgtgtgatgcctctgctgtcggcccatcctcatcttctgcacttcctcttggcctcagttccagccacactggccttcctgtatgtcttctccttaccatactatcattcgtgacaggccctttgcatatgctgttccctccacttagggacacttttccctcttctcttacctagttaactcctcactcaacctgtcaattgtagtctaaggggcacatccctggcctccttgagttgtatattagtctgcctgggctatcatttaaaaaaaattaccatagaccaggtggcttaaaaaacaaatatttgtctccattttggaagctatgaatctgagatcagggtgccagcatggttgggttctagtgagggccctcttcctggcttgcagatggccgacttctcactgtgacctcatgtggcagagaaatagcaagctctccagtgtctcttctaagagcaaaaatcccctaaattcaaggctccacccttaggacttcatttaacctttttgtttgtttgtttatttcagaggcagtcttgttttgccacccgtgctggagtgcagtggtgcaacgtctgcctcctgggttcaagtgattctcctgcctcagcctcctgagtagctgggattacaggtgcctaccaccatgcctggctaatttttgtatttttaatagagacaaggttttaccatattggccaggctggtcttcaactcctgacttcaagtgacccacccacttcggcctcccaaagtgctgggattacaggcatgagccgccacactcggcccaacttcatttaactttaatcacctccttaaaggccacatctccaatacggtcacaggaggggctaggccttcaacatattaattttcgggggacacgattcagtcctagcaaatcctgtctttggaaaaggaaaggatacctcagcatcgagaaacagaagcagaggtttcgtgagattaaacaacattttggcttcacagaaagggtgattggaggagcatagagggaaatgaggttggaaggaggagaagagaaaatgtagtcatttgcaaatcattatttaaggcaacaataatgatggccaccatttcattttctgcataccacatactggtcctggagatatttatgtgtttattatctgtcttctttctcaggagaggctgcttctcataagcaaaagctcttgtggcgtgtgcatgagtctatttttcactcccagaatggtgcctgcctggcatatcatagacattcgttccagttacttctgctgggtagcaaacccccccaaacttagtggcgtaaaacaccatcacttgttatgctcttggattctatggatcaggagtttggaaagagcacataggagacaggggaaagacataatgccccaggttcagagctactgctctgtactaggcacttctctgagcataattccatccatcagttcctccctatgaaggagggtcaatatgtatccctattttactgatgatgagctagaatctttgagaggttatatagcttgcccgacctcccagagttaatgggggaagagccatggtttgaatgcagatctgtccgatttcaaaacgaaacttctttccactctgctatgtagcctttccagagtggctacctgtgtttgccaaaaagtgggaggccatcttggcaggaagccttctgcctcccagggagatgagtggttctcaaaccatgctggtcccctagggggcactgggaaatgcaagtgaggagaggctgttatggggactagggatttcaaatgccctgtaatcatgggataataccactcaaagaattgtctcttcccaagtgacagtagtccctgttgagaaatactgcttgagaagggaggaggatctgtgaaatattgatctgtgctgaaaccctctgaaaggttgctcaaatggctaggtgcggcagatcatgcctgtaatcccagcactttgggaggctgaggcgggcgaatcacaaggtcaggggttcaagaccagcctggccaacatagtgaaaactgtctctactaaaaatacaaaaaattagccgggcatgggggtgggcacctgtaatcccaggtactcgggaggctgagacaggagaatcgcttgaacccaggaggcggaggttgcagtgagcagagacctcactactgcactccagcctgggcgacagtgcgagactcagtctcaaaaaaaaaagaaaagaaaagaaaggttgttccaatacaatagaagctcaggggttaaaagtccccattttagtgtctgacagatggagggttgaatcccagttctgcagcatattagctgaccaggtcaggtaactactcagagtctttatttccttatctgtaaaatgggaatagtcagaatgcctccctcaaaggtctgctgtgaggagtaaatgaggtaaggtcttgtattggttcattctcccattgctataaagaaatacctgagtggataatttataaagaaaggagttttaattggctctcagttctgtgagctgtacaggaaacatcaaggcttctgcttctgaggaggccccaggaaacttacaattgtggtggaaggtaaagggggatgtaggtatgtcttacagggccggaacaagagcaagacaggggaggtgccacacacttttaaacacgcagatctctagagaacagcatcaaaggaatggtgctaaaccattcatgaaggatccacccccatgatccagtcacctcccaccaggtcccacctccaacactgtgggttaccattcaacatgagatttggttggggacacagatccaaaccatatcaagtctgttagaaaatgctcagcccaggacctggcacacagtggccacattgctattatcataatagctctttcatccttgatgcacagaaaaggtaacatcagcaggatggataagagcttgcaggccacagcgcagcgttttcacagatgatatgttacaggccaagtgactgggacccagtgaattgcagtgaaatgtaccatacaccatcaatatctatcccaccagtttccatttattgagcagtatatcattagaatatcccagggctctgaacaataaaatcaataagacggttcagtcatgggctgttctttaataactccagacttgaatggggtcgggggaagtcagtgagcaggaaaatgtcctgagtgcttggtcgggggtggagggagacattttctcagagtgggagaaaaataatgaatgaggtagccttcagtctctggtggagtgagtggccatgagcatttgaggcaacagccaaagatatgtttgggtaaaattctttccacctcgagagatgcgttttttaaaagatggttgaaaagaaaagaaaaggtgtccaaaatgtggttctcaaccctgactgcatgtcagaatcacagggggagtttcaaaagagtcccaatacttgcgcccaccaaactaattaaattagaatttattggggtggggccgaggcatgaagatgtttttctaaaaaaaagatgttcagatgattttaaatgtgcagccagggttaagaaccactggcctaggcaaacatgagcctgtatcacaatcacctggagagcttcttacaacacagagtccttgtctcccacacccagagtttctgattcagaaggtttggggttggggctgaaacttacattgctaacaaattcccaggtgttgctgatgctgctcatcagagaccacatctagagagcttgtcctagaacagtggttctcaactgggagcaaattttgcctctccacgccctatcccccaccagggggacacacatcaatgaatggagacattttaggttttgtcacaactaggtgagtgctactggcacctagtgggtagatccagcgatgctgctaaacatcctacagtgcgcaggacagtcccctccacaacaaggaattatctggcctcaaatatcaatagtgccaaggttgagaaatcttgctctaggggagacgatagttttgaagccattctgagaacatgaggctttggttcccatcaagcttagcatgggagcctgagtgaagatgaggatgccagattcttgctagccaaagcctggtcatagagcatggtatttgacgtcagaacagtgcgtatcctaatttcttctccacctcttggctctgtgaccttgggcaagttcctcaccctctctgagcctgggatgattatctataaatggggataattttcatttgcagcattgttacaagaggtaaaagcctgatgagtgaaagaaccacatgaatgttaagtactcaacaaattagagtaagaatcaaaaggacagtgtttctccacagacttctgtctctctagcagggaggtgctgtcccaaaagcccaccccaggagactcctgacaaaccctcctgggcccctaaagcaagtgggagccctcatccagaaagatcaaaacattgtctggacctttgggtccttgcaggatggatggggctgcttgagtatccccctgccctttgcctttacctcctctcatttgtttaacaaactcagcacatcctagtttggaagcaaagctcatggagcctaattaacattccccaagcttccttcgcatccctccagccttcacaattctgccatatccacattccacctgccatattattcttgtagtatttttactgcaatagactcgcctttatttttatgtaagcacattttattttaaaagtaattttgcatcatggccataagtggaaatcttgctgtcacttgccatgaggagacagcaacaatgcgaagaaatcagtgaaacaaaaacaatggcattcagtgctagccgggcactcctgttacctgctggagatgccagttctgggggcaggattctgctttttggaaaaggaagttcagtaggggagtgctgctgaagatttgtttgcattgacctgagagtttgctggtagggtattcaggagaggtgggtaagaattgaaaaaagattcacagtcccccctgactcaatgccattcgatgtgagcagcatgtgaatcctctcttgggtaactctgacatcgcatttaagaacacactgggcaaggtggctcacacctgtaatcccagcactgggaggctgaagggggaagatcacttgagcccaggagttcaagaccaacctgggcaacatagggagaccttatctctacaaataattttttttttaagatggagtctcattttgtcacccaggctggagtgcaatggtgtgatcttggctcactgcaacctccgcctcctgggttcaagcaattctcctgcctcagcctcctgagtagctgggattataggcgtgcaccaccatgcccagctcatttttgcatttttagtagagacagggtttcaccatattggtcaggctggtctcaaactcttgaccttgttatccacctgcttttgcatttttagtagaaacggggtttcaccatgttggtcaggctggtctcaaactcttgaccttgtgatccacccacctcagcctcccaaagtgctgggattacaggcgtgagccaccacagccagcctacagataatttttctaaaaaaattagatggacatgggatgcatgcctctggtcccagctactctggaggctgaagagggaggatcatttgagctcatgagtttgagaccagcctgagcagcatagggagacctggtctctacaaatatatatttaattagccaggtgtggtgttcatgcctctagtcccagctactcagcaggctaaggtaggaggatctcttgagcctggagtttgagactgcagtgagccatgatcacaccactgcactccagcctgggcaacagagcgagatcccgtcttacgaatttaaaaaagacaaaaacaaaaccacaatcgctatagtcctcaggatcaggtccctgttaaacactctccagccatgtgattagttacaagttcaagtgtgatgggcgaggtccgcggagtcacaccacatgaactcctccacaatcaggctgtatggctttattttgcctcatttatagctgtgcttacagcatcacttagaggtgagttctctttgacagatgaggaaactgaggcatgagaggcaaagtgacctcctaataaatggtagggctgggatgcagacccaggctaaccccttctgtggaatagctgagttaggaagtgcaggatgggctcctaaaaataaaacattacaaatagtgactttatgatccaccaattccatttctgggaatatactccaaagaattgaaacagtgactcaaacaggtacttgtaacccatgttcagagcaacattattcataacagccaaaaggtgaaagccattcaagggtccattgacagatgagtggatcaattgtgctatatgcatacagtggagtattacttgccctgaaaaaggaatgaaattctgacataggctacgacgtggacaaaccaggagggcactgcgccaagtgaaaggatccagacacaaaaggaagaataatgtctgatgtcacttacatgaggttccttatcaaattcatagaggcagaaagtagaatgaagctttccaggagctgaaggaggggagagtgggaagttattgttcaatggatagaaagtttcagttttgcaagatgaaaagagttctggagatggatggtgataatagttgcacaacagtgtaagtatatttattatactaaactgtaaacttaaaaatgcttaaaataggccagatgtgtctcatgcctgtaatcccagcactttgggaggccaaggtgggctgatcacctgcggtcaagagtttgagaccagcctggccaacatggcaaaaccccatctctactaaaaatacaaaaaaattagccgggcgtggtggtgggcacctgtagtctcagctcctcaggaggctgaggcaggagaatcgcttgaacccgggaggtggaggttgcagtgagccgagattgtgccacagcactccagcctgggtgacagtgagattccatctcgaaccaaaaaaggctaaaatagtaaattatatgttatccatgtagagcatccttaattcaaaaatccaaaatctgaagtactccgaaatccagaacattttgggcacataatgctacaagcggaaaattctatacataaatgcttaatgcaactttgattaatgcacacaattatttaaaatattgtataaaattactttcaggctatgtgtataaagtgtatatgaaacagaaatggattttgtgtttaggcttgggtcccttccccaaaatatctcattacatatacacagatacttcaaaatctgaaaaaattcaaaattggaaacacttctggttccaggcatttcacataagggatactcagcatgtattatcttggactacaacttttttttttttttaaagagaagtgcaggatgttcagaggggctgtgacagggaactcaaagaagggatgggggccaggcacagtagctcacacctataacaccagcactttgggagtctaaggaagggaggattgcttgagcccaggagtttgagaccagcctggacagcatagcaaggcactgtctctaccaaacatttcaaaattagcccacatggtggtggtcacctatagtcccagctacttgggaggctgaggtgtgaggatcccttgagcccagaaatttgaggtggcagtgacctatgatcatgccactgcactccagcctgggttacaaagcaagactcaatctctgaaaaagaaaaagaaaaaaaagtcattaaaaatattttttaaatgaagggatggggaagagagtcagggagggcttcccaaggaagggtcatttctcctgagacctgacaggtgctggcttggccaccttcatccttggacctatgttctttcagctcccctctgtggaccccatgacccccagttcacatcccctccacccctctcttctcattaagctgggtgggaggggacctggtggccccgcatgagcagcagctgcggtgcagagcagtctgggccgttgactgattcctcccagcggggcttggtgctgctgagcaagggtccacagaccacccaaaagcctcaaggaaaagtgggggtgcctagcctccatccagtttgctggatgagaggagacagccatgggcaacctctcaggcctgagtcttcaactttgccccctcatccccaccaccgggaccctgtatgtggatgaagctgtctggctaaatctgtcagtcagaaatcattcattgaggcctctcccccaaacttagctctgtaccaggtccaggggcaaggctggcatcctacaagagataagagcatgaccttggctcatagggaacgaactgacaggtatcaagagaaccaacctgggctaggcgctgtggctcacgcctgtaatcccagcactatgggaggctgagacagttagatcacctaaggtcaggagttcgagaccaacccagccaacacggtgaaaccctgtctctatcaaaaatacaaaaaatttagccaggcgtggtggcaggtgcctataatcccagctactcaggaggctgaggcagaagaattgcttgaacctgggaggcagatgttgcagtgagccaagattgcaccattgcactccagcctaggtgacaagagtgaaactctgtctcaaaaaaaaaaaaaaaaaaaaaagaaagaaaagaaaaccaacctgactctcaagggagtacagttctctatgtggcaatgctaactcctggatcgggttagaattccagatgattcagaaatttccagaaatatccagaaatttcatctccctcatttgggtttttccaaaataggggttttggagtctggcacacccaagtggtggtttccattctcgcaccaactgctaacatggcacctgcctcctgagaccttgggacaattaaataatgagatcacatttgactggtgcttaggccataatgagtgtttgtttatttctgatttatttatttttagagacagggtctcactctgtcacccaggccagagtgcagtgacaccatcgtagctcactgcagcctcgaactcctggactcaagcagtccttctgcctcagcctccagggtagctggaattacagacgcaagccaccatgagaagtatttgacgcaagcatgataagtatttgacatgcatctgatagcgttactagtctttgagattctacaggaccaaggaaagaaattgacttgcccaggcccccgtggctggttcacagcagaagcaggaatttgaatccacctcgttgctctttatccagtatgcttgtcgccacacagcaccgccttttctaaacccatcgagagcaggggattctttctgggcaccagacagctcccaagtttaatcaccagaaaacctcttttaaaatttcccactaggataaaggcatctcccacccagatctaacaaagaaccttgagcgtgcaggttttctcccccagtaagacgaatcccgctcctctgcaacgcgcctgctgccgctgtgaaacttttcctcatctgtgatcatgaatcaccctggaacccagcggggtcagagatggacctctcttcccactttgtaaatgaagaactgacaatcagagaggggcggtgtctttcctaaatccacacagtgcaaggttgcattctacaccccagctctgaatcccagtcacaccttcccaggcagcatagaagctgggctccagctgggagcttcctaacccaagcctcatttgcatacaaccttgtttccatgtctctgtgttcccaagacccaactaaccctcttagttggaagtaagtcagaaagtgccccttgcagcagccggaagcagccctttcagagtataaatagaatcgagggctttgttggtagagtaactattccagtcaagcagctccttcacatttgttattaattgtggtctgggcatacgctgcagagggaaattccggttgtagatgtttatttacaagcagcaggctctagagtacacacagccctgggagtcagtgcagctttgaggtagaactctggagctgggcctgttggttaaatcctgatcatcgtggatgagcagccacatagaaatgatggctatgacagtataatttattgaggatttgctagatgccaggcactgtgctctctcttctggatgtgaatgtccatgtggggtggattctgtgattatacatacccattttacagatcagaatactaaggcttggagagattgcataaaaggtccaaggtcattcacatctgcctgaccacaggtcatgttctaaacccctgcaccttgctttctcctcccaaatcattattgcaggacactgctaacatgatctttgccagcaccacaacagtggaacagcatgttgacccttgcaaagcaccttcatctctgctatgtctttggagcccaaggattacatagtcctcgtttgacccacaatgctgctaagaaatagggaatttgagtaacagaactaacacagcacagctatctactgggggagctctccgggaccccccatcatcctcagccttcacacctgcactgcaaaaatatacttgatattctctctcgataaacctggcttgttaacattcatctgaagtcagcttctcctgctgcctctaatcactctgatttttccacttattttctgttttgtgccatgggaatctgattacattgttaaattcttttttttttttttttttttttttggagctgggcactgtttgggttttggtctttcaaagagttccgtgttcataaagacccacatagctctgaccacatgtcattgttatatctgtcctgcagctgaaagctgacacatttcctctagggacggattttcctctttttgaaatgaggacagtttgattgagcatggtgaccatgacagggctctgggatcacagactcactccattctcagctcagctactttataactgggacctctccaagcctcagcttccttgtgcctacaatagaaagataatagctctgttttcatagcagttttgatagaaatgaataaaatcatgcacagaaattgcttaacacatagtaggcactcagtaaatggttgatctttctcctgactcgctgtcttccccctctgccccccatccccatccgcatctctatttctccttctctgcatgtctcctttctttagatatttttgttccttcccacccaccccttccccagaatagctgtactcagaagagctctgggttttttgttccccattctctttgcagctccccagactaactgtctgacccaaagatgactttatatttaagccaagggagctctcttgctggagtgatttgtctttgatttcacaggactctgccctttctccaaaagaaaagcatccatgtctgtgtctgtctgtaaatctgttctgccttttaaaactctaaagagaagttgtaaaagacctcagcatcaacatccaagccctttttaaagaccagcatagagtccttacacctatcctctatatcgcaaatctccacttctgcagagagcaagtggaaatatcagggctggctttggactcggcaacactcagcttcccctcccacctctgtcctcactcactgtgtgacctgggaaatgtgctgacctctctgagcctcagaggatgataacgcattcttcccagggtcaaataacaatggatgcataggaggcacttaagaaacaccagctcctctggatcagagcagccactcttcttcagaacacattcattaatttgctcattcaaaaactatggcaaaagatgttcatggctacagggaaaagcaagggttaatctcaaaggccccatacaccttaagtggatggatggtgtttgggatgataagctcttggaggctttgctggatgcatagttggagggtttgctgtatgcttggatggatgaatggttagatatggatgagtggacagatgagtagttagatttggatggatgaataaatggatgtatggatgaatgggtggagcaatggatgaatggttggacttggatggatgaataaatgcatgaacgaatgggtggatgggtggagggatggatgagtgggtggatggatggacagataagtggttggatttagatggatgaataaatggatgaatgggtggatgggtggagggatggatgaatgggtgggtagatggatggacagattagtggttggatttggatggacaaataaatggataaatgggtggaatggtggatggatgaatggatgagtggttggatttcgatcgatgaataaattaatgggtggatgggtggaggaatagatggatggatgaaaagatacagccttattaatcacctagaatcagcatctcatctaatacagaaatactggaatacctatgttagtccttaaatgcatgcctacctgcctgcaataactaacttacaaagtatttggttagcaacaagcaactaaaagcaattgttataaacttttccttccaaactctaggtatgatcatatggtgtgtattagtggttcagggcatgatctttggaatcagacctgtgtttgaatctcagcttaactaattaaagcagtgtgaccttgagccaatcccttggcctcttctaagctgtggtttcctcatttggaaagcggggataatagcattactttgtaggatcattacgaggattaaattatctaatgaacgtcaagggctggtcaatgctcaataaaaggtattgttattttactgatcccaaatgtgccttcctgtaacttttgtttcaccgagaaccagatgtgtgtcagatactgttcaagtgttgcagattctgtggtaaacaaggccaaaatagcccctcatctcttggagctaatgttctagtggtgtgttcagataataagcaagtaaacagataaacaattgcagacagtgttacatgctatgaagaaagttgaaatccggtgaggtgaaagagagtaaaagaggtgcgggtgaggtgaaagagagtaaaagaggtggtggtgagtcccctttttggactgtgaactaatgacaagaagatgcagccacgcagagatctggggagagggcgttccagatcacaagaagccagggagaaggtcctaaggcagaaatgagcttgtttgaggaagagaaagaaggccagaggacaagatggaatgtgagacccaccaatcgagggcagagagatctgagtagttagatcacaccagccatagaggctgtgtagtgtgatttggatattatctacgtcaatcttgtcttgtctcctggaactacgtagaaagagcctcgttcattcagcaaccattcagccttctgatgacagcttagactcccgatgtcctaatcccccagccccacagtctccatctcagttctcccggtttagatgctgggacacttgcagctactaccctgacaatgtcctgggtcccataaacccagaactcttaagaaattgggttggacccaagtgaaatcaggctgaggaaagctaggagatttctagttgggattgtaataaactaaactaggaagctgtgtttttatctgaagcaagagaaagaaagagaggagtctttgaggctgattttcggaataaaatatgtctgggactatttatccaagtggatgtggtataggatttggatttaaaagaacatgatagatgacagtgggtgatctgtagccttactgatgcaggagctcaaggcaggccacaagcacctggaccctcatccccccttggcaatgtactccacattagttttcttctcaggcaacctctctccgtgtgggaacagaaaggctcatagaatcttctagtctcctgtgtaacagaaaaagaacctctcaccgggcacagtggctcacgtctgtaatcccagcactttgggaggccaaggtaggcagatcacctgaggtcaggagttccgagaccagcctggccaacatgatgaaaccccatctctactaaaaacacaaaaattagctaggcatggtgttgcgtgcctgtaatctcagctactcaggaggctcaggcaggaaaatcacttgaacctgagaggtggaggttgcaatgagccaagatcgcaccactgcactgcagcctgggcaacagagtaagactccgtctcaaaaaaaaaaaaaaaaagataacctctcttatgtagtagttctaacaaaagtctagcattctgtcttattggttaattaacttggttgagtcatatgttcatctctaaacaatactgtggctatggagaatcagcattcccattggccaggcctaagctgtaggtccacccctgaaattgatgatgaagttaggtcttccccacccatatggactaagaatagaggagaggaggatgatgccacaaaaggtattggatgatgaagtttcagtcatgcaggacaagtaaatttaaagatcctgctgtacaacattgtattaataggcagcagtactgtagtgtacacttaaacatttattaagaggggagatttcatgctatctgttcttaccaccgttaaaacaaacaatatattggatgctattagaagaagggagaatgaattctggacaggcaaaaacaacacatgtatcttacgttcactaactcgaaattaactgcttcttcctctgtcattcagagatacatctcttatagctctcacctcctcctgccttgttcagtagcttaatatgtgtccatgtgtctcttccagcatttttaagctcctcagaatggaaactatgtcgtaacaaccccagggtcccctaaccccttttgtgcctgacagtgtgagaatctaagatgtgctttgtggcattgaattatgttttaaggcccaatttgatgactgtgcccctaaaatagtccccaaaagaagcaccagagaaacttcccacccctgcaaaggatggcagagcctcactttctcctctctgttctcttggattttccccaggtaaagccaacaagaacgtgcagtgggacgaggactccgtggagtacatgccagccaacccggtcagaatcgcctttgtcctggtggtccacggccgtgcctctcggcagttgcagcgcatgttcaaggccatctaccacaaagaccacttctactacatccacgtggacaaggtgagaggcctctgtgatcaccccttgctgggctttcttcggggtctgtccgtccctccctgataccctccttctgcattgctagtccagactgcctgctttcagaaaaggcttggaagctgaccagctgcctctccacagagcgtgtggccctagagtgctgtctctatgtgtgtgttggtttcaaagtttccagctgcgacttacaattttgtccataaatgataaatgctgtttttggggggttttttttcttttttttttgatggaatgtcgctcagtcaccaggctggagtgccgtggcatgatctccgctcactgcaacctctgcctcctgggttcaagcaattttcctgcctcagcctcccaagtagctgggactacaggtgcatgccaccacacccggctaatttttgtatttttagtagagacaaggtttcaccatgttggccaggatggtctcgatctcttgacctcgtgatctgcccgcctcagcctcccaaagtgctgggattacaggtgtgagccaccgtgcccggcccctaaatgctgtttcttacctctcccctctacccaatgccctctgcctgcctctcacatactttgtgggaatagcttacctttattagtccattttcatgctgctaataaagacatacctgagactgagtaatttataaagaaagatgtttaatggactcacagttctaagcagctggggaagcctcacaatcctggtggaaggcaaaaagcaagtcttacatggcggcagcaagagagaaaaatgagagccaagcaaaagaagtttcccggtgtaaaaccatcagatctcatgagacttattcactaccacgagaacagtatgggagaaaccacccctgtgattcagttatctcccactggatccctcccataacacgtgggaattatgggagctacaattcaagattagatttgggtggggacacaaccaaaccatatcactatcccaggagtgcgtacactttttctatggaaggcaagatagtacatattttaggtgttgcagggcacatagtctctgtcacagctactcagcactgcccttgtgctaaagcagccaaggagaacatgtcaacaaatgagcatggctgtgtaccaataaaactttattaacaaaaacctgcatcagccctgctgactcccgagctaccttgtccctgaggtttctattggtgaaacaattatgcctttagtcaagaaggcaaagggggaagtcttgtccaaaaggtcggcttctagcagacctgtgagaggataatggaggagcaatcagtaggagtggggacagaaaacaaaaattctgcctccgaaatatacatgggtttagatggagccatatttcccagcttgtcttcctcagaccccatgcagctgtcatgtatatgaatgcaaagttggccaggtgcagtggctcatgcctgtaatcccagcactttgggagaccaaggtgggcggatcacctgaggtcaggagttccagaccagcctgtccaacatggtgaagccccatctctactaaaatacaagacttagctgggcgtggtggcgcatacttgtaatcccagctacttgggaagctgaggcaggagaattgcttgaacttgggtggtggaggttgcagtgagctgagatggcaccactttgttccagcccgggtgacggagcgagactctgtctaagtaaataaataaagcaagactccatctcaaaataaaataaaataagataaaattttaaaaatgtgaagtcccaggcaccaccagcccaagcctagtgaaccattagctcagaagtgcggccagtgaatctgcatttcaaatagctaatttgaaatgtaaaaaataatccaagtttgaattgcagtacagaaagacactccagtccaggatcatttacttggcaaaggccactgtgctcagaagtgcccaaccaggagggaagacacagagaggggacaggggtgaggggcatgcctgggtattttctaggccactgactgtcatcaccctttctctcctgggaaaagcgctctaattacctgcatcggcaagtgctccaggtctccaggcagtacagcaatgtccgcgtcaccccctggagaatggccaccatctggggaggagccagcctcctgtccacctacctgcagagcatgcgggacctcctggagatgaccgactggccctgggacttcttcatcaacctgagtgcggccgactaccccatcaggtaaggcagccaagggccccaagccagtcttgtctgacgtcctgctctggctggtcatggctgggaactcacgaggcagaaggagactgatgcatagtctccacaggatcgctcaggataggattctgattggacctgagaatcattgattcattcactcattcattcatgcattcaacagatagagactgagcacgtggttttcccagctctattagctgatatgccagtgcactaaacagacggaaactccaacccgcgtggagctttatattagggttctctagagggacagaactaacaggatagatgtatatataaagaggagtttattaaggagtattgactcacacaatcacaaggcgaggtctcacgatgggccgtctgcaagctgaggagcaaggaagccagtctgattctcaaaacctcaaaagtagggaagcccacagtgcagtcttcagtctgtggtcgaaggcccaaagatcccaaagctgaagaacttggagtctgatgttcaaaggcaggaagcatccagcatgggagactcagccagcttattccttccacgttctgcctgcttttattctggccacgctggcagctgattagattatgcccacccagactgagagtgggtctgcctttcccagtccactgactcaaatgttaatctcctttggcaacaccctcacagacatggccagaaacagtactttgcatccttcagtccaatcaagttgacactcaatagtaaccatcacaagcttccattcaagtagggagacaaacaacaaaataagttaaatgatatcttagaaaaataaagtaaggggcaaaagtaggggacagttgtaattttaccaacggtggcctggaaggttttcacggataagaacagaagaagatgaaaaagagagtcacgcctacagagaaagtggtccaggcaggggcaaaggcaggggctgagcccagaggtgggtccatgcctggcctgtgcgaggaacagcagggttcagtggagctgtaacagagtaagtgaggggtagcataacaagagagataaagtcagagagtaatttgaggccagatcgtggtgatcctagaatttggctgttagtccaagcaagagggaagccactggcatgatactttgaatgatattctgaacggtatatatatctatatatatatatatattttggagacagagtctcgctctgtcacccaggctggagtgcagtggtgtgatcttagctcgctgcagcctccacccaccaggttcaagtgattctcctacctcaacctctgaagtagcatagagatggtgtttcaccatgttggtctcaaactcctggccccaggtgatccgcctgccttggcctcccaaagtgctgggattataggtgtgagccatcgtgccaggctgttattttctcttgagagggcagctttttcctttgactgtgttttccatctggatttgctgacaagggtgaaaaggaaagtggatgggggtgaagagggggatcttcctccctctgatggcatgaggccatagggttcagcattcccaggagacctagatgaaggggtcctaaaaaaataaaacttttattaaggcaactttcaaacatgcacaagagtaccaagagaatagtgtaatgaactcccacgtggatgtcacccaggttaattcatggccattgttcttgtatctggactttcatcctcttcccccaacagtgggttattttgaaagaaatataagatatcacagaattgtatctataaatatttcagtatatatctagaaaagataagatctcttttttaagacagcatcacaatgatgcttatacctaaaatattagcaggcatgttttaatggcatcaaatatctaggtcacatattcccaagagtttgagttttgaatcagaacccaaacaaggtacaagcatggaaggaagacctacctctctttaaagctagaagtggctgctttcttcttcacagcttggtcactgggggtcttcttcattcctaggcttgggggcatcccaccatctgctgggagaccctagactgcagaaggtactggggaggcacaatctctggtcagtttgaatggggtacacctgacatccttgaacctgagaaaaatgacaggcactagaaagacaactgttttcttttgtccataagacagagggataaacgggaatggttatagaacattgctggtagaattttacttaccacaattttgttcatttgttcaacaaacatttactgagcaactaccgtgctacattcgaagtagtgcattttgtgaacaaaagtgatgcagcttcctgtacttctcctctgctcatggaatgtgtatcctagctgagaagatggagttagatgatcatgccaaagatacatcatgcaaggtgtgaacaagccataaagcaaggaagatgtgggccgggtgcagtggctcacacctgtaatcccagcactttgagaggccaaggcaggtggatcacaaggtcaggagttcaagaccagcctggccaagatggtgaaaccccatctctactaaaaatacaaaaatgagccgggcatggtggtgcgtgcctgtaatcccccctacttgggaggctgaggcaggagaatcgcttgaacccaggaggtggaggttgtagtgagccgatatcgcgccactgtactccagcctggcgacacagcaagactctatctcaaaaaaacaaacaaacaaacaaaaaacaacaaaaaaaaaggaagatgtgggtgtggagaaaaactcgagggccataagcaggaggtcagaaaggcctctgaatattcagctttgaaccgagacctagaagacaagaagggatccattgggagggaaataagaaagagatccttctatactgggattcctagcagtggcactgctgatgtttggggatggataattctttactgtgggtgccatcctgtgcattgcaggatgcgtagcatcatctctggcctctacccactagatgccaggaacacaccctgcccacttttgccaaccacagatgtctccagacattgactcgtgacctctgggagctaaaattgtctccacttgagaatcaccgtttcttatagagggaacagcctgggcacaatgtagcacagaaacaaacttgttgcgtttgagaaatttaaacaatggatagagtataataaaagaatgaggagaagtgagtttagacaagtacatggcaaggaggggttagaacattccctctccatcttccatgaagggaccgagtttggaaatgtcccaaaatgctgagcatagcagctagtgtggcagacacttgtttcaacccttacaacaaacctgttttacagaggggcaaactgaggcccaatgtcatgtgatgaatgcatggcagagtggggattagaaccagtttcgtctggttgcaaagttggtattccttctggcttttagtcggcctcttagggaaatcagcagaactggactggcaggatggccccaggccaccttgaaagcacagaaggaaacagtcccaccccatgagcttgtggcggggtggagtagtggctggactgcctgcagcagggatgtccaggatggtcctgggaggacccccattgtctgttcctcagtcttaggggctgtgctcaaagttcccacattcttccttctctggattcccagtggaggcctcagaggtcatgccagcctaggttgggggcccgcattaagcccaagaccacttgaggccaggtaggcatgcgcattgctgccccctagaggccattgttggcttgctttgcgtggccacctcccctaaagagtccagctcggctcagcacccgggagggtgagtgcctgcactctcgtcaaactgcttacggctcgaatctgagttctgccacttagctagcagcgtgaccgcgggcaagtaaatccaatttctgtgaaatcaggatacaataatagaacctagcagcctgccggacacttggaaggtgctccatgaatgtcagccatttatacgtaaggtacatccaaggtctcatcttgtatctctgagaggcccagaaatcctttctcaggccatgcgtgcaacctattttggggttcagaaaagagagttgtcttatttgtggcttttttgctttagtgccccaggtcactctgtgtctcttggcctttctcatcatcttcctctacttcactgatctcatttccatggtgcctcccacgaattcctttgcccactcttctttgccagcctcatagccagaggcactttatgcatcaagcactgctggttcctcttgctgttgttttcatgaagttgccctacacaaaaacatatgaattttgcagatgaatggtttcatcctgggcaatgctgataggttttcagtttccatctgccgccccatctgtagcttccaaaaccactacttctcccatcccagaaagaatgagcaaacttaggagtcttctcaaaggggcggtagtgcccaagtcaggcacttctaagaggcactgaaaacttgggggatacttaagggtccagccagcccgacgtagccactgtgagctgctctgtgatttgacgtcacctccctgtgtcccctgcacaaccctcactgtggggggtgggggggtgtgggcagattcttcctctcttagatattaaagatgcactggtgtttactggtcactagccttgtttaggccctggacgcagacatcctggtttcagattctgccccaccaccaactgggcaagttgcttcaactttctgcatctcaaattctctaccttaaaataaacacaatattagtgcctatttcggagggttcttaggaagtttcaatgaaatcttgcatgataaggacctaccacagcgtctaatgacagaaagtggttgataaatgcccaaattactccatggctataagtaactgtgggacttgagttactttcccttttctctttgatagagttaaaagagtagcaaagtatttcttgaactcacatctctgtcaaaagagggaaaagtgggccaagcacggtggcacacaactgtaatcccaggactttgggaggccaaggcaggtggatcacttgaggttaggggttcgagaccagcctggccaacatgatgaaaccccgactcaactaaaaatacaaaaattagccaggcatggttgtgcatacctgtaaccccagctactcatgaggctgaggcatgagactcacttgaactcgggaggcagaggctgcaatgagccgagatcgtaccaccgcgctccagcctgggtgacagactgagacgctgtctaaaaaaaaaaaaaaaaaaaaaaagggtgggaaaagcaaagatagacgtgagactgtttcaagaaaaacagaatagatccaattcacttgtggacatgaagaatattcctgaacttggcatacgcaagctgagagtgtttagagactctaggtgctcctgctctgctgttgacatgacatcctggtccacgtaggctccagctggagctggttgtgtacccagcacgtggatgaaagtggaaaatggatactttcaaactctgaggccctgctagatcttgaatcctcgaaaggtatgatggttttattcgtatgttctatttaccgaggcaaggaattatacctggcctactttagattggctgcaggaagagatgaagccaatagcactttgccctgtttcttggcttggacttgtagtaagagacctcggctgggtgtggtggctcatgcctgtaatgccaccagcactttgggaggccaagatgggtggatcacctgaggtcaggagtctgagaccagcctggccgatatggtaaaaccccatctctactaaaaatacaaaaagtagctgggtgtggtggcgggcgcctgtaatcccagctacttgggaggctgagacaggagaatcacttgaacccaggaggcagaggtggtagagagctgagatcatgacattgcactccagcccgggcagcaggagtgaaactccatctaaaaaaaaaaaaaaaaaaaaaaaagagagagagagagacctcacgcctcacactgtgtcttttcctaagtccggtgtcttggggcaaatcagatgtaaagagaggagggttgagtgtgtccttggcccctcccggggttcacattcagtctgtggtgtgtacacacgtttgcacatgtggggcagtgtatgtatacagaaaccaggcaggggaaaccatgttgacattttcctgctacttctgcctcttgggtatccacatcaacaaagtccaaactatcagggcccaccacatggacatgtaagttacattaactgcagatccaaatgtctgtcttgagatactaccagagccgcaggctgagaacatgagagagctgctccatggcgcctcagtaggaaacaccagctggtaaagacaggaacaggtggccagggcttctctacagtctcccgaagaccagagtttatatgggaccaattgagcaagactaacccccagactaacagagcagacacttactgcacacctactgtgtgctgggccctcttcagggccctttaccacatatttcttcttaatcccatcccccaaaacacaactgctacttggtaagtaagtttagagaaattagtattaacacagagcagaggaagctttgcagggaagtcaagcccttgataatgttcagcacagatcccagtcactctgggatttgaaatgaagatgagcagtatggaagtccaagcatccatgtacagtcactgcatctgcgtacagatcacatccctttagtctgctaaagtggaacccgaataggtcaaagaattcctgtagttaagaccgcacagcaaccacagcaaatgtatatgtagcacttcgtacattcctagcattattctaagtgctttacaattcagggatgtctgagggagagaatacagttatggctcctcagtttcttttcttggttgggccagtaaagccccttcctcatccctcttttctgcttatcactagagacagaaactaaaaaccatggcttcaggctgctaaaagcctaaaacaaaaaaacaaaacagaacaaccaaataaggcagggttggacaagcttgtttacatcgttttgacaacaactctgaagtatgcactcttgatatccccatttttcagatgaataaactgaggcacagagatgttaagaaacttgaccccaaggctacagccagtaaactgtagaatcatgatcctttttttttgaaactgaggtgaaatttatataacataaaattaaccatcccattactgggtgtatacctaaaggattataaatcatgctgctttaaagacacatgcacatgtatatttattgtggcactgttcacaagagcaaagacttggaaccaatccaaatgtccatcaatgatagactggattaagaaaatgtggcacatatacaccatggaatactatgcagccataaaaaaggatgagttcatgtcctttgtagggacatggatgaaggtggaaaccatcatccttggcaaactatcgcaaggacaaaaaaccgaacaccacatgttctcactcataggtgggaactgaacaatgagaacacttggacacagggtggggaacatcacacaccggggactgttgtggggtggggggaggggggagggatagcattaggagatatacctaatgtaattgacaagttaatggatgcagcacaccaacatggcacatgtatacatatgtaacaaacctgcatgttgtgcacatgtacctgaaaacttaaagtataataataaaaagaaactgaggtgaaatttatataacataaaattaaccactttgaattgttgaatggcattcagtacattcacagtgtcaggcaaccgtacgctctctaatcctaaacattttcatcatcccaaaagaaaaccctgtacccattaagcagtcacttcccagaaacctctcctcagtctctggcaaccactaatctcctttctgtatctatggacttgatttgcctattcttgacatttttatttatttattttgagatggagcctcccctcttgttgcccaggctggagtgcaatggcacgatcttggctcactgcaacctctgcctcccaagttcaagagattctcctggctctgcctcccaggtagctgtaattacaggcatgcaccaccacacctggctaattttgtatttttagtagagatggggtttcaccatgttggtcagtctggtctcgaactcctgacctcatgtgatctacccacctcagcctcccaaagtgctgagattacaggtgtaagccactatgcccagcctattctggacattttatatgaatgcagttacatagtatatgacatttggtgacctgcttatttcacttagcttaatatcgttgaggttcatctgcatcgtagcatgtggcagcacttcattcctttttatggctgatattctatcatgttgatatacttgtaccacaatctgtttatccaattatcagtcaatatactcagcattctgaagcttcccaaagcccctgtctcctggccatgttgtatctgcactgtatgccctgaattgaggacctcatctggtttaagaagatgcagctccatcatatgggactctgcccagcagtggtgctggaggactcttgttaagcaagccctggtgactgtttggccatggggggttgtagatctgagcatattggcctgatggcctttcccattcacaccggatcttctctacccatgctagcccctggacctcagctgaacgggaaagaaacttcagtgattctcattgtccggggaagattcaggttgaagatggaaatgtggaggagtagagtgtgaggtccaagcttccctttttcccttcttccttctctcaacaccaagccccttctgatgacaatcttggggtgctttgaggaggaaagtgcttaggtcagcccagtgaagatacttctctactcccacagatgagttcaggagacagggctccttctgactttacccattcacccaaaaaaatatttattgagcacctactatgtgttggacactgtgctaagcagcaactcaaaggtgaggaaaaacatatccagccctgccctcatcgtagtggtcaagggtacaggctggagccagtccacctgggtccaaatcgcagcttctttatttactagctgtgtgaagttgcacacagcagtccctgtgcttcagttacttcatctgtaaaatgggcataataatggcaccaccccatagggttgctttgagggctaagtgagtccatatatgtgaagtgcttagcacacagtgagggttatccatgtgatagccatggttattaatagaggaaggagacagacattaatcacagagatcacaggagtgcacatatgacaaagtcaggcaagcattgtgaaaaaaaggaatgaaggatctatgagcactttgcaaaggaatctcacatggactgagggcccggatggcttccctgaggaggcagcctgtgaactgagatgtagatgctgggtaggagtttaggagaagtgtgaggaggttccaagcaggcatcccaggaagagggggtagcttgggaccctggcatatctgaggatctgaaagaaggcaactatgggtgaaacataagaggcgagggtttgccttcttacaaatgaggtaggtcgaggcaagcccatgtgggcacttgagatgtcctgttgggtcactaaagcctcagtctgtgagcggtgaggttttaggggagagtgacaatatttgccacattgagagatcgtactggctgccgtgggagaatagttgggagtggggcccaaatgggagtggggaggccagatcacaagcagttgcttctactgaccccagagccacatccacagagccccctattctccaaacctccaggcagaagcaggtgtcctagaaggaagccataaggagcttcctgaacccaagcagccatgaagtcttttagtcactcagagccaggcagccaccttctgtttggggaccaggaccccacacctgtgcaaaacagcctcgttcaggagactcagaggatttcaacaggagctggagcagagaacagagaagcaagcgtgagatgcaaggatcttaggagagcgggtcagaaaaaagccaatcataagccaacaggggcgcagccagaggattagaggaagaatgtgggttgagtgaatgtgagaaagaatatggtggagacccctctttgtcttttgttctttttttttaaagtgataaaatatggtgagaatgataaaataagtgagaattgcttgaacctgggaggcggaggttgcagtggactgagatcacgccattgtactccagcctgggcaacaagaccaaaactccatcccaaaaagaaaataagaagaaagaaaagaaaagtgataaaatacacttaaaataaaattgacctttttaatctttcttttttttttttttttttttttgagacagcgtttggctctgtcacccaggctagagtacagtggtgcgatcttggctcactctaacctttgcctcccaggttcaagtgattctcatccctcagcctcccaagtagctaggattacagttatgcaccaccacatctggctaattttttttttttttttttttttttgaaactgagtcttgctctgtcacccaggctggagtgcaatggcgtgatctcggctcattgcaagctccgcctccctggttcaagggaatctcctgcttcagcctcccgagtagctgggattacaggcacgtgccaccatgcctggctaatttttttgtctttttagtagagacagggttttgccttgttggccaggctggtctcgaactcctggcctcaagtgatctgcccacctcggcctcccaaagtcctgggattacaggcatgagccaccacacctggactgattcttctacattttagaagaatccaaaatgtcttcctatcctatatcagtcacccttctggttcccccatttctctgaataggaccaccctcctcctgagcacctgcagctggaagcctgtgtgcccccttccttgctgctccatctgcaccttgcgtattctcgttctaaccctgacatctctccgtgttcatccccatctgtgatgcccttcatccccacccaggtcagaccctcttcaccttacacctgcaatattagcacaggtgtgctctgacggggactccaaggtctcccaggagaagacaggctgagccagactcttaaaacaggatagagctgcttctcaaggccatttcctgagcacccgtcatgcgtcaggctatgggtgttccgcagggagcaggacagacaccatccctgccacaaggagcttgacatctcactatgtgcttctcagccgggtcaaatcaaggttctatgtgattctcagaaattcagagttcagcaggcgcagtggctcatgcctatcccagcactttgagaggccgaggtgggaggatcacttgatcccaggagttcaagaccagcttgggcaacaaagcaagacccccatttctaaaaaaaaaaaaaaaaaaattaaccaggtgtggtggtgcacccctgtaacgccagatacttgggaggctcaaaataaagaaatcggctgggcatggtggctcacgtctgtaatcccagccctttgggaggccaaggcaggcagatcacctgaggtgaggagtttgagaccagcctgaccaacatggtgaaaccccgtctttactaaaaatacaaaattagctgggtatggtggcacatgcctgtaatcccagatactcgggaggctgaggcaggagaatcgcttgaacccaggaggtggaggttgcagtgagccgagatcgcgccactgcactccagcctgggcagcaagagtgaaattccgtcttaaaaaataaaaataaaaaagaaatctagagttccgttccagatcaactgaatgtaaattccttgtggatgccaagaatcaatttctctctctctctctgtgtatatatatatttgagatatttgagatagagtcttcactctgtcacccaggctggagtgtggtacaatctcagctcattacaacttccacctcccagttcaagtgattctcctgcttcagcctcccaagtacctgggattacaggcactctccaccacatctggctgatttttgtatttttagtagagacaaggtttcaccttgttgtctaagctgacctcaaactcatgacctcaagtgatctgcgcacctcagcctcccaaagtgctaggattacaggtgtgagccactgcacccagccaagaatctatatatttttaaagtgtccagcaccctgcaggtgattgtactagtgagaattgaaatccactggtccagggagagagagagacatctttcacatagttagaaaaataaatagaagctacatgctgtgttggaaaatgttagcctcagtacttcgtgggaaagcatacttggtggcccaacactcagatatttgggtgtgaccatctcccctgcattctgctttctcagcatccaaaccacttttgttctttgggacgttcagagacacacactctgcttcctgagaccccaaagttcctgggttcgaaaccatccaataaaacctccacccagataatgtgtgagtttgaaagggtgtatctgctcggactgttgttcacaaggagactggaaaaacatgccagtaattatgccgttaacagttttgtttgcctctagtcacaaaataaacatatcctcagccctgttatttttcaggctgatggagcacacactcctgcttttgcagaaatgcagtttgcttccctcttgccagttgtcctgggtctcctgagctgtattttaggctggtcagctctttaagccttcttaaggccagaagtgacctagaccatcggctggacaaacagagtgagcctagagttctcggagatctcatgaaaaccaaggttctgcagaaagccaagagtggtctatgggcttaggaccttctgggaaggatgtggtggaagacaagaattgaagtgactgcttcacccaagggatgccatcatctggcttaaataacttttagttgtattgtttgtttgcttgctattttgtttgctttctctttctttcacaacggaaaacaaaaaaaattcagagtcctggggaaaaatgtgatagttctctcttgagttgtgtatcccttctttggctagcagagaatagagcacttggccattcatccattcattaaatagatgctcattgagattctgctagatattaggcaatgctctagaccagcactgtccagtggaactttcgggggtgatggaaatgttctataagcaccatcctgtatggtagccgttagccacaggtggccattgagagcttgaaacgtgccttgtgggactgaggaactaaattttcaatttgatatgattttaatttaaagttaaattaaaactgtgcgctcatgaaccttacatcgatgccatggggtacaaacacttccactagagagaattatactactgttaccagaagaaaagagagtccaggctaaatagtacagaaataaatgtggtctctgtcctctgccaatttgatattctcaccagatcccagcttgaccacacaatgaattttgcaatgtattttcttccgaatccctccctctccagatctcacaattctccttcctcttggcagcggctctctatgtgtctgtggatgggacgtttccaaccctggcatcttcctgcccagtgcattgagcatttttgcttattggcaaaaaaaaaaaaaaaaaaaagccgtcttttatgtgactttttctccggtggccaagagtatggacggtatccatgctgggatgctccaagtgcatcctgggaatttggatgtgagcccggggtggtctacaatgtgggtggtctttattgtagagtctattattcttcccttgcctgttccttacatctaactgcaggtgaagattcttttcaagggcaatctggaggaaccgcatgtattaaaagtgggataagggaggagcgtttctacccttttaaaaattgatgagggcaaagatttgactgagtataggatccaagcgacagggttaaggtctgatcattaggcacacagacggactctgtggattattcttattatcattcaagtattttctctcccttgctcccaccctgagtcattgtccagcatggtcaatagtagccactcaaagtagatgcctgggaaagccttttaagacctgccatactccagtagctaatcatatttgctgacatttcttgactacttactgtgcataggattctaggccaagtgatttccatgcattatctcatgtaattctcacaacaatcccagaaggtagatagtgttactgcatcgcagtatgaagaaaccaaggctgtgagaagtaaagggattttctcagtgtctcacaactggtgggggttggagccaggatttaaatgcatgcttctttcatcacggggagtaggggcagagaggaaaggacctgagttttttgccaacgggtcataatttcacctgctggatagttctggggtaaagctctctcactcatttcttccccatctaaatccttggtttctgtatctggatgagaatccaggaggcagagttgtccacgtatcaagagatgagcagggtacatcagaacctgagatccagagtgacctaatgtttagccaactgccaagttgcccccactttctgctttagtccccatggcatcccagtaagatgacatatagaacagcaccaggactcagagtgttcaagtgacttgcccaacgtcacatgacttgatcgtggccaagctgggatttgaatgcaggcttagctgaccctgaagttcaccatgctttatgcagtgtgttgtgtaagtggttgaccccagggagggaaagccgatcacccaaggatgccaacactacgatgtggctgccaaagccaaaagccagtgtagacccatctccagatggtctctttctttctctaatggaatatccaagctttactgactgtgtgctctaagcatagacctaggaaccatctgtcctgcgttagcaagaacaaccccaaccttcaaattcctttgtaatcctgttcccattggacctcagactctccatatctctaccctaactggctatctggtggtgcccagtggaattctcattcatttaaatattagcctaatgcaagcataattagaaaggaatggcttctgtccctccccccaccccaccccccacatatgcctaattgtttcaaagcaaaatcaaagcaaactcaaagcaatgctggcatattctacaccatcaagtcattccactacgatgtagaagaggccatgcaatatcagcctgacctggatttgaatcctgttgctatagattgaaccgtgccccactaaaatttatatgtcgaagctctaacccttgtacttggagatagggcctataaggaggtacttaaggtaaaatgagatcataagcatggagccctgatcctatagaaggagtgtccttctttataagagacaccagagagctcgctctctctttctctgccatgtaaggacagagcaagaaggtggccttctgcaagccaggaagagaggcctcaccagcatctaattgacaggcactttggactttccagtctccagaactgtgagtaaataaatctccattgtttaacccacccagttatggtgtcttgttatagcagcctgtacagaccaaggtacctgtcctcatcccctgtatgagagctatatgctctcaagcaacaaatccaacctttgtgagtctcctttttctcacctgtgagagggcatgaccatgctacccatcagggagcggtaaaaggaagaatagccaggtgggactccaggtactgctttatttcaagctgtttgatgacagctaggtcagagcatggtggctcaggtctggcagctccatgtgacctcctctccaccttctcaccatcaaaacattgggaccaggatgcttggtcatactgatggatacaaagcaaggagagatggttgaatccaccagggagaccttagcttactgtacccaccccgttgcatcaagcggttggggtaactcatcgtggccccaagaggcttaagtaccacccaggcctgaggcaagaaacattaaaaaaaaaagaagtgcaattcatttgggaggaggaagggttcacagaacagatatctagcccactaataaccatgtctcaagcaatctctccagcactaagtaatcctaccctcagttcctccctttgggtaaatgtaggagagagatgggcagaggagaacctgctatgggcagcaggctagagtgccctccccagggtactttcctcataggattgttagaaacatgaaagatagtggaacacaggacctaatccggaattgggcattttttaacaaggaaattttttgatgataatggtagtgatgacaatgataattaataatcctgtatagttattaattctggacaaaaacatggtctggccttgtgtggtcactttccttattctctccttctttcttcctcttatattttatgtctctattccttgtactaatacagaaatgcagattgggcagggggcacctgcctttgaggaagtctgatcgtgatgagagtgaggaaggtagttgccttgagctgagccttctttgcctgtagttgggcccccatattccctccctgctgcaaggctgtttgaagacagccctagtgtttactggccttctctaccccaatgaggtgaaacaacatattccatttctcaagtccatttctccacttactttgaaaaatcaagtgcatttctccagttactttttgaatgcaactgcaatctacctgaaatttcaagtgggaaacttccttccaattcccagcctcaccaaccctcaccccatccccatgctcaagtggcctgcctctgaccctcccctggtggccccaggcaatatcagaaagtgatttggacatctgggcaggtcagcttcctaggaaatcatcatggaacagaagccaacgcagagagcaaagtcttcatggttcatgagactcccctgctgcctcctcccactcccactcagcttaggtgaagcaggcccatgaaggtcagatggagtgtctctagaacctggaatctagtcttggcccactgcctataagaccagttaatccaaaagtggagaatgggaaggggaaggccatttggtagtactggccagttttcccatggtagggggtgaaggggaatcccacaatggtggttgttcccttatggagaaggaatgaaaaactgtgcccctaaaagccatcacccgtctcctatgtcctttctcctccagggagggattctcctcagtgcaatttaattgtattcatcagtcaacattacttggcaaaccgagccaggggcacaaacattgccaccctttctcagtctaatcatgctcttcaggatgccggaatctggtttaaggccaagcagaagcaatttttgattacagagtcaatctttgtttaaaatttgccaccctggggaagtttccaacaagttactttaaacaatgcattctctggacacctacagctaaatagtcccattaatccaaattgctttgctgggttgtggtgcaaccattcaggaattggggcagtgtctcagacaggcttcatgacagtgatggctgcagtaccaagggggcactgctttgtcatgaactgagcgaccgggagatggccccacccctgagagttccctgccactgagtttctgcaggtgctaagtgcttcttctatgttctcctttaatctctcagccatctggtgagatgggaccttcattgtccccatttgcaagagaagggacttgagcagatgctcagctacccagaagtggagctcagtggagcttaaacccacccatgtccttaacaatgagtcaggacttcccaagtatggcctgtgggccgcttgcagtatgtaagatgatttaaagagaaatgcaggcgagtctttgaaaatgtccatgtttatctatattaacacatagaagggaataggaacatgttcagcccagattttggaagctgaagtttccttaaaaataaaaagtaaataaataaataaaatgaaagttgatttaaatgagaaaatattaacaaggcaacaatacaaggggtaagtggctcttcagtcatttggcaagtacttattgagtgcctggtatactccagccattttgctgggggttgggaatatggcagtaaagaaagcaagcactgttgtgcatcctccatgctcattagagaaagagacagtagataagtgagcgggtcatatatcaggtagaaatgagtaccaggaaaactattgcatggaaagaggatagggtgggtcaggaagacacttcgattagacggatatgccagaaagttatgaggaagattgtgaatgacccaaaaaagagagttatcaggcgagggatcaacaaacttcttttctagcttttatttgaggttcaggggtacatgtgcaggtgtgttacataggtaaattgtgtgtcctgggggtttggtgtacaaattactgcatcattcaggtgataaatggagtacctgatagtttttcgatcctcaccctccctgcctcctcaaggagaccctggtgtctacccttcccttctttgtttccgtgtgtactcaatgtttagctcccccttacaagcgagaatatgtatttggttttctcttcctttgttagttcacttaggataaaagcctccagctccgttcattcaacaaactttttttttttttttgagacagggtctcattctgtcaccctggctggagtgcagtggcacagtcacagctcactgaagccctgacctcccaggctcaagtggtcctcccatctcagcctcctgagtagctgggattacaggctcatgtcaccacacttggataatttttgtatttttgtagagacagggttttgccatgttgcccaggctagtctcaaactcctgggctcaagccatctgcctgcctcgagctcacaaagttctgggattacaggcatgagccaccacgcccagcctcaaaagtttttattaaaaggccagatagtaaatattttaggttttgtggtacatatatgtctctcaggatgacgaaactctgctgttgtaatactaaggcggccatagacagtatgtaaatgaatgggtatgactgtgttccagtaaaattttctttctaaaaacaggtggcaggcaatagtttgcacttgatcattctgccagatctcccatgtttcagatcgtggccttgcccagaacacgtacatctcagccctttcaaatttagtgccaacccactcacccatcttcctaggcatggcctttgcttcactatcttagatgattctgtcaacccaggtggggttgaatctgaatcacctcaagtgcttcagacttcaggaccctggatagagaatgagtgatggagatccccaaggccttctgctctacctcccctaggccttgacctggatttctacccagtcctgggtagctgaaccccttattaaacagcaggctccctttattttatgttcccctaacctacttcgtgtgccatttctgaccttgagctggtaaggagcacatgaaacacagctcacccatcagtgttgcctgaccaggggcggccgagaggagacaggcagtttgcacacagacagtcctccatggctatccagccccgcagagttcctgccagccagagcataccggttttcttaccacccagccttctctgcctaaacgcaggataaatacctggtcctcattagcaccgtaattcaccctgcaccaccttcctcaatctgaatcaaaaaggttaatgtcattgaatcctgagactcgttgatttcagcacttaccccaagtttctgctcccccgctaaaagcacagagctcgtttatctttccttggttgaccaggcaagttgctgactaatgccttaatgccagctaattctcaaagatttcccagagtgactggacatgtgttcctctagtactttctataaatccagttgatcttgtgtgtctggttttctactgactcactgcctggatgtgtctgggctcccctcctgtaatttatcttggaagtctgtctcaggttgcaatgttaattcaggaagagagagatttttaaccaaggtggtgtccgcaaaatacattttaatgaactatcagctgttgggcctcactgtgaatttgttcattcattcatacattctagtcagtcaacagatgcttgttggaaacctactgtgtgccagacatttgccaggacctggggttacagacaccaatagaaccattaacatcgctgcctttgaggagtatacagattaagccatcaaataatgacatcttcatgacattgtcaggaaagaaatttgcatgcatataatgcaggaaacagacatgcatatcaccccttctcttctaaaggaccagggaaagcttccctggagaagtacccatcccataaccacgtctcaagcaatctcactggcactaagtaatcctaccatcagttccccctccttttatgtaaaactaagaaggagatgggcagcaggctggagtgccctctgcccagtggtttcctgagagttgaaagaagaggaggaattaactgggtgaaaaaaagggggcggtgaacattgcaagcagcaggggctgcatgcacaaaggcactgaggcaggagaaaacatggctcctgtggtaaatgaaaagaggcttatgtggacagagtgtggcaaggggataagccaatagaatgaggccagagaggcaggtgggggccagaccgtgtgggacctttagagccaggttaaggagtccaagcttatcctataagcaatgggcagcctttgaaaagttttctattagaaaatgccatgatgagattggttcagtttataatcagttgcttggcagtgggaaaaagaaagttaaaaaaaaaaaaaaagtagaggactgtaccagcctgctggaggaggggaaacatgatagctagtattttttgctagtagatatgtacattatagctcaggtaattactttccaccaggctaaatgcctcctgttgctttgttgctattattttctcttggtgttgagcttttctgcagcataccttattcttaggcttcgtggccctgggtttcctggagagaccctgtaagctggatctggaactggacctacaaacctccttctgctagtcggcaggaattttccagggctcaggccctcaggccagtgcagcaaagcggttgaaagtgtgcacttgaggaggcagcagagcctgagttcaatttccagctgttctgtttactggccacgtgcccttgggcatgttgctcaacctgtctctgcctcagttttctcatctgtaaaatgggaaccatcagttacctgcctcagcctttactgtaaggatgaagctgtgaaatgtgtagcaccttgcctgacccagagaaagggctcgagaaacgatgatagtgatggtgacccaagctgcccgggtgacagttccacaagtggagagatgacatctgttttgctcaccactgtgtcttattcctggtacagtgcctggcacatagtgagagctcagtaagtacttactgaagtaaggcatgaaggagcaaatgagtgctcagtgtttgtcccatataacaccactgtggctgcagtggctgtggtcctttatttctaagtgccaggagagtcactgatattttaccgcattttttttttgcattccccatttattaaaaacatctctgggcttattcctagattgaggaccagtggaggggttttgtctttacttaatgtcttttcacctagagacgttttcagatttcaccaccatgaaaacagaaaacattccaaagagctggagagtttatttcaaaaggacagtgagctgtggtaggtactcatgaatcctaaggttggctcagctgcttctccacataaagtggaggtgcctgcacagatatcaaggatctgtgtctgggagcctggcaggccagagggacattcacatatcacacctgtctggctatatgctggcttccatgcagcctgggggaaggtctggatcccatgaagtcacttgatgtcatggagcagatacctagtctgttcccattttccatgagaggggacagggaggtaagttctgcaggtgtccacattccttcccggctccatgaccacgcctgcgggctccagtggtgatgcatatggactctgaggtcaaatgacctgggtgcaaatccctgtttctgttacctgtgggctgtctaacctaggccaagtcacttaacctctctgttcatcttcctctgtaaaatgggtgataatgataatatgtacatcatgatgatgttgggaaggcaaactgagccgatatgtaacaagtgcctcagcaagcaactcttatattctatacttattattgttatgatcatcatgattattagacacgttgcccaagttttgagaagtttgctccattgtaaaatggagctactgctgcctattttaggggggttgtgaggattaggtggatagcgtatataaaataggtaggatacaccaaacatggttattattgtagctgttgttttatttctcagtttgaaattttggggttcaactgtcatatttttattgtggcataaaaataaaaacataaataataacattaaaatatgttggctggatgtggtggcacacacctgtaatcccagcaatttgggaggccaaagagggcggtaacttgaggtcaggaattcgagaccagcctggccaacatgatgaaagcctgtctctactaaaaatacaaaaaattagccagatgtggtggtgcatgtctgtaatcccagctacttgagaggctgaggcaagagaatcgcttcaacccaggaggtggaggttgcagtgagcggagatcgcaccagtgcactctaccctgggcaacagagtgaggcttcatctcaaaaaacaagttatatttaatatgccaaaaataatatacaactgaaattagtggcgcttaatacattcacaatggtatatgagcataatcactatctagttacaagcattttagttaccccagaaggaaaacctgtacccattaagcagtcactcctcattcccctctgacccccaacccctggcaacccccggtctgctttctgtttctgtggatttgccaactctgaatatttcatataaatggaatcatacatcatgtgggtatttcacgtctggcttctttcacttagcattatgttttcaaggttcatctgcattgtagcttgtatcagtacttcatctctttctatggctgactaatatcccattgtctggatagacctcatttggctttatccattcagcaggtgatggacatttgggctgttactactttgggctattgtgagtagtgctgccatgaatagcatggccaagttttgttcgaacacctgttttccattcttttcagtattacaatgactcttaacatatgtggttcagctactttagagaaaaagggaagaagtaataagataaagtagaaaaacagaggaatttcagcttctgtagatgtatatctttcttttgtgttttatttatttatttttttggccaccctctggagggccagccagggaacaaccacagagaggttggtcttggtttggtctctaactcttgggttcgtcaacatcccaaggaccacagcttccctgagaaaacctttgatgactgcacattgcagcctggggaagcctgccacccttctccctcactcagagccaaataaaaaacaagggctaccagataatcaagcgattactatgtggcaggcactggattgagtcttccacacccatgatctcatcaaatctttgctcaacttagacaaggaaattgaggctcagaaggataaagaaacctgcaaggtggtaccgcaaggattaaggagtagagatgatctttaaacctatttcaccttttgccgaatgatgattctgcagaacagcagcacgtcaagctgtcactcagttaggctcgtctcagctggacctgctgatgtatctgccttagcatgaaaggaattctgtccgagtttgtgaattccattccaggaacctggcacagactcggagattgcattcaacctttgtccctgtgtgcattgagcaactataatatgccagacatggcgctagccaagccttgctcaactgaggttcctcatttgagccacaaaacacaggaagtgggcagagtgcctgtgttcttgattctagcaaggatggtatgtgactagtatgctcttaatgcatagagggaagctaatccaggatgtacgtggatgcctcggaacaccaaagctccattctcagagggattttgtcttcatcttcactgtttctccagcatctgaaacagcacgtgactcatagtagctgtaacataaatgtttgctgaatgagtacgtggaggtagtgtggcgtgcacaaatctgccttcatctactacacgtcctgtttgacaatttataatacgatcctgtttttacaatgcagccatttaaatactcagagacctggcactgaaaataattcatcagcgagcaatgaacttgtgtcagcatcttcccggcagagtttatgtgatcagatcccagatgacatttgttactaatttggttttttttgtttgtttgtttgtttgttagtaaagcactgtatcagtcaccataggagcgcagaaggagcaggactaaggtattgcccctgagtaaatacctctctgggaaaagaaagaaatatctgtaaatgaacagcttttacccaagaagcaggaggtatgagctcatgtagagtcaaataaaacccgggcttaaatgtcctcaatgaaatgggcccatacaactcaaagtgatacccagctgttgaaaaagcagaattcatgtctcaagtcagaaatgaacacagtcggccaggtgcggtggctcacgcctgttatcccagcactttgggaggctgaggcaggcggatcacctgaggtcaggagtttgagaccagcctggccaacatggcaaaaccccatctctattaaaaagtacaaaaattagccagatgtggtggtggatgcttgtaatcccagctactcaggaggctgaggcaggataatcgcttgaacctgggaagcagaggttgcagtgagccgagatcacgccactgcactccagcctgggcaacaagagcgagactccgtctcaaaaaaaaaaaaaaaaaaaaaagaaatgaacgcagtctttggcacataggaagatgctcagcaaatgcttatggcagggcctgaattgttgaagaactgggaaattgtatttaccaggaaagctaatagagcttgcaggatcttagagttatgaaagagcacaaaacattcagaaaacttcaagtaattccaaagattgagtaggcaggatgcaggaagagaaaggaaagaaaaggacaaaggaaaaggaaagagaaatggaagagggagagaaaaaaaagggagagaggagggaaggaaggagggaataaaaagaaatttaattcacagctgcaagagtaacatagttaatacttactaagtatttactgtacaccaagtacccatgctaacaggttaacctgatatcattccttctaaccccaaaacaactccacaaggcatgtcatattgcgattcctgttattataaaggcaacagtgctgttcagaaaaattgtcatctgcccaagattgggcagttagtgagggcagagctcagccagttctgctattgagtaagatgccagcctccttcctctcctaaaggagaactggaagttaaattggccgttttttaaatgatttttgaacacttgtttttaggctactaaaccatttttgcacaattgaaattttacccaatataggggtggaagtgagtcctcagtaaggaaacctctactgaggtgtcttgaggccccagctgcccagccccaacctggggttcccccagatgcagcttaaaaaccgatgatctatgtgataacgtctcatttaaatcatttctgaagttttctttgcctaggaactgtcaagttacttcaaggcctgtgtcctctgtttaaaaagaaaaaatccgtttaaaaatccttttgaaatttctcatcagccctctgagataaacaagtaaccttggaaatctgtgggtaaagagtctactggacgcagcatgtcctgatcctccagaatcgatctctgtgttgcagaaaccacagtgtttgtttttccatggtgtgtatgacttcttgcctgtgttgcagtgcattttgaccttgttccaatacagacaggcaggtgaatgtggcaagctgcccaaggagaatgagatgcttggtgacactatcaactgtccttcaagctcaatctcaccttggggctgaaatccaaactgacccagtcccaaagttctgggagttagagatccttgctgtatcctactcctggcacagtgcagactctagtcctggagaattcatgataataaaaataataacaataataagatctgacattctagcattctgtgggctaggttacctaagctgtactagatctctcttgttttcactggctcaacactcattacccgacttctgataccagtttctgtatcagctagaattttgtagttgcaagcaacagattattccctcttatttcattacatcttcaactctataaggtaaatagtgttattatcctcaattttaaaaatgacaaaattgagcatcgactagctaaaaatgacctgcccaaggccacacagccaataagtagtagaactaggactcaaacctacatttctctgatgtcagatctgcattattttaaccactgcaaattctgatacattagtgtaggtgcgttaggaagacctatgtggtgaaatggaaatggacaaattagtattataggtcatggtgattatttgaataaacccagggcaggatgaatggtgaaaaaggcatctgttctcagccataagcacaaagagaaaggtcagcgtgtcagtacagttcagtgccattcaatggttatttatactccagcctttcccagtggaactgacattgagccagcttttgcaaaggcaagcaggagttctctaggcaaaggtgtaggaaggatgtttctggcattagggatggtatggacaaaagccctcattctgtcctgcaacacagttgtgctgagcagtttccgtgggctacagtgaaatgggcctggggacccaaagagaaataggcataaggctgatggaacctgtcatgttcctggcctctgtgctggacagttggggaacatagatgacccagataaagttcttgtcctcaggtagcttacagtcaagcaacttgaacatacataacttaaatttttgctaggaaccacaagtgtgtaagaattgaaatgtcacagcttggtaggaaactagcaaggggtggacatgcctttctctctgcatttctagcgaagaatatagaaacttctttccaaggaactccagttactgcgcacctgctatgcaccaggcactgcatgtaccatacccacaacacacaagtaactcatagaccattgttaaatgctcccatttggcagattagaaaaccaaggctcagtgagcctgaggaacttgctaaaaatcaaacggcaagaaagtggcaaggatcagagagaaactactgtaaacacctctctgaaaacagctttccttgtagccgtgtcttggctttcctacttaaattgcatttacttttaagattcaatctttcgatgccctctgaagtggacctcccctggttccctgaagaccaaatcaaataactggctgtaatcaatcattgtatgggaatgcagaatttggttaactaaatgttgtgcacatttgagatgcctcatggcatgtgaggacaagcagacttaagagaatcaaaatacagttaaatagacttcatatacatatgtgcacacacacgatccccaccctccccgcccgccccccaacccaccaagcagaatgtcagtttagttcattcatgattccggtggcgtcctgggttcctgcgtggcccctgggtgctgattgttgtcagttacctttccattacagccgtctgaaggaagggctggtgtgttaagagttctcattgatagaacatcagataaactgcctcttagaaaggcatatgtatgtttaaaatgaaaaatgtgtttcttacaaatgtcctgtgaaagcactgaggctttgtgaaatggtttgccggtccattcaaatacaatgagtgtgttttaatgccacatcatttttgtcagtacaaaaaggtaaatccaattaaaactgattgggttgtaacaaccaggtagttctccagtttactgcctgcctttgtagaaggaggtactgtccccctggtgtccccagcatactttttgtagcctcccctgaatgctcgtgcttcaattcatctgctgtctcacttcatatcacagggacctacctatatgtctgcatcccccagtgttctgtgcgttccttgaggacaggtgccacaaccatcttacccactcctgtcccaggcgtttgtcacagggcctgacctattgaagaagtggaagtcatatttttcccaggagaccaaacagtgcttgcacagtcttagagttatgaaagaacacagaacatttagaaaacttcaagtaattccaaagattgagtaggcagtgctgggtcacaaacaaccttgcatgccttgccaaggggtaaggacattgtccttcagatgatggagagccgctgaaggtactgagtcaaagggtgacatggtcagactcatgttttaggaagatcctgcagctgcttcctggaggacgaggtaaagaggagcctggaggccgggccagcattttatccagttcacttttcctcagttgctcatggtggctggaattatgcctgtggagtccaggaaaacatactctttagcatttttcataccttttcctccgtatcttagcaaaataagtctctgtaaatttggactactttttaaactttaaaaaaaaaagtcaccttttattttagattcagtgggtacgtgtgcaggtttgctccaggggtatattgtgtgatgctgaggttttgggtatgaaggcccccattacctaggtaagtgagcattgtacccactaggttatttttcagcctttgccctcctcctcttccctctctagtagtccccagtgtttgttcccattttcatgtccgtgagaacccaatttttagctcccacttataagtgagaacatgtggtatttagctttctgttcctctgttaattcacttaggacagtggcctccatctgcatccatattgcagcaaaggacatgattttgttcttttgatggctgcacagtgttccatggtgtgtatgtaccgcatcttccttatccagttcgccattaacgggcacctatatcgatcccatgtctttactattgttaatagtgcttcagtgaacatacaagtgcatgtgctttgactgcatttgaatcagggatttgccttttttccagttcttttgctcttgtctcttcttcagcaagtcccgaacttggcctttattcactgttggtctgcaaccctggacttccctgatttttccagtgggtgagaagatgtcaataaggtccttgcataaaccgtctggagtgtggaggagagagcactggcagtgtctcctcctcccccagataagccgtggggaaagatggtttagaatccattcacgagatggaaggatgggttagaatccatgcacgagatggaaggatgagttagaatccatgcatgagatggaaggatgaattagaatccattcacgagatggaaggatgagttagaatccatgcatgagatggaaggatgggttagaatccattcacgagatggaaagatgggttagaatccgttcacgagatggaaggatgggttagaatccattcacgagatggaaggatgggttagaatccattcacgagatggaaggatgggttagaatccgttcacgagatggaaggatgggttagaatcccttcacgagatggaaggatgggttagaatccgttcacgagatggaaggatgggttagaacccattcacgagatggaaggatgggttagaacccattcacgagatggaaggatgggttagaatccattcacgagatggaaggatgggttagaatccattcatgaggcagggggaggaggaaacttactggacttcagattttacaggagcacaggaaaaagacatacaccctgaacagaggttctacctgtatcaattcctgttgtgcgactcgcactcaacaacagtccccttgaagggaagtagtaggcttcagaaggcagctgcagtttcctgtttatttcctgcctctgtctacagaaatggatcacattcctgaagcttattcaccacggggaaagcgggattgaaaacagctcaggctctggccctggggcactgaggtctgcatctcccctccaccactcataagacctggcacaagctgtgaaggctcttccagtcctagtttattcatccgcaaatgagtacctcctggatgtgtattgtaaaattaaggaggacgagcacttaacacttggtgagcaacaaagggaaatctttctgcaattgttattatgaagcattttctcatgagtaccctgactctgggattccttcccccaaatcaccccccagttcattgggcaaagacgtagggaggagcattcctggcagagggtatggaatgggcagagatgtggatacagaagtggatgatgggccaggcacagggcctcatgtctgtggtcccagcactttggaggctgaggcaggcagatcacctgaggtcaggaccagcctggccaacatgacgaaaccccatctctactaaaaataccaaaaaaaaaaaaaaatagctggacattgtggtgcacgcctataattccagctactcaagaggctgaagcaggagaatctctcgaacccaggaggtggaggttactgtaagcggagatcgtgccactgcactccagcatgggtgacagagcgagactctacctcaaaaaaaaaaaaaagtgaatgatggactgagcccttcccatggggcaggtactgtctgtgctgagcatagaagccacagagatgaaccctgcataccgggcctctacttgggcttgcattaagcagtgaatacttacttagcaccttctatgtgtcaggtcctggaggaacagatgggaattggactcaatgcctgctcatcccaggactacagccatggtcctgaaaagcactgtccgaggtgctgccccatagtccagatgctggttctgttggcagacagatgatcaccagctgcagcagctgctccaggcatgggagaggatggttctgccctgaccccgttgcttgacagaaggtcctttccatctccatgtgagcctcctttgttttccagggtccgctggtggttggtcctttggggaacccagaaggcccctgcttaaccccaccagcctgctggaggagccaagagcctgccagctctgcaagacatcccaactccatcacctttgcaatttccttcttcctccccatgctcctggcagccacaggcttggtttctgtgcaatgatgtgagtcttgggcaattcttagagaagtctcattccgtgtagtttgctttctgaaattaaagactgaaaaataatcctagagtgaacaattccatatctgcaaatttgatcctacagaaacctatcatgcccacatgtgaaaagatagttattcaagggtgttcaatggagcagtagttgtaagggggagaaaatggaaatgacctaagtgtccatcactagggcattggctatgcccattctttttgtttgtttgttttttgaggcagagtttcactcttgtcacccaggctggagtgcaatggcacagtctcggctcactgcaacctccgcctcccaggttcaagcaattctcatgcctcagcctccgagtagctgggattacaggcgcccactaccatgcctggctaatttttttttttttgtatttttagtagagaccaggtttcaccatgttggccaggatggtctcaatctcttgacctcatgatccgcctgccttggcctcccgaagtgctgagattacaggcatgagccaccatgcccagctggctacgcccattctataggatcctgtgcaaccgttaaaaggatgaagtctgcctgtacgtgctgatgagtgagagaagcagcataggtcattacacaaaaatccatgtatatacatgttcccgtttatataataacaaatggatataaatataatagcatctacctcttagggttgtcatgaggattaagtgggttaatagatgcaaataccacataggaggcattcaagtgttagatgatgatgatgttgctattgctggtatttcagtctttatcttgctgtgatctaagctttcataatgattttaaaggcataggaaagggttacaataggccctgccattatcttgttttctatacattgggttgatcacaggagggtgagatttttgcctctgtggagtgtgcacttctcctgtggttacacagccctcaatggagccatgtgcctggggtcaccagctcatcttcatttgctcaggaccatccagttttaaaactaaaagtcctgtgttgtgggaactccctcagtcctgggcaaaccaggacagttgacctcttccatatgtgcctctggtagcccagttgatttaagaagtatacagacacgtggtcgttaatgtttttaatgtgtaacagggaaaaaaataacatacaggtggtacatgagagagtattattcagccttaaaaaggaaagaaattctaaggtatgatacaatatggatgagcctggaggacatggtgctagttaaataagtcagccagcaaaacacaaatcctgtacaattccacttatgtcaggtacctagaatagttaaaatagcagagaggaagtagaatgggggttgccaggggctatagaagagagaaatagagaattattatttaacaggtagagagtgtcagttttgcaagatgaaaagagttctggagatggatattggtgatggttgcacaacaatgtgaatccatccagtaccactgaactgtacactgaaaaatggttaagatggtctacagacatatcaccctgaacacacccaacctcgtctgatctcagaaaaatggttaagatggcaagactctgtctccaaaaaaaaaaaaaatatttgtgacatcaaatatcacaaacattggtgcataagataaagctaaagtagaatttaaattaaatagacatatgaaataacttaaagattatgggtacactagaagcagaagttggggaaacactgttgtagtctattctcagcttaggttgaaagcacctcaaccctcaacttcctcaacttgcctgacttcacagtccctcatgcaccagcatagtctttcttttttttttttttttttttttttttttttttttttttgagacagagtttcgctcttgttttccaggtgggagtacagtggcgcgatctctcctcactgcaacctccacctcctgggttcaagcgattctcctgcctcagcctgggatcacaggcgcatgccaccacacctggctaatttttgtatttttagtagagacggggtttcaccatgttggtcaggctggtctctaactcctgacctcaaatgatccacccgccttggcctcccacagtgctgggattacaggcatgcctggcctccccatagtctttcatgtgtgtttctgccccacaatgggtcgttcattgcagtccaggaggacttactccagtgtcccctgggctctgtgcacacctggcagcatcagaggtttgaaatcctgaatcctgacattcacaaaatcctgcgtataactttggctttagtcctgtcacctcaccgttgggctgtgagcacctctggcagggtccttgacagtatcctgcagtcgggaaggggttctggggcatgagtgccaggtgggcaccgggagcccagagaggtgcagttggctttgtgttgggctccttcctagtggaagctgagcaggcttcatctcttgtcacatgccaccagcaaacaggcattgtgtgcctctgtgtgcccagggcaccttttccatacagcctgggctcctgggtgctatgggaacctgagaactctgccctctcttccttcatatcttcatgtccagagctgttatatagataagacacacacacaatggtgccatggccctctgggagccagtccctaagtctgacaccagctgggaagggaccttggacaaatccccaggaaggggccttggacatctcttaaactatgctctgcagaacattccatgggtcttatgcacagaaagccttccaagttcaaatcaggttgggtctttacactgttttccacagttcaaggtgtcttaagcttctgatgttcaagatggtaataataatgctattatataatagctgacatttatcaggggattactatatgccaagtactgtggcacagatattaggtgcattgtttttatttaatactctcaagacctaaggcttattgaaatgaaagtaattcattcatagtccgggttctccagaagaaaccatgaggagcagataaagatggaaagcagagaattaactactcatagtcatacatgacttacagcaatgcttctgaaattttaaagagcacatgcatcatctggaatcttgtttgaaaacacatttttgctcaatagatattgggtgagctctgttgctcaataggtattgggtggggcctgaagtatggcatttctaatagcagtgggctgcagaccaggctatgaagaggaagacattattgcgcctgtattttttttcttctgcacttgaaatggaatacattcattcattcattcactcgttcattcactatcatttgtagaggcagtctcgtagtagagaacacaagctgtgacatttgtccccaggttccagttctggttctgcactttactaaatggatgatttatctaagtctcggttgcccgtccgtaaaatgagagtgaagtgaaattccttttttttttttttttgagacagagtctcactctttcacccaggctggagtggagtggagcgatctgtgttcactgcaacctccacttcccaagttcaagcaattctccagcctcagcctcctgagtagctgggactacaggtgtacatgcccacacctggctaatttgtttgtatttttagtagagacagggtttcatcatgttggccgggctggtctcaaactcctgacctcaagtgacccacctgcctcggcctccccaagtgctggaattacaggcatgagctaccacacccagccaaaatttacattttttagcatcattgtgactatcaaatgcaataaaatgtggcaaaagtctttccccatggcctagggcatggtgcacatttagtaaatggctgggacttgggagattattgtattactcatttttttattcatttcgaaaaagattctcatatggctcccagtaagtttattttaacatttatttcttacttatttcagcagagacttcccagtgactcccatggtggtagcaacaggccccagttatcctcaggaagcagaggaactggcatagaccaagagacatgatttctaatcatttcagcaaaaagtaggaggaaattgataacgagatagatacaagagatgaactatgggaaccatttggcaaatgacttcaccagaaaaagagagtgagaagcgtgtgtgagtggaagagagagagagagagagagagagcgcgcgagaaactggaacggggtaaaatgtcaacagatcgcaagctgttaattatctggagagaactaaatattatgtaggcaattatcgacaggcgtctgaaagcaacaataggagaatttggtcctcagccaaattccatctccctttggagaaggactggggggatgggctttagcattcagagcaagcatttcacacagagggagagcgaggggcccgagaccctagcaaggggggtaggcaggggtccccccgccccacccttccagacaatccatcaggatcctttgccaagcacacagcgcttggctttgaaaggcggctttgcccaaaagctctgggcctggaaacctcagccccctcctcatccaccctccctcccccaagatgtcatcttttgagacgatttcatgtggaagcatcgctaagtaaattcgctaaatgcctattcatccccgtcagatggggactcggtgaagcggtaaatgtgaaaatggccccagctcacagccctgaaaggcgctttctgggattgccaaatggaactgcagccgctgaccctgggagacctgaggcttcacgagaagggggcccaggagccccggcccggccccttcaatcctcccactaagggtgtctgagagaccttatttattattccaactgccggggacccattcagaggttaacttgtctcgtattcatcaggacaacaataatgaactgttgcggagagtggtgagggggttggtaaataagagctgttaaaacgcagttggaatgggcctctttatggtttggagagaaacattgcttaaatttttttataggccgatttagtttccacctctcccagcgacttattaaagaggctctgtccccacaaactacaggtaacagtgtcggaggcaccagtggactttaccttggcatgcacgatggggtttaaccacgcgggagatgcaccattgtagggacacgtggggttagccctttgcgagcatcccctgggttcacctctgtgcccatcagcaaggtttagctttccgtgtgtgtgctgtattcaactccctgcagacacacggggtgtttctggtgcctgccgctgctagaatggctggttttgaattggtgtttatttcagtaataggatgggacacgagcagcgctcattttcactgctgcctctcttaactgctttgtgccccctccgctggaattatgagtaggtcaacatgagtcatccaatgagagaacaggggcttggagtggcgagactgcagaggcgcagggaaatgaaggagggggtgagcagtaggggcagctcagaccaaagagttgggaggcagagcaggacgacgtgcattgattgtgcccctactgtgtgccctttaaatccacccagttgtccattcagtatatatgcatgatgggcctactaggtgctgggcatgtttaattttcaacctaggcgcattcagagaaagctgccattcagtgaggttaaatgacatccttggacacacagctgactcagtcatggagctgggatctgtccccagatctttctgtttctgcccaagcattgctttctaaagcactgtcctgcttctcgaaggtctagcttctattataaccccagagatgtttttttatctttctgctctcttctctgttcctcccatttgaaacaatagttaacgctttcctttgaagtaaaaattccgaagcagagaaggctggtgataaaggagctgtcacatcagcaccatttacctgtttgggtttattcagcagaagaggcgactgcgtttctggcagatggagacccgtgtgactgccttttaaaatactgtcacagctgtatgcgcaagcggattagctgtgattacactgctagtgctgagattgatggggataaatttgggataacaatgctggcaacgatgtcactcgtttgtattggacttcatattttttaaagctctctcaatcagtagccccgtggttatcgaggacttggtatccgtccattcattgatgcattcattgctcaaagtgcatttgaaggagtcagtttgaacacacatcactttgattcatttgtttattcaacaaatattaatatagctcctactgtatgccagtgttgaacaaatccagctgggctctgtcctcgtggaacttacattctaatgtaagcaaggtcagtgctttcagctggtgatacaagagtgaagtattataaacagagtgatgtaataaaggtggggagagagcgggaggcaggtactactttaggttaagtggtcagaaaaggtctctctaaagaggtggtatttgaaaggacacctgatgacaaagccaagccagcaatactgggagaaatttcccaggcaagcaaatgcaaaggtcctgaggttgctgtgcatttagctttgggctgacttgctgtttgccaagcccagtgccaggcactggagattcccaaacatgtggagcaccacacttgccctcacagagtctccagtatattggagtatagaggagagaaatgcacaaacagcccattttaacatagtgtgatagagtcagtgatggtgacataaaaatggcgatataaagaggatgccttatcagcctgtgtgcaaatgatcagagaaggtgcttcaagcagactgacataattggtgaaacttgctttctgtgacaaagacagtacccacggtgtctggcctgactctccccttggtttgtttccacaggacaaatgaccagttggtggcgtttctctcccgataccgagatatgaatttcttgaagtcacacggccgggacaatgcaaggtagcacctcaacccctacccctgtacaaaatggaaatgaaaatctgagtgatcatttggggaattttctaggctggtttcatgcagccacagaaaggttgagggtgggagaaaggcttggcaccagctgtccttcgctgtgtctgcgtgggatctgaagtagtcccttctgtcagccaaggacaagataaccatagatgtttctcatggtgtgacagcccttttgattacttcccccaaggacttccacaagtccaatatctcattgcagcaaccctttcagtagggcacccacggttaattctcattttattgatgggaagactgaggcccataatgtaagcaacgtccccagatcgttcattcagtcagccactcattcaaatacttaacaagcatgggcgtgtgccagttgctgttctagccgcaaacaagaccaagtccttcctctcagggaattgacctgtagtggaaaagagtgtcataccagcatggacttgaacccaggggtcctgatcccagccccatgtcctcctcactccctcactggtgtccaacacatcagcaggggtgggaggcacccagaaccccaacccagatccctcacacctctctcgcttaaaatgaacaatgtcaaaaaaatagcatctctacagttcagcactgagctgagcccaagtctccatgatggtccatcaactggaagggatacagtattgagcgccccctgtaggtgacatcacgtgatgggattcctcattccaatagaaaataccattaaaggccaggctcatgcctgtaatcccagcactttgggaggccgaggcgggcagatcatgaggtcaggagtttgagaccagcctgaccagcatggtaaaaccctgtctctactaaaaatacaaaaattagccaggtgtggtggcacatgcctgtaattccagctactcaggaggctgagacaggagaatcacttgaacctgggaggcggaggttgcaatgaaccaagattgcaccactgcactccaccctgggcaagagagtgagactccatctaaaaaagaaaacaaaaaaagaaaacaccattaaacaccagtccagggtggctctgacatcccggggtcttgttctagcattgaacctggcagtgcttgggatcatttcagcttgttaacgtgcatggtttagctctcagagtgttttgttttgtcttgttttcattcaggtgcttcatttgaaaattaatagccccatttaaaaacagcagtatttcctatgaaaatccagatttctagccagtcttaaaaaatctgaaggtccattaagtctgtgcctgaattttctcatggcagttatttcctggatcttaggtcgctcggtccttgcctgtccccgttccccaacctggcccccgaccacatctctgtttgtaatctctgctttaaatcttcactgctgttgttggtgggagtgtcattttggctggctctgtgacagtttacccagttatccacagcatgggaggaacaaaagcaagcaggtagctccgtctcctgagctttaaagaagtaatctggccaggtgcggtgactcaaggcctgtaatcccagaactttgggagggtgaggcgggcggatcacctgaggtctggagttcgaggccagcctggccaacatggtaaaaccccatttctactaaaaatacaaaaattagccgggtgtggtggtgcacacctataatcccagctacttgggaggctgaggcaggagaatcgcttgatcctgggagtcggaggttgcagtgagtggagattgtaccactgcactccagcctgggtgacagagggagactccatctcaaaatagaaaaaaaaaaaagtaaccctagaatccttgtgttgtatcatttttctaaattgaaactttgatttcattctgctatttatggattgttcctgcccctactcacagcctaccttctttacattaaaaaggaggcctctttctgcaacacccgaacttgaagatgctctgtaaattagcacagattagtttactacgctcaggccactaagagtacagaggcctggctggatgagtaagaagaatcatggccactgtgtattgtgttcctactaagtgggccctttttgtataggatccatatttgttttcacagccactcaatgcagctataagaattattctccccatttgtcaagcttctggagtttacctgatttttctgaagatcacacagctggttaaatgctagaatttgaacccaagtttttctggccccatagctgcaggagcaaagtggggctgggcaaggattccatggaggtggttaattgtcagaagtggctcagacattggtattcctcgccctcaggtagagaaggaaaaacccttcttcttctccaggtagcagctaataggtgatttgtgcaaagttgtgtctcgagaaaggagcccattgtaaatgtatcaacttgtgtgtgaattacatccaccctagtattaactatttcagcctagtcaggatttattctctgagcactatttgtcaggcactgtgctaggaactgagtatagcacaagttaaaaacagggactgtgaggttacaccttctggtttggaattctgatctactgtgttctagctgtgttgcattggacgagtgacttaacctctctgaactggtttcataatatttgaaaatattaatagacctatactcatttattcattgagaagattaaatgagatgctgcatatacagcatttggcatagtaaatgtttatgatgatggtgatggtgatgattatgtcattgttatgataagcatagaactaaattgttgctggtaggagaaagaaatagatggagaatgggcctgaattttgcctctaggtgcctgagtacattttgtataattgatgtgcatccgtaattgacaggtggtacccagatgtcttgggacaacataaagaagtctcaggctgaggaaatgcttcttacacctccctccaagaccctaaaacccaaaggcctcttgacagaatagctcacaacttccaactcttgcgtgtgagtccccagctgggattttctcatttaccggaagttagggcagtgattcagcattaatttaatagtaaaacaagccaatgtcccattcactggccacttccctctttgttagctgtggcctcacctgctgcacgaataagcctacctatagcccatcatccatggtccctcccaagtgaccagagctgggcgtggcttgctcaagttctttcactggtgatgtgttagggagaactcttttggtgggaaatgacagaaacccagctcaaactagcttaagggtaaagaacattaccagatcaggtaactaaaacattagggctgacttcaggtatggctaaatcaagctgtgcaaattatatcatcaagcccagactctctattagttctgtttttctgtgtgtatgtttaattttctggcactgggtggggattattggcaatatattagcctccttttatagataagggaactgagactcaaaaagatgaagttacttgctcaaactcacagcactagggcagcggggaggactcacacccaagtgagtgttcacagagtccaagctcataattctcacgtgatgaagcctctctgtgttctaggcctgctttcttccaatgcactggtgactttgaggcagctactctgcttctcttgacttcattttctccctttgaaaaacaagggggttgcatgagaaagtctccaaattcccttcccattctggtatttcatgtgtccagaccagccctggtaaaagaggaggtgacagaggcagagatcttgaaagacagagagatggggatgaacaaaggcaagcagtgaaatacagaataggccacggggtgcctcggtttttaattccacgtagctcctaatagcaatgttgaccttctgtcttcatctccaacctttagcagccaatttggacttctggctcccactgtgaagagatggcataaaggcaaactagtattctaatagctgccaaattggtcctgattgtttctgttattaaatgaaggggagggttgtgttcactgtttctccttgctttcctccaaaagtaaagtcactagatacattgcaagacaggtagcacaattgtcattttcccaggcagcctcagcagggcttgcagaagcaggtggccgcatgtttactctcagcctgaataatcaggtatttggaaacatccctacaagtccctggccttggctcagggagcatcagagaagtttttcaaatctctgaaacctgttcaagtctcagtgtgtggggacaggcctcttccagggagctggaaagtgaaaatcggagtttttctgagacttttccttccctggttgatctaatttctccacttcatccagggtcaccagggcccccatgttagccctgggacacagtgtgtgaagtgccagagcatagatgctggagtccagccacctgggtcgaaatgccagctcttctataccacagccatgggatgtcagcaaatggcttcgacaggccatgcctctgtttctccatctttataaaattcaaataatgatcatgggattggggagatggagcatcctcactggccacaggaaggccccacgctgggcgcattccaggacattttctcatttcaccttcatttagcaggtgttaccccatttcagaaatgaatacagctgaggtttgagagtcgctttaccttagtcaaggccctacagctagtgaacgacagagctgagatggaacctggttccgtctgactttaaggcctgtgttcttttattactccatagtgactgcatttgagaggacctgcaggtttacgctctcgaggtgtgcagatgaaagaaaatcctgctgaatgtaaatagaattatctttttgcatgggtgagggtaggtccttcccctacttcctagggtcagcattttgcaaagtgtgtttatgtgccaccaggacatgggggattcttttgggtcctttataagtgggcatgctatgaaagttaggtattgatcttatgtgtatcaacaaatttataaaattagctgctccaaccatgacttatggatattatgcttcgaataaggctacattgaaagaaaacagttgaagctatttaaagttagcttagaggccgggcacagtggctcacacctgtaatcccagcatcctgggaggctgatgtaggaggatcgcttaaggccaggagtttgaggcttgcaccactgcattgcagcctgggtgacaaagcgagatcatgtctctaaaaataataaagttggcttagagcagaatattaaggggcctcttgtataggatgctacataaagcacatagcatagcagttaagaatccaggctctggagccagactgtcaagattcacgggccaactctaatacccactcacagtgtgtgaccttgggtaagttacgtgagttacctgtgtatcagttttctcatctgtaagatgggaatgaggataatcataccaatcccatagagttgttgcaagaattaatatatggaaaagcccttggggacagttagttgcgcctattaagttgatgatgatcacaatggtggtggtagtagtggtgataatgatggtgttgttgatatgagaagaatcttgatgataatatacacataattaagatgttacaaaaatgttcaataactcttatgttcaataactctcatgtccactggggacatgggagattcttttgggccctttataagtgggcatgtgatgaaagttaggtattgaccttatatgtatcgacaacaatttataaaattagccactccaacccatgatttatgggtattatgcttaaagtaaggcaaagcatagtaagagaaacagctatcatttcaaatataagaaagccaggcaggtagattccagccccaggtcagaagtggtatagagaagtttctctctcttctctggtctgaaccccatctgccagaggcagcattctcctattggaggccgggatggcatctgagctgcctccctagctccccttttctgacattgaactaatcatcagacccaaacctcctttgatgtataaacaagcaaatgtttaaacaaaagttggcaaatcagtcgagagcctggccaggaacctcctccaggcaaatccgcattcgggaaggcctttggtgccagcttgcttattgagagaagagctctgtttctggctaacttgtagctccatgactgatgcaaggagatcattaatatctcatctccaatagggaaagcagattgcatttctcttttgctttccttaaacccaaccgatgcgttcatgactgtttgcatgttcactttatttaatccaattatagcagccacgtcaaaataaagtctggcattatgtaggcacccacacaaaactgcacacacatacctccctgggcctcagcgtgtgtttttaggtcatctttagaacttttcttctttccaaacaatacacaaagaagttagacaaaagactagaggggaagtacattcccagtgtcatctctgaaaggtagagtatgatttttattttcttctttgcatttttttatgttccaaaccatctatcaaggctatgcattccttttataatcagaaaaaaggcagtaaacaatgttttcaaaaatacatgaaatgtggaaaaccaattagccctcaacagacctttagacgcttggcgatgcaagctgattcagtgacgtgagccctgtgaagaatgtgagccaccaagcccaggtactccagcctcaggattcaggccactgactctgcatttctacttgagcttctttttctgccctccttgggaaatataagaaagccaggcaggtagattccagccccaggtcagaagtggtatagagaagtttctctctcttctctggcctgaaccccatctgccagaggcagcattctcctattggaggccgggatggcatctgagctgcctccctagctccccttttctgacattgaactaatcatcatccttgaatgtcaaacctaagtcagctttctccacacagggcagcaataataactggtacatgtgccactgattatcctaagcaccttacagatattcactctttctacaacaaccccatgacataaatgcgatcatcatcgtgcccattttccagatggggacactgaggctagaaagattaaataacacacagctcataggtggcgagacagacttgaagccaagcagagtgactccaaagttggggttctttttatttttctttttgagacagagtctcgctccatcacccaggctggagtgcaatctcagctcactccaacctccacctgcaaggtacaagcgattctcgtgtctcagtctcccaggtagctgggattacaggcatgtgccaccatgcctagctaatttttgtagtttcagtagagatggggtttcgccatgttgtccaggctggtctcaaactcttgagctcaagtgatccgcctgcctcggcctcccaaagtgctgggattacaggcgtgagccaccacgcccagcctgaagtcagggtgcttaaccaccatgctgcactgactccctaagggtgctgactgcggagtttccctccatatccaagccacgtggacttgtgggtggtatgtcccttccaccaatcagatcaagtcggcccctatgaagtgaggttctgaagctgaggacttccctgtagcttcctttggcagccacagggcccttgcactttcaattttctgtcactcataaaggccttccccataactccttagaggactgattccttctctttgagcttgcatgccacctgctcctcagtgaagccttccccaatgatctccactaattaagtccctgtctctttattttctatcattacccccatatttgttcctatatagcatgtaattttatatttgtgtttcatatttctcgatgtctacttacttattagaaccttgtggctagagtgtggaatgcagagcctgacactaaggcttgattcccctcattgccactcaccagctgtgtgggtcttgggaaatttacttaacctttctgtgtctctgttccttcatttgtaaaatgagccctcatggggttgcagtgaattctaaacagaagaatatatattaagtgcatagaacagagcctagaatgtagtatacgctcaataaatggtagctgttattatttacgctttttgtcttgcctagaagagagagaagggcggggtgatgtccattttatttaaaaccattttctcagtgcatagagcagagcctggaatatcgaaggtgctctctagtgctgctaaaggaatgaattcctcaagcattcttgatcttccagctactgtaggatagaggaataacaattgactccagctcaggcccagaaggggcacagcctaccgtgggcctgagagaaatggctagcaggggccctgaggaactgccaaacttcaaaatcagggagctgaatcctcgcgagctcatccagagcttggacagaattagaaggatggccaggacacttgtcaccttcatgccacaatcatggctattgcacaactaaaacaaggacttctgtccttggtgctgaaatatcattgctctgccagactaaaggatttcttcttagctgtggaggtgtcctatgtacctgtctaccaaatcccagaagagagaataggacagatagaaattcaccctgataaaggaaaaaaacataaagcatcgtaatggacattatggagcccttactatgtgctaagccctccctgtatacaatctcatttgaatcatcacaccagctctgtgaattagctattatgatcaccatttcccctgtgagaaaccaaagtaccatatgattaaagttgcctaaggttagtagaagacacaagacttgggccaagtaatctgattccaggactcaaaatcttgccactgcatcccaatagaataatatttagctgtgactttgtgccagtagagaaaaatctcaggcagctaaactgccctttcctgagagcctaggaagagatgtgtgagcctgttcacatagctgactgatttcatgcattgtgggtctatatgatttattccatgactttattttttaactaaaatccttaggttgtacttatgctgaaggagtaatctagattcaatgacagattaccagacaggaaaacagaaaagggggagattttattttttctaggcattgtgactttggatgtatcatttgtactttcattctcaggttgttttttttttaatttgtagcattagctatattagctgcttgtgaagattccttcttgctcagacatgctgtaaacttgaagagcagagttattccttctaaaacttacagtgggacagcttaattctggaataattccatacttgatgaatataccaagattgtagccagtgaattaactgaattgagaaacttctttgttatccacctttctgacattatttccaaaagccacagatgtttttttaactgacttcttctcccatgggggagaatcaggacttcttcccaccctctgtctgatttactttgatgctcagctgagtagatttggtccctgggatgtcccaataggatcatatttagctgtgactttttccttagtgtgctaataggtaaaaatatcaggaaggtgagctgccccttcctcatagcctaggaagtaaaactgaatgcaaatgatttcatatttgacctcaggtagaagacagatatcttccagaggtctggcagaaagattcttccaaagccaacaataagcccttctcttttgattctctctcatttctgggcattgtctttttcaagcattagaagatcacagatccgttctttctatctttttggtgggactatggtgaatcggggcatcaaagatggcagagtagttaagagcttgcattggatccagctagacctgcatttaaattcaagacttctggctgtgtgaccttgggaaagttacataacttttctgagcttcaattttcttttctgttaaatgtgtgttagaaggatccaatacctagttaacgaaagtctgtgactgcctgattgcccaacaggtgtggctgttacccttctttttattcattttttcagtaaatatttattaagcaccagttgtatggtaggcactgatgtaagcagtagggatacagcagtgaacaaaaataggcaaaaatctctgccatcttgcagcttacatctagtgagtggaaatagacaacagactaaataaatatcttgtatattgtgttagaaagtgaaaagtcctgtggagaaatacaaagcatgaaaggaggattgaggatgccaggcatgggggagggatgtcatccttaggtaagaagggattgatggttgagtcggttcattgcttgggtgaacagcgcttactaaacactttgcaaggccctgtgagaagcatcatccatcacactttgcagctgattcaggaggctgtcaagacacaggtgtcatggggcttatcttacagatgaggaaactggcattcagagaggttaagccagccccacatctcatagcctgtgaatgcagaggcaggattagtacctagatcacccaatgtctgtttgctgtagtgtcacctgttgccccagttgccccaggtaacctactcaatgggaaatgaaaaggaagagcgtatcattggtcaccttttgtatatggggcttattgctacagatctgtgcttcacgcctcaggtgagagagccatgcgccccttgttggtgagccatattttataaaaagtcactcaggtgttcactgacttaccttgccttccaattttaccttttcaagttatggtaaagaaagggaagaaaaaatgcaaatccctgcccaaacagctgatgcctctcccctggtagataccctgttgctgggcctctgccaccatctcctagtccaagacttaagtccccattcacccctgtgactccagaaacttttctgagacctagggaattggttgtctccatttactcttagttaaccaaagcatgcgtttgcagcatatcagtttttgaatgtgataaatacagcaacccatctcccaatcccatgaatatttcattttggagatgactgcataaatattgtatttgaatattatggtccgggacatcacattaaaattgcaagacgatgctattatcccatataatggaacatgaaattaaaaactggaaagaaaaattttgctagtcctctcacctgtatttcttctctgtctgtctctcatggttagtctggtaaccatgtaagtttgaatacaaattatctaaaattgaaagtttcaagcatggttaagtgcatcgactggacatttttgtataattagcactagccagagtcaaggcagggttttattttcctaaactcaggggcttcctttgatgacccagttagagctcagttacatttcagtgggttaatactgtattacaaaaaatcttcgctgagttccttcccagcaagaacatgactttgctaatgagcttggattatctgtcttccattgtctgtctgacccctatagggatttaacttcacaacccagacctagcccaattttgtattttaccaagggggaaactgagacacagagaggactgctctgtagcaagaacatggctttgctaatgagctcagattttgcatgtggaaagatgtgttagagaaagagcaagacccgtgacataggacagctgggtcttttgattggttctacccttgtgttgagtcctctgtgtgtccttagaaaagttgccagtcttctctgggctcccgtgtatccatatgagatgtattgcttgccccatgcccttttcctgagtataacaatgtgacttatagaatgtcaaagctggagagtaccttgggaattacctaacccaggattattgtgactggaccgatggcttatgggctggattcatcctagagagatgttttattcaaccagaaatgcttttttattttaaaggagtggaagtgcatttcagaatgtgtgttcttcacttctctgctaatttcatcagtccttgttttttcgtattcaggctgcttcacacgcttccattatctgtctgaccgccctgtagggatctaactttacaacccatatctagaccaactttgtattttaccaagaaagaaactgagactcagagaggactccttaacattttgaagtcacccagctggtgacaggtaaaaccacactgccccacagatgaaaagcacatttcagccgaattaagtctgttccctgccagcgttaccgtcatcgccatttcattacaccatcatccattttgtgatgacttaggtgtactatgtcattatcttccatagtagccaatgtctagaggtgggttttctgctcatgcagaaaagaaatgctaagaatgtaggtttactaatgaggtttcaagtaattcccctgagtgaatgtcagtggatttgtgggaagcccggtgagagggaattctttctggaattcagcgtgactaccagggcaggaccatcttcagcttccaaaccctgaagtctcctcatcacagtagacttttcttgagcagctgacctgcactgtcctaggacctggaagggaggcacaaagtccagagccaaagtgtgttgtagtgagaataaaggctacctgcgaggagacaggtaactccagtctgaagacagagtaacgaggtctgttgcagaaatgcagacagctctagaactctgagcagactggctcagtggaagaggaagcatttttgtgccacagccctggctacctgccctgtctggagcctaagaacctccccacacatcatggttgtgattaagttgaaatcattcaggcatgtattaggactttttcaaatgcaagtgaggaatctcatctcaaaaatgccttaagcacataacacacaagtctgggagagggtcaggcacagtgagatccagaatctcaagtgaacccatcaagcgcttggcactgtgtctttctgtctcctatttccagtttgctccattgtcagacaacctctatattcatggtgatgagatggctaccagcagccctaggctgacatcctccctgccagaaatctcatagaaaagcccctccttctcactaactccagcaacaatccaagacctagtctcagacccagcttgcattgctggcccatccctgaattgattatggaggccagacagatgggatgctctgatccatcctgggtcatgttcccaccccctggtgctagggtgaggatacagacccaagtaaactgagatttaaggatgagtccaaagtaaagcaaaatgtggttcccagaaaaatcataaatggatgctgagcaggcaaaaacaaggcatggagcaccgatacctgctgcagcatggatgaacctggaaaacattatgcgaagcaaaagatgcagacacaaaaggccatatattgtatgactgcctttatatgaaatatctagaattggtaaatccatagaggcagaagacagactgatggttatcaggggctagcatgaatggggagtggctgtgtaatgtgtatggggttttcttttgggggctgatgaaatgttttgaagccaggcagaggtgacagttggacaacattgttaatgaactaattccactaaactgtacaccttaaatgcttaattttaaaccactgctgttacagcagagcccctgatccccctccagtctgcatggagcctgcatggagtaggcactcggtgctgcctgtagcaatccacacagcgcctttgtggaaaatagaaaaggcagctcttcctcgagacacttagatccccttcatcataaaatcatttcttggtctcttgttattttacattgtgtggatgttatctttattaaaaatgtatgaccttttcaatctgtgtcatctgcccagagcaatctcccaattaagccaaactggtctgctccccagatctctgatgagtctgttttctgtctagaatgtccatttttctctcctccctgcacccctcctagtctgactcaagccctgcctcatccatgacgccatccctgaccaccaaccaagtccacagcatgctggcttttcacccttgccctagtccccatttttccagaagttcctcgaaactcatttaacctatggttatatgtgcctgtatcatatttgcccagtcagactatgagttcctagaagataaagcctgtcgtttatagtgtttcctgtctttcactgtacccaccacaaggctggggttgtggtaggtgctggacatgtatttgcctattgatggattcagtatctatccattctgtgaatactcgctaagcacttactgtgtgccaggcacagagtgatgagcaaaaacaagaacaaccctagctcacatgaagcttgtagtctactggaaagggtagacagtaatcacagaatcacagaaatgtgctatggcaagttgctgagttcatacacctgtaaatatgggttaataaaagtactgtctctggggttttcatgagaattaaagtagataatccatataaagcccttgtaatgataatgctcatatgttttcattgccatggtgatggtggtagtgataatggggatgaagatggtggtgatannnnnnnnnnnnnnnnnnnnctctgatcgatgaaaagaagttcactcagggaacactgaaggggagaggaagaagacaatcattcccagcacatacggagtccatgaccaaaggcacatgtgtagggaaactgtggtggtgtggagaagcattcatacaatagagttattcataagggcttgaaaaatccagagtcctggtcgtgtgtaagggccagcagcctgaaggagcagaaaggtccctgagttcaactctagactgtaagctcccatctagataactagctccttaggagcagagctcgtccttacttctccttgacctgtaccatgggccagcacagtacctggcacgtaatacgtgaaaatggtgatagtggtgctgataatgaagatggagatgatgatgatggtggcagtgacagtgatgataatgaaaatggtgatgatggtaatggcaatgatggttatgtgtgcaatgaatgctaattgctaatggactgagcgtttggcccaaaagccttggttctagctctgtccaccctcccaacatgcccacgtcaccagctctgggacctgaacagctttggtttctgcatctacaaaataggaaatgccaactctgcccagcctgccttgcaaaattctaaacaagatgattatatgtatatagttactagagtaggagttattaatctagggttcatgggaaaaattcaggggaggttcgtgattttggatgagaagaaaatgatatcttttttaatggaattctaactgaaatctagctaaaggtaggtaacaaatcacagtagtattagcagtaactaactgactcggtcaccagtaggaatcatctattttcctgtcacattatagttggtgcagatacctctaaatatcatttatgctcaccactacttcaaaatttcaggagttaggccaggcgcaatggctcacacctataatcccagcactctgtgaggccaaggtgggtggatcacctgaggtcaggagttcaaggccagcctggccaacatggtgaaaccccatctctactaaaaatacaaaaaaaaaaaaaaattagctgggtgaggtggtgtgtgcctgtaatcccagctactcaggaggctgaggcaggagaatcacttgaacccaggaagcggaggttactgtgagccaagatcatgccactgcactccagcctgagctaccgagtgagaccctgtctcaaaaaaaaaaaaaaaaaaaaaattacaggatttaatagacctgccatgatatcttgttatttaatgtattaataaagaaacacacgtagtaccatacattcagtgttttaaaatgtattttgtaatccaggccccatgcagtagctcacacctataatcccagcactttgagaggccaaggtgggaggattgcttgaggccaggagttttacgccagcctaagcaacatcgtgagaccctgtctctacaaaaaaatttaagcagcagccagacatggcggtgcatgcctgtaatcccagtgctttgggagcctgaagccagaagttcaagaccagtctaggcaacatagtaagatcccatctctacaaaaataattttaaaaatcagccaaacatggtgatgcatgcctgtagtcctagctactcaggagctggaggcaggagggtcacaggagcccaggagtttgaggctgcggggagctaggatcacactagtgctctccagcctaggcaacggaacacgaccctgtctcaaaaaataaaaattttaaaaatgttgtaatcctgtatataatgtgtgagtcaagaagcacaggcattactttatatcagaactttggtggatttttatttttcgctgtttcataaccctgtatattttgttgtatgcattgaagagtactattctgagacaagggtccatggtctgcattcactaaactgccaagacctctatggcataaggaggttgttgccaaagttctctagagaaggagtagctgtagcagatgatcactgtcatctgactgtgctgggtaagtcccctgggctctctaagcctcagtgccctcatatgaaagttgggggtcaaatagtacctgcgtcataggggtaaatacggtgacatgcctcacttgtggggatcaagtgataaactccacgcagagccctggagcagtacctggcacacagcaggcactcaataattgccatcatcgctatgattgtgttgttttatttggactctggctggagttctgtctttcaggacacctctgggctaagggcagctttctccctcccaggttcattcggaagcagggcctggatcggctcttcctggagtgcgacgctcacatgtggcgcctgggagatcggcggatcccagagggcattgccgtggatggcggttcggactggttcctgctgaaccggaggtttgtagaatatgtgaccttctccacagacgatctggtgaccaagatgaaacagttctactcctacaccctgcttcctgctgaggtgagtatctgggaaaattttcccaagaaagataggggcttgttctagcctttgtggcaaagcagatgctgaatttttggcaaagagattctgggtccacctacattgtcctctacacacccagacatccttgctgtcttagcaggatgcctggtctccctccagtctgcacagaggctgcgtggagtagacacacggtgctaccaccggcagtccacacagtgtctttgtgcaaaatagaaaaggcagctcttcctcaagatacttggctttcattggtcataaaaatcacatgatacacagattttgttagaacaagaaccttatggctattttccagaaaactgttatttaaaaaacccttctgacatccacaatgctgatggcacccctaaaaggtatgtagtgtgtaacctgcacaactgtatatgctgaccctttcaggacacacccacatcaactttttttttttttttttttttttttttgagacagtcttcctctgtcatccaggctggactgcagtggcacagtctctgctcactgcaacctctacctccagagttcaagcaattctgctgcctcagcctcctgagtagctgggattataggcgcccaccaccacacccagctaatttttgtatttttagtagagatggggttttgccatgttggccaggctggtcttgaactcctggcctcaagtggtcctcctgcctcagcctctcaaagtgctgggattgcaggcatgagccaccatgcccggccgccacatcaacttttgacgcatccttcacaatgaccaatcatgtaatgaccacctttttacaccaagcatgccttttctcatgttgaacattgctctattattccctgaagaaaagggtgttggtttcataagtcatactccattaatccagagtattctaaaacagtcctagccccatctagaagtggggaggggatccagttctgaaggattgtcactgacattcccttagctgcctgccggtcagagctgggttgagggattccagattcatcttcctgacctccaggttgattgcaccctcatttccaatccagcttgagaacagtgcagagctggttccgtttctattgagtctatggcatttctcatgaacggtcccttgttccttcccgggaccacataggttatgtgtgtttctgcaggccacactcccagcacatctctcacctgtgtctggggcagtgccaagctccggggagggctgactgcccccatcacccagagggatgatgagcttgtcatcactgggccaggttttactattctgcacacatgttaagtaatcagcttttaatcctatttcagcaaaaatcaatcacctcttctctcaattctgataacctcctcatccattatattgcagggaatttctgtatcattatgaaaggacacagggcaatcagtaattgggtacatcttcccactgcttgttggagaatgtatgcctccctgggcttgtaggcaattcaagcttaaaatccaggttcatgggcttgtcatttagtgtcacaggaaggtcagcagggggtggcggctggagcctcatttacccacccatccatttagaagagattgtttgggagtttggctatttttaatcaagacgcccaccacgatactggtgaccaaagctccgtgtgtgtgctttctctgcccctccctggccccagcacacacaagcacatatactccagggtctctgttcagtcccacctcctgcatctctgccttccctcccttctcccagaccacttcaagaggactggtttagaagaaatcagaaggctgtgcccattaacttgtaacgggcagacacagattccccaacagcttcccttagggagagagaacagggaggaaatatatttgcctgggactgtctattatagaaatctttctctcactctctggcagtctctcaagtactccagtgattgattgtttctcctctagtttttcttttcagatccaacatggcctctttctcagatcccttaaagcagttggccaagaatcctgggattagggagaaaatatggcacctggttcagtaccatggacagcaagcagccccacccactcccttccctatgttgccgtctggcgatgcaggaagccctgggtctaatgcaaccatcaatctggtctccctaccccaggggtgaaattccagcacaccagtcagtcagtcagacttgaatccctttgatttgtctgttggacagagcatccgcctgcgctctgagttggaccacatgggcagctgacctcaaatgcatgcagagaacataagagtcccttgacagtcaggtagttgtgttatacatttttgcattgctatgaaggaaaatctgaggcttggtaatttataaagaaaagaggtttatttggcttgcagttctgcaagctgtacaggaagccgcccagcttctgatgagatgccacattcttttaaacaaccagttcttacatgaactcagagcaagggttcaccatttcccaccccagttcatctgtgggaggctgggagaggtctcaggctgggtccctctctcccctgcagtccttcttccatacggtcctggagaacagcccccactgcgacaccatggtggacaacaacctgcgcatcaccaactggaatcgcaagctgggctgcaagtgccagtacaagcacatcgtggactggtgcggctgctcccccaatgacttcaagccgcaggacttccaccgcttccaggtgagactttctcatggtctgccagcctcctaagtgatgccttcccaacaaacctctgcagaaatccaaggccagacctgcaggtcatcttatcacatggtgcccaaacctggctgttgataataatagttaacagtatcaacaatagccagtgtttattgagcacttacttcagggatgttctaaccacattgactcattaacccaaaaacaacaaatgacctttcattattattccattttagggatatgaaaactgtgaggcacagaaaggttaaaaaaaactttccaaaggccatactcatatcatcttctctttattcccttttcatcagaatctcccaaaatatttgttacatttgtacccaggaatatgcttttaagtatatatctagggctgagcttttcaacctcagaactcttgccattgtggctggatgattctctgttgggacatgctgtcccatgcatgggtaggatgcttagcagcacctctggttgagaaaccctcatcagtgatatcgacgaatttgtatttttaatgaattgcacttttctgaggagcagccaggtttggaaaccactgtgttctgtgggaaaacactgtgttctgtgtacttgaaggagtaagaagaggtagaacattatcccctttacagctgtctctgggcagcctaacaatttacagttctggggaagggcagagcaggagggtggggaatgctcatccacttaccatgagccctgagagtgcttggccccaagatgggcaccccttcctgctctgctccctccaagccagcatggtggcttcttcctccagccctccccacacctagcagcagagagcacaaatatgagtgccactgaatggttaagcgaatcactctgaggtcactagagccaccgtgtagagacggtatgctacttcccaaaccactaacacaggaaggcagggacacaatgccaggctcataacccagccaaggtgcccttgatgtggagcgggatgctgtttgtttgtgtttgatctcctctgtgccgggctgtgtgggcattggctttactggggcagacatcacttttattgttcaggtaaggaaacgaaggcatggaggggtgttccaagtggggtttttttccagcagtccctgctgccttcctggtttttgtgcctgtatgaatgcagagtacactgcaggttttctgtcgttcgtattccccttaaggttcccacacagcagctccagccaccttaagctggcagacagggggctgcctaaactcacatcttccctgcagaaaggatatgctgagccgaaagagggttgcaggggaatgtttgtttgacctattcaatgaattcccatgtttggagaggacccgtccctcactgccctaatcgcagagaatcttcatcacttagagcacaaaacctccacgtgctgattcccagagccctgcactcccccaggcacaagcatttgtatcctagcccggcatcctggggacattgtagcctctgacaaggagtgcctcatgtgttcacagcaagcagagattaagaatatcccccaagatctagagtcaagacactgctgcctgtaaggaactcagagttcttgcgcgaagaacttggagagaaagaataatatggtaacgtgccctgtttgttagaagatccagctatggtcggaatcgcaggcagagaaaggagtttgttctgcccctagatgggttcctggtaacaaggggctggtgataataatcaaagagcagcctacactatgtgctagacactacgctagtaacccattttaaggatgctgaggcccagagagtttgagtaacttgacctgcacagctagacggtagccaaatgaggatttgaattcaggtggtctaactctctacagtgctaagctgtgctccccaccacagagaggtttcctgaagcagactggcaatgagatgtttagaataacaccaagggtacttacgatcagggggcttcccagtttactcagttgcctcagtcctggagtgatacagtagaaagggcttggattttggagtcatgcatttgggcttcaaatcttacaatggtgtgagtctgtacatatcgctttgcctctctgagctcagttttctcatctgtaaaatgggaatcataatacctgccttgccaagttacagggaaaattagaggtaatgacataagtccattgccctgcgtattgtgtgtggtcagtagttgttgctgctattaatctaccaccatgaaaacagtgctggacccaactttaggtcaataataacactagacaataataagctcctcaagggagagacctgtgttttatttgtctccgcagccctacacaaggggtcagcaaactctagccctgggggccaaagtcagcccactgcctgcttctataaatgaagtttagttggaacacagccatacctatttatttagtctcttgtctgtctgtggctgcttttatgctataaaagcgaagctgaaggtttcaaagctattttaaatatttactgtctggccttttactgaatataaagtataacacctggtagcttacaggtgcttagtatttctttaaccctggaccctgactcttcgtcccatctctgatagtgacttgctgtgtgttctcagctaagtcccttaccatctctgggcctgtttccttgagagtttggttgctatcagtggtcctgaaacactgaatcataatcacctgggaattttttttttttttttttgagctacactccagagctattgactcagtaggtcctttttctctgagacagagtcttgttctgtcacccaggctggagtgcagcggcagtctcggctcactgcaacctccacctcctaggttcaagtgattctcctgtctcagcctcctgagcagctgggactacaggtgtgtgcctggcctggaatctgaatttttcaaagtcccagagattccgatcccttgtgagtctgcaagttggctgaaataccaaagaggcaatagggcatggtggagactgcagtgagcagaagaacctaggtgctgtctaaaggaacagccactacccttcagctttaaccagttgttagcatgtggagtgtgggcctggggttgccagatctattgctgtttaaagagaagccaaaagaatttccgtgaactctttcatgttttaaatatggctagctaaaatacatctgcaggctgtatttatttgccctagattactagcctgtgacctgtacctaaatgatgtctgagatccatcccagctattaccatctaaaattatttagtttatttaacagacatctaaatgatgcttactaagaaatgatgcttactaagtgcctatcattgctttagatgttctgcacagattaactcacacccttattataacccattttacagatgttgaaactgagaacacagaggtgcaaaaagtatcggagctaattcgggtccagcagagctttgcttctaaccacaggatatgcccttaggttccccccaacccccagcactcgctgatgtggcttttctatttttaatcccatgagtacagcagacagcccggcctaccttctttgcccgcaagtttgaagccgtggtgaatcaggaaatcattgggcagctggactattacctgtacgggaactaccctgcaggtaccccgggcctgcgctcctactgggagaatgtctacgatgagcctgacggcatccacagcctgagcgacgtgacactcaccttgtaccactcctttgcccgcctgggtcttcgacgggctgagacgtccctgcacacggatggggagaacagctgccggtgagccctatatgggatgcagagaggagagctgagaagcaggaggggaggctcagggtacagagtgggggtccttcttcctctttagggatctgcaatgcaatgccaccctatgctttctctcttcctttgcccaaaactcatctaacgccaccctcctagcgtgcgtggcatttccaatccaagctgtgctttactttctcagataccagatatcctatgtacccaatgattttactgattcttcatgctacatatatatactttagaaggaagctttttgtcaccatatcatatgtagcatttgtcttaagtggaaggtacaaaactttttttgatggaaaatgtcaaagatgtacaacatagaacagtggaaccccatgttcccgtcacccagccccggcagtttccaactcggggctgatcttgtttcattttcatcttcacccaccttccgcctcctcccggatcagtttgaagtcaatcccagacatcctatcatttcagccatcaatattttaataatgtatctctgaaaaataactcttttaaaaacattcaccataatgtcatcacacctaaaaatatcacaaagaaaattaataggcagaactattgttgaaacttctcaaccaccccttacaattgtctcatctaccactaactgccaacacttcaggaaagagtgttctagaagatgagggggaggtaggaaaataattcaacataatcccttctcctctcatctctttccctaagccagtcaagactttcacattgtgtaccctttcttttgttctgaagcaatatgcattttggatatttacataattgcaacaagaattgggtatcctgttttcttcccttggcattatactattagcccccatttctccacgctgctcagtagcttccgcaatgataatgattccttttaatgcctctagtattccattgagcagaagttccagagtttgcttaatctggcccttcactgttgccattgtcagtaatgtacccttgtaaataatgttctgatgaatatcttttctcagaaagccctttttttccattctctcttttgattatttccttaggatagattcccagaagtgcctctaatcactctccttctttttcttgttcatttaacaacatagcatcttttttttttagcgtcagtctctgacggggctggggggaagaagattgttcactaactctctgaaaacacaggcaggtttcccacctggtgtctcatccctggccagcaaggtttccgcagggctgtgacactgtcccatcacctcctcacatccctcggcttctctctccgtaaagtttctgatttagtttaaagggagactagtgtgggttaggaacccaggacctgcagtttaaactctgcttacaagctattgaccttgggcaagtcattcatctctctgagcttcggtttcctcatctgtgaaatgagaagagtaatactcatcatttttgtatcataaggtgttgtgaagtgtaaaggagataatcatcaaaaactacctgatgagttagttatacagtgttcttttgagacagagtcttactctgttgcccaagctggagtgcagtgatgtgatctctgcaacctccacctcccaggttcaagcgattcttctgcctcagcctcctgagtagctgagactataggcatgtaccagcacacccagctaatttttgtatttttagtagagacaggatttcaccaggttggccaggctggtctcgaactcctgacctcaggcaatcctcccgcttcagcctccctaagtgctgagattacaggcatgagccattgcgcccagccttgttattcccattttaacagcattttatgtactaactgctcagggttcaggtcattgctggtatcttagttgccagttgccattatgatgcagccaacagtgaacctgctgtgtgtgatggtaacaattccttgttctctccctgtattttctttgctcactgcctcccactgcacagccaccccttctcaagtcaacaaagccatccaaggaccacctcctctatgacacttattaagatagctcaccccacacccaccgtctcccaagctgaaagtagttcagggacttcaccttcagtatgtgcggtatcttggctcaaggtcaccagggagtctctctcccccccactgctagtctggaagcagaatccctgcatgtatccccagtagacagtgcagtgcctgccacttggaaggcaaatgtcgttccataataattacagttgcaggcttcctagaatgtataaggtaaatgatcttacaggaaattccaaaagacacccccaatttatctagggttgttgaaggttgctcctagtactcattttggaatgaagtgagccgtcacattgcctcgagccaggaatcctctggtatccacctcgttttttattgtaatggaactgtggtgccttgctgtgggcaaagccaatgtatttatgaataggagcctgaaaataaatcaggacaaaagacccttatcccaaaaggcagaagagaatggattcctagccccggggcatgtggggaaacagcaagtgaaaactttaacagtctcgttttatctgggtattttaggcaaattgtgcctttccagtctataatataacctttcattaaataatgtttattgatttttttttctcattataaactaacacatgtgcattgcagaagtttctgaaatggcaggttgagagaatcagagtaaagtttgcatataatctaccatccagaaataaggatgtcagcattttattgcaggtccccaaatgccctccggggcaggcacgaagcactagaatcactcagtgtgccccctgcagggtgggctgaccatgggaacctggaggtccatggagctgaaccccagtacattccgtgggaatgcagatggagttgccaaccaaatctcctaattttttttagtgctcatcgtatttaaataagaaagaaaaacacctttgggccaaacgaatacttcggttgcattcctgtagatgatgattgattgtgcggcatcttgattatttttctgttttgagacattaacagttttcattacttagataccaaatacagtcaggatgaggcatcagagggctttgtgctcactccttggttacagggactgtagatgtaacttgaggttcaagagaaaatccttctagaattttcactccttcaataagtactgattgagtagttatcgtgtgtcagcctgtgtgttaggcacggagaattcagccttgatccaggcggaccaggcctgtgaactcaaagccctcccattctagtgtgcagacagacagtacctaagcacaagtaaaccagaatataagatcaataagggtaaatgctgtgcaaaaaatgaagataaagtcatgtgagagtgacaagtcagaggcagcaatgaggaaggaagtggtggattagggtagcaggaaacaaaagggggctagagaaagcggtagggctttgtggaccaggtaaggagtttggattttactgaaagcatgaagcaaagtgcttgtggcatttaagtgagggacgatggacgtggctactatgggaacaggttatagtgggcaaaagtaagagagggtgacaattaaggaagctcctgcagaggcccaggtataaaaggatggtggctttgaccaggatgctggcagtgtgtaaggagaatagaggatggaaggggccaggtgtgatggctgacacctgtaatcccagctactcgggaggctgagtcagggagaactgcttgaacccgggaggcagaggttgcagtgagccagtttcacgacactgcactctagcctgggtgacagagactccatctcaaaaaatataaagaaggtgaaggaggcaagtaatcaaagattgacttctaaattttttggactgctgctttctggaaacactctcttcctttgactcccgtaacagcaaattctcctgctttacccacctcacagaacacacactggcagtgctttgtctattgtcacgataacactgtgaaacaaacaactcccaaatcagtgttttgaaacaatatgcattcatgtaatgctcaagttcgcagatcagctggacagttttcccagtatgggcaggccttgctcccctatctgcagccaactgcaagtcgggaggtggctctgtggtccttggctgggaatagttgcctgagcctaggatggcttcagctgggacaactggcgtagctctgctgtttcaaatgtctccttctccagcaagctagcccaggcatgctctcatggtgacctcaaaagagcaagaaagcaaacagaaatgtgcaaggcatcttgaggccctggctcagaactgacgtgacagcccttctaccactttctgttgtccaaagaagattccagaggtagaaaaataggttctgcctcccgggtacaaggaaacttgcaaagtcacatggaagaaagcataagataaaggagatgggagatttgggacattaatgcaggtgaccactggctctttcatgactatctttgctgtccaatacggtagccacaagtggctacttcagtgtaaattaactaaaactaaatacaatttaaaattcagttcctcagtcacattggccatatttcaagggctgaacagtcacactttgctagtgggttgggagacagctttcccaaagtctcacaaatcatcactaaagaacttactcatgcaaccaaacaccacctgttccccaaaatcctatggaaataaaaagcttttggcctggcgcagtggctgacacctgtaatcccagcactttgggaggccgaggcgggcggatcacttgaggtcaggagtgagtttgagaccagcctggccaacatggtgaaaccccgtctctactaaaaatacaaaaattagccgggcatggtggctgatgcctgtaatcccagctactcaggaggctgagtcaggagaatcgcttgaacccaggaggcggaggttgcagtgagccaagatcatgccactgcactccagcctgggcaacagagtgagactctgcctcaaaaataaataaataaaatatttctgtcatcgcaggaggttttatgtgatagccctgcctagatgttgctgcagtggtagaatgacagcacagtcgctggactttccactcccaaagtccagatttaaaacaggtttgcatgaacggtgaatgcccaacaaaccatctgaagactgttcaagtttttttttttttttttttttttttctatgctccctggaaggcatcccagtaacaaggcaatgatttcaggagatgtgtgaacacaggaaggcagcttccctaactgttataattggacataaagacttaaaactccagatcaggaccagagggaaggctgcgtttagctgagcagggacaatgatttgtgaaatgctattatgaaggacccacaagcgccttataaagctgtgcaatttacacattgcagaagcggcagctatttatctgacaagtaggaaatataccaaactggtctcctccgaggtactccttttttgccatctgcttcccccttttctccggacatctctgcttcacttccctgcccttttcagccagcaagtttttgtggatcaaagacgtgcattttaaaacaacaaaccacttttgcatgtatgtgcatgtgtgtttatctcagattggcaatcatggttaaagatgataaccagtgtaagtggtaaggactgtgagagaataaatcagtacttctgaaacagttaagctgcagacacgaagagcctcagacatttaaacagagagagagacgaatgaaaggttttgctcaaagatgttgaatgcagcattgtttagagaagcaaaaaattagagttatcatccaatgctagagaacttgctctatcaaatctggtattaactatgatgaaacacaccgagcatcaacacatacaaaatcgtgtcttcagagacttttcaaagatgtgataatcctcaggaaatactatacaatgaagacagaataatagctaggatagatagatgccaactatgtagtatttatgcaaatagtatttatgcaaatagatgcataggaaataaggccgaagggaaatccatcaatatgagtgttcacacaccattttcactgcccggtaccaagcaccagaggactcaatatctgtgaattgacattatgtatgggaagaggcatggaaagtagtcatttcactttctttgttgtactttcctacagtcagcatgtttttcattcacaatcagcagaagaaaaaagtattcatagtcattgagatcatagatacagaggacgcaaggaaaacagtaggcattgtgcacaatggggactgctttaggaacaaaactagcttggtgggtggggagcctcactgtgatcctacaccccttgggccctaatgcatgagcgcctgtgttttcagatactacccaatgggccacccagcatctgtgcacctctacttccttgctgaccgcttccagggctttctgatcaagcatcatgctaccaatctggctgtgagcaaactagagactctggagacctgggtgatgccgaaaaaagtcttcaagatcgcaagcccacccagtgactttgggaggcttcagttttccgaggtaagaggccaggtcttgtcacatttcattgtattttgcatttccctcggccagattctactccactatctgacacttctagttggagatggaggagaaaaggacttggagatccctaaagataagctaaccctgtgcccgaagaaggttctccggccccagtcactggcaccagcatcttaaacaggggaggatcaaaccaactggaacacagttgtattttttagggtagaatttctgctcctctgaatttttccagtgatgactcctaaaccaatgtcagtaatattagtcccattttaccgaatggagaactgaggcttatagagatccaaagattttctggattgctaggaagtgggagagctcaaaattcaacctaggtctctttggccacaaatcctatgcttagttgtggttttgtctccacagtttttagcacacctggattcgctcaagggaagtaccagatcaatcactgaatatatgattagatgagtagatgaatgatggattgaaggaaggatggatggacagatgggtcacatagctagctttgtttttgatcattctgatctaaatccaaatgatacaccttcagagaaaccttccccggcacccacttaagctgctgcaatagctacattctccacccaacccttccctattttaatactttttcttagcatttactatctaaaattatcttgttgctttatctggtcactcattgattgttcacaagagagctggaactgtgtctccctcttcactgcggtatccccagcacacagagagtatgtagtctttgtagatgctgagtaagacttttgaatgaatgaatgagtgtacttgggtcgtggtgcaggaaggaaggggaagcatgatcaagcctggtgcgtgttattcacacaaaactgcagcacctggtttctgccttcctcacatccctaagtgctaaggtcgtgatttgtcacaatggttctgactgctggattagggaccaagagtctgattgtagactatggtacatcttgaggggctaagagtatgttggggagagggggagtcccaccctcttatattttccttgacagtccttctctagcttctgtggccctgcctaacgaatgtatgtatccccatgacaaacaggcaccagtgagagtttcttgttaagccactgttttcaattaagactcccagtggatttgctggatgtgagcagccaagggagcccattccataaattactggcatcagggggcaattagatactgccccagttggattctgtgctaggggcctgagcagccaattgacaacattaatgtcccattaaagagatgaatgcctggtgtctgggctctccctgtttatcagcctgctgttgggtgactgggtacttctggcagtgacaaatgatgttggccgctccatggctagtgcttttggggggtggtcttcactacacaggtctggtacccttggagtgagaaccatcaaaatcactggcaaaaataacagcatgtgatgcagagagccctaacttgtattttgaattttttctaaactcttaattttagtagcaaatgaacagaaaggcaaggaagaactacaggaccactctgtgggctatttaggatctccttggtgttagcactatcccagggccttgtatagtgcctggctcacagcaggtggctgaacagctcagatacgtttctccaatccatgggaatctcatgctgttgacttggaaataaaagatgctcattctttctgcaggtagtcaccaagtgcctacagtgtgccaggttcaggagggattgtggtgaaccaaacaaaccaggcccctgtggtcatggaattgcattccaatgagacagccagccaatgagtgagcaaatagataaacaaaaacaaacagctcagctaatgacaggtattctagagaaaacttcattcatgtgattgctggggactcaggacattgatggggacaaccttcaatagaatgattgattcatctaggaaggcttttctacggagatcactgcaaagctaaagcctgtaaaagagccagtcctcgggagatctggagcattccaagcagagagaagagcatatacaaaggcccttaggcactgggaatgagctaggagtactcgagttgcagtgagaccaatgtactgggtgcagcaagtgagaaggaaactggtaggaaagaggcctcagggagtagtcttgcaggcccgggaaagatgttcaggttgtattttaaatgcaatggaaagatagagggaaaatggcagataggaggcaagacaaacttgcagcttccactcggatggacagagcagtgtatggagccccacatcatgaacttttgctccaagaactactgcagaaacatgccaggaaagccaagagaatccatagagcctttgaaggaggtggattgcccctgcaggcactgtgggacagccaaggaattgtgaattggcttgctttaacatccccaaaagatcacactagctcaccagcaatggattcaaatcaagaagaaatctctgaattaccagaaaaacaattaagaagttcgactattaagccaattaaggaggcaccagagaaaggtgaagtccaacttaaaaaaaaagatataggatatgaatggaaaaatctccagtgaaatatagcctaaatagaacacaatcacaacttctgaaaatgaaggacacacttacaaaattgcaaaatgcactggaaagtctcagcaatcgaatcaaacgagtaaaagaaagaacttcagaacttgaagacaaggctttcaaattaactcactccaacaaacacaaaaaatttttaaaaaatgaacaaagccttcaagaagtttgggagtatgttaaacaaccaaacttaagaataattggcgttcctgaggaagaagagaaatctaaaagtttgaataatggaataattgaggaaaacttccccagccttgctagagatctagacatctaaatacaagaagttcaaagaacacctgggaaattcattgcaaaaagatcatgcctaggcacatagtcatcaagttatctaaagtcaagacaaaggaaataaccttaagaggcaaaagcatcaggtaacctataaaggaaaacccatcagattaacagcagatttctcacagcagaaacactacaagccagaagggtcctgtctttagcctccttaaacaaaacagttaccagccatgcatcgtgtatccagtgaaactaagcttcataaatgaaagatacagttttttcagaaaaatgctaagataattcaccactaccaagccagcactacaagaactgctaaaaggagctgtaaatcttgaaacaaatcctcaaaataaaccaaaatagaatctctttaaagcataaatctcacaggtcctgcaaaacaacacaatgaaacaaaccaaggtattcaggcaacaaatagtatgatgaacagaatagtacctcacatctcaatactaatgttgaatgtaaatggcctaaaagcttcacttaaaagatacagaacggataagaattcaccaaccaagtgtctgctgtcttcaagagacttgcctggcacctaaggactcacatgaacttaaggtaaaaaggtgaaaaaagatactccatgcaaatggacaccaaaagtgagcaggagtagcaattcttaccagacaaaacaaaactttaaagcaacagcaattaaaaaagacaaagagggacattatataatgataaaaggactagtccaacaggaaaacaccacaatctaaatatacatgcactaacactggggctcccaaaacaatactactagacctaagaaatgagatggacagcaacacagtaatattggcacagttcatcaagacagaaagtcaataaagaaacaatggacttatgctataccctacaacaaatggacttaacaggtacttacggaacattttacccaacgactgcagaatatacatgctgttcatcagcacatggaacattctccaagatagaccatatgataggccacaaaacaagtctcaacaattttaagaaaatcaaaattacagcacatactctctcagaccacagtggaataaaattggaaattaactccaaaaggaacccccaaattcatgcaaatacatggaaactaaataacttgctcctgaattcaacacttctgggatacagcaaagccagtgctaagtgcaaagttcatagcattaaatgcccacatcaaaaagtctgaaagagcccaaatagacaatctaaggtcataccttaatgagctagagaaacaagaacaaacccaaacccaccaaggagaggtgaaagacctctacaaggaaaactgcaaaacactgctgcaagaagtcatagatgacacaagcaaatgtcatgctcatggatgggtagaatcaatattgtgaccatgaccatactgccaaaagcaatctacaaattcaatgcaattcccatcagaataccaccatcattcttcacagaactagaaaaagcaatcctaaaattcatatggaactaaaaaagagcctgcagagccaaagcaagactaagcaaaaagaacaaatctggaggcattgcattacccaaccttaaagtatactataaggccatagtcaccagaacagcatggtactggtataaaaacaggcatatagaacagtggaacagaatagagaacccagaaataaaggcaaatacttactgatcttcaacaaggcacacaaaaacaaagtgggaaaagaacaccctattcaacaaatggtgcagaaataattggcaagccacgtgtagaagaatgaaaccgaatcctcatctctcaccttatacaataatcaactgaggatggatcaaagacttaaatctaagacatgaaaccatacaaattctagaagataaaattggaaaaacccttctagacactggcttaggcaaagacttaatgaccaagaacccaaaagcaaatgcaacaaaaacaaagataaatagataggacttaattttaaaagtttctgcaaggcaaaagaaataatcagcagagtaaacagacaacccagagagtgggagaaaatctttgcaatctgtagatccaacaaaggactaatatctagaatctacaaggaactcaaatcagcaagaaaaaacaatcccatcaaaaagtgggctaaggccatgaatagaccgttctcaaaagaagatatacaaatggccaatgaacatatgaaaaaatgctcaacatcactaacgatcaggaaaatgcaaatcaaaaccacaatgcaataccaccttactcctgcaagaatggccataaccaaaaaataacagatgttggcatggatgtggtgaaaagggaacgcttttatgctgttggtgggactgtaaactaggacaaccactatggaaaacaatgtggagattccttaaagaactacaagtagttctaccatttgatccagcaattccactgtgggctatctaccagagaaaagtaagtcattatacaaaaaagattcttgcacacgcatgtttatagcagcacaattcacaattgcaaaaaatatggaagcagcccatcaatgagtgaataaattgtgtgtgtgtgtgcgtgcacatatatatatatataccccatggaatactactcagccataaaaaggaacgaaacaatggtatttgcagcaacctggatggaattggagaccattattctaagtgaagtaattcaggaatggaaaagcaaacgttgtatgttctcactcataagtgggagctaagctatgaggaaatcaaggcttaagaatgatacagtgagtttggggactcatgggcaagggttgggggatataggggaggggatataggggataaaagactacacatggggtgcagtgtatactgttcaggtgatgggtgcaccaaaatctcagaagtcaccactaaagaacttattcatgtaagcaaacaccacctgttccccaaaaacctattgaaatatatacatatacatacacattataaactcaaaaaataaataaataaacgcaatggaaagccattggttggttggaagccagggagccgtatgttaagcttgaatttgaatatgtatttgaatttgggtaattgaccattctgcagtggatggtggtggacttccacaatgaggccccttgagaaggtcttggaggatgtgacagcagcagggccctagctcaggctgccccacacctcacccttcacgctcctcggttgaaaaacaagatccaggttgtttgtcagctgctccagaactctcctgcccaggttatcttggttttaaaactcgatttcagggaagtgtttatcctcatttctttggaggatccaagggcagtgttctggagggttcccatcttcccctaactggtgaaaaatcacctccttaaatatgaccctaaagtagttttgtggccattcatctgttttgttagtatctgttggaaactagtgcatggagggaagtccatgtgttcagcccctactcattcaatatgtgttcaagatagattgatagacaggtgatacatagattgattaacagacagacagatgggtggatacgttaataggcaaacagatggatagatgattaatggatacaatagagttgacagattaatgtgacagattggtagagatagatgataaacacacataagtagatgatcaatctgtatagatcattgatcgatcaatagacaataggtgctcaatatatctttatttttagatctctatagagatatattgagcacctactctatgttcagcactgtttcagacactagagacatattggtgagcatgccatatacagtccctgccctcttggagttgacggtctagatctggagagagagagacctgtaaattaaaagatgcagtactgtgggggtcaggagaaaagctatgatgatcaaatgcttagagatgtacctcagtggtgcctctatccaggaaagacttatgagtagaggtgatgcctgagccaaaatctagattacaagtttgaggtggcctggaggatgcggggaaaggtagaccggtccagagaacaggcggatcatggccagaagatcaagaggaaacacagagcccttcaggatgaggtgctgggagtaacccagggtggcctggagcaaggagcaagtggaagggagggagagggatagagatgacagaagtgaagccggagccagaccagaaaggtctccaggacaggtaagcaactggacttagaaaccaagagttgctgaaaggggttgtaagcaggaaaatagaaatcgggtttctttagaaaaacctctaagaccttgaagcttgaactgaatcctgttgatcattcatttattccttcaataaatagtatccttttaattcctactgtgttccgggcactatgctaggcactggtgggtcccagaaggtgctggtccctgctgatccacagggtagtagaaaaataccaagatttcataagtctgggagggatggcagcccccacaggaacatcagagcggtaactacctctgttactctcaggatgctttcttagtcctaatctttagtctctggcctgatgaaaactgaaagcaagacacatgccagtgagtgtacacagatggcagccacccctggtaggcagtagggatttggtttatgtgtgttgggtgaatgaatgactgagagagtgaatgaattcatgaatggaaggcaatatgtagcacagtggatgagaatgcagcctctggggttggacttcatgggttcccatgctggctctgcctcctccgaccatagcgagttatctcacttctctgagactcagtttccacatctgtaaagtaaagataatgacaagggtctcccctttatggatttgggagtatcaactgaatggacacgtctgcctggcacactgtaatccctcagcaaatattagcagtgaagctctgtaagctgggtaaagaatggactgacatagtacctcttgcaagaacaatgagaagctagatcagctcctatttcccctgcacataggaaatctcagaatgtaggtatgtgtatccacacccgaccttcgtgcacacacacattagagatgctaattatgggaagacagcagaggcagtgcaagcttcatactgtacccgttatttgccccaacatgcccacatgctgtgtcctcaaaaccactaagttaatccacctgggggagatctttttttcaaattagatgacccctaatttaatttgatttgaaatagcaacaaaggtccttgtcaggaatctccctagttcattcagtttttggtcaagccattcacccattcattcaacaaacattactcgagcacctgctgtgtactaagcatggtagtaggcaccaagaaagagcagggaaccagccaggtaaaacccctgttcacacagagcttatattacagctggaggagataaagaataaatacatcaacagacaactctgagatagtgcttatcaccactgataggaagaaaataaagcagtagggaatgacacagattgactgaaggtccatttgaaatttggggtggggggtggtcagataaaaactctgtgaggcagctttagacataaggggctggctgtgcaagaaaggagtattccacacagggcagatggtgcaggaaagctgagctgggaatgagcctgccttgattgaggtggctaaaacaaggcatcctggagaaagatggggagggggtcatggagatggaggatggggtgagctcagactctgagtgcactaagaagcctgggggcagcagtaagaggacattttacaaggcctttctgactacaggatatagaagaaattgcaggtggcacaagtggaaggagggaagcccaccagagaggattgctgtgggtcacagctgcacacacccccagctggctggcaggaaggaaggatcgcaggatgactctcatgcttacagtccagatctaggtgccttgggaaagccaaagctgtctcttcctaggaaacctatttgaacccctgtagatgacaggcaatgctgagggtctctagcttatgatagagcagctgtaaaaacatgatctctattcttgttcagaaccattgcaccaagtggaggtgtgtgatttagaaaaccaaggatggaattggaaacccgctgtacctgttgagtggcagggtgtatgtttctgtggaatggcctgcaagcaagacatgcattcattcattcattcattcattcattcgttcattcattcactcattcagctcatgtgtggttttcttttcaaagcacatgccatacaccaggcacaggaggcccggtggtttaataaaaggaccacaggccttttgatccttcagactgagtccagatgccagatcttctgcttacaagctgtgcaaccttgagcaggtgacttagttggagcctcagtttcttcatctgtaaaatgggtatatgaaagctaacaaaggggatcctagacctttctgagacctagccccctagttcaggcccagtgacttcagaattcactcccctgtttcaggtcggcactgactgggatgccaaggagaggctattccgcaactttgggggtcttctggggcccatggatgagccggtgggtatgcagaagtgggggaagggacctaatgtgaccgtgaccgtcatttgggtggatcccgtcaatgtcatcgcagccacctacgacatcctcattgagtccactgccgaattcacacactacaagccccctttgaacttgcccctgaggcctggggtctggacagtgaaaattctccaccactgggtgccagttgcagagaccaaattcctcgttgcgcctctgaccttctcgaacaggcagcccatcaaacctggtaagtactcccagtgtctatgtgggagaaatactccttccctggggaccttgagggtctttggtgttggtaggcagcactgctcagacatagggtaagcagcggcctcacagaacagcactccttgctctcaatacttttctctgtgtttccctagagaaaccatctaatgtcctacctgcacacggagatgatgtcatctgtctaggtattaggtagctatttgttagacgctcccccattcaacttccagaaggcctagatcatactgaagacaagatgggaaataaacccaggcaggtattaaggatcagcaaatcttgtttactattttaaaaaaatcaaaacaggaaattctgttcatcaaaaatatgatacactaggtggaaaagatgaaccacataatagtagaagatatttgctacatttttttaaagtactcatgttcagaatttataaagaaatgctattcatcagaagttggccaatccagcccactacctgtttttgtaaataaagttttattggaacacagtcaccatgctcattcatgtacatgttgcctgcttctgctttagagctacagtggcagaactgaatagttgtgacagagactgcatggcccacaaagccaaagatactatctggctctttacaaaaaaaaagaccaccaaccctgctataaaagagaggaaaaaaatggaggagagaacatgaatggcccctcacacacgcaaaaacatgttcagcctcattaaaaatgggagaaatgaaaattgaaagcaaagagaggttccacttcacacccatcatattgggaaatgcgtgacagataagaacctgtgttactaaggctgagagcaataggcattcatgcagtgctagtgggagggtgaagtgctaagacgagtttagaaaatgttttagtatctcctagtaaagctgaacatacacacaccctaccacagacgtctgaccccaaggtataggccctagagacatgtgcagaaatgctcacatgagaattattcttaatagcacaaaaccagaaacggtctgattgcctgacactggaaaggagaaacaattggctggctgttcatacaatggagtactatgcagccgtgaatagcagtaaagcatgggcatgtgttggcttggatgagtccctaaaacatagtgttgagggggaaatatcacagataaatcataattatgatgtatttatgtcaagttcaaaaacaggcaaagtcaacaatatcttatttcaggagtcgtatgtcaaaggcagctgttaggaaatgaaacatgaaattaacatgaaattcaggtcagggtttccatccccatggagaacagggactgggatgtcagttcctatcctgcctgacttttttctttgtccattgaaagggtttacttttatccttctatttcccccgccccttttcacctccttttattaaggggaaagtctttctccctgctcaaatcctacctctagagaaaccactgccaacagtctggtgtgaatccttttagaagtttttccatacttttaaagcataaacataatacacaccataaatcacaaaacctttgctattttttaaaaatgaaataatacattgtgtactgtaagattgtttttttttttttttttactttctaagtcagtatatataaagctaccagctacatgatattccactgggttaaggaaccacaatctatctgttcccctattggtggacacataagtttctgttgttgctgctgatgatgatgatgttactgataatactgcaaggaaaagtctttttttttttttttttttttttttttttaatataacagaggttggctgggtgccatggtttacacgtgtaatcccagcactttgggaggccaaggcaggcggatcacttgacaccaggagttcgagaccagcctgaccagcctgaccaacatggtgaaaccccatctactaaaaatacaaaaattagccgagtgtggtggccggcgtctatagtcccagctacttgggaggctgaggcacgagaatcgtttgaacctgtgaggcggaggttgcagtgaaccgaaatcatgccactgcactccagttgggtgacagagcgaggttctgtctcaaaaaaaaaaaaagaatttaggtcaggctcttttgcctaggctggagtgcagtcatgcaatcatagctcactgcagcctcgagctcctgggctcaagtaattctctcacctcagcctcctaagtagctgaaactacacgagtgtgccaccatgcccggctttttttttttttttttttttttttaactatttttgtggttgtgtggtctgtgttgtcctggctggtctcaaactcctggatctaaaccaaccctcccaccttggccacccaaagagctgggattacaggcgtgagccacccaccacacccagccccaacaaggaagagtcttaaacataaaattgtatgtgcccagccgggtgcggtggtcacacctgtaatcccagcacactgggaggccgaggcaggtggatcacgatgtcaggagatcgagaccatcctggctaacacagtgaaaccctgtctctactaaaaatacaaaaaattagctgggcatggtggtgggtgcctgtagtcccagctactcgggaggctgaggcaggagaatggcgtgaacccgggaagcggagcttgcagtgaactgagatcacgccactgcactccagcctgggtgacaaagcgagactctgtctcaaaaaacaacaacaaaaacaaaaaagaaaaaaaaaattgtatgttcccatgcagttacatccataacacaaactcgtagaaacaggatttctgggtctctctatatttggaattattcatgtccatctctaacagatcacaaactcaaaagccagaaatgcattacagcctcttagctttgaagagttctggattgggtgccttttagccaatgatgcaaggggatggggacacagcatggggaggaggtgccttgagtcctagcaaagggagttgtttgggaaaaactctcaaaccacttttcctctgctctcacactgccatgatcaacacagaagatttctgtgacagcaaaatacatggggaaattttccccgtcagcaagcaagcaatcagttctgcagcagacaccagctgggtgtcccccaattcagttccaacactctccaccccagaggtagcatcagacaccgcagagtgagggctcagtgccataagaccacccccttctgcccgctaatcacaagtctgggcctttggaacttctgaccaaatggtttcaaactggggttcccacaaccccctctttgggctcaattactctgctagagcagctcacagaactcagggaaacacttatgtctattggtttgttatgaaagatattttaaaggatgcagataaacagccaaatgaagctatacagagggcaaggtccagaggagtcctgagtgcaggagcttctgtccccatggcattggggtgcccaccctcccaacaggtggatgaatctgtccccatggcattggggtgcaccaccctcccggcaggtggatgagtctgtccccatggcatagggatgcccaccctcctagcaggtggatgaatctgtccccatggcattggggtgcaccaccctcctggcaggtggatgagtctgtccccatggcattggggtgcccaccgtcccggcaggtggatgagttcttcctcaccttcctgtgaagatgctaccatgtattcagctctccagaagctccttgaaccctgtcctttgggccttttatgaagacttcattggttacccatgactgaagcatgacaactgtgtcaaaatgtgattggacaaaaagggtctgacctaactcagcaagccctgtctgttcagattctccttggcctctctgtgcagtaattccttcctccagggagtgtgtcagggccctctctggaatgagagtcctatcacccacaatctgattagactctggcattaggcagcagaagggggacaggaggaggccagagcgagagagagattctatttgctgagtcctaaagtgcccaacattgtaagaaaagactgtaagaagggttacaggagttctgagccaagaaccgtggacaaaaaccactatcatggcctggtgcagtggctcacgcctgaaatcccagcactttgggaggctgaggtggacggattactcaaggtcaggagttcaagaccagcctggccaatgtggtgaaaccctgtctctcctaaaagtacaaaaaattagccaggcatggtgacgggtgcctgaaatcccagctactcaggaggctgaggcatgagaatcgcttgaacctgggaggtggaggttgcagtgagccaagatcacgccactgcactccagcctgggtgacagagcgagactctatcatctccaaaacaataaataaataggccagacacggtggctcacgcctgtaatcccagcactttgggaggctgaggtgggcggatcacctgagctcgggagttcaagaccagcctgaccaacgtggagaaaccccgtctctactaaaaatacaaaattagccgggtgtggtgacgtgtgcctgtgatcccagctactcgggaggctgaggcaggagaattgcttgaacccaggaggtggaggttgcagtgagctgagatcatgccattgcactccagcctggcaacaagagcgagactccgtctcaaaaaaagaatcaatcaatcctctatcataggagtctcgaagtaaacgctcagcttctgctgtctttgtgcagagcaagcagaaagacagagacctcatgttttcttgagctggaagcctgctccttcttccccatgaaccaggcaaaagacagcccctccagagctgaccaggcccaatcccacccccttagaggtcttaggttccttcttgatctagttcacatctttaccatctctaacgatgtctaatgccagacatggaggagaggggagtaaatggctgtgtcttcgctgcttcaggtacacctgttggacagaatgaagcagtgctcctgaacacacccccacgccagtggagtagcctgggggccattcatggggtcctgatttttccagtgttttcttctagagtttctaaggaaggcagggctctccctacacatgcccaggatgacccaggaatcattttacccccaccgagagcagccctcctgtccttggtaattgtatttgttagcgatgttccaatgaatgacagtgaacacaaaggtgggagcaatgcaatttgtaaaatgattcatcaagagtaattttctattgatgcgtccctggtaatcgcaagaaatccgatgaggtggaattgaggaaaatttaattatagagacgagcatcgcaagctaatattgtaatagcgtttcccacattaacctcatttctcataagggtttttttgcatcaaccacaatatttggctcccagcgttcgcaggtttgttagctgctcttttccctttgaatgtcctgccttttgtcagtttcggtatctcctcattctccactttctcactctgcagaatagaggcactaaggggctctgatagagaaattagggcccgcaccaaagacagcaggctctgttctcctggcaggtggggctgaagctgcccaccctaccctgtattagagaaagatgggttaggaccagacttccaaacactgtggctcctaactaccgtgggagaaagcagctttgctaaaccccttgcgagacagagtatgtgctcaatgactgctcacctccttcctcccacttgtgcccatccaaaccacagaacccaacccttttgcttcctggggcattgggaattgaaggagtggcgatcttgtctgtgttagtcaaggcaaattttgaattcatctactattctcactgcttttagaagggttagcatatggtctttcttccttcttcttgcctgctctggacacttgttaatatccaggctgtcctgggtgcctttggtggtggcagctgctgtcaggcaaacaggaagcactgtcttctgaacactgcattatcttggaaggtttcttgtaatcctagctatctcagctctcgcaaagcctgatttggtaaagcgcaactcaccagactcattggccagcctttttaaaaatatatatgtgcttctactgagcaataaaacaagcaatgaatgtgaacgtcttcaaaatattagaaatagcatctattagaaataatagaagtgtttagcttctttccttcaccccaaattgctatacttcctgattcctcatcgtgcagccctgggaggtagtagtagtagtcactcttacgtacatgttactgtttaacccatttatgcctgaggttgcaatttttaaaatttttttttgagatgaagtctcactctatcgaccaggctggagtgcaatggtgtgatctcggctcaatgaaacctccgcctcccaggttcaaacgattctcctgcctcaccctcccgagtacctgggattacaggcatcagccatcacgcccggcttatttttgtatttttagtagagacggggtttcaccatgttggccaggctggtctcgaactcctgacctcaggtgatccacctgcctcagcctcacaaagcgctaggattacaggtgtaagccatcgtgcctggcccaattgtttgaatttttgcatgagtgaaaaatcagaccttggtgatggccttgagcagtagagtatcagggtgagtgataagcactgcctttggagtcagtcggtcctggatttaaccccagatctgtctctaactccagctgcctctctttccccatctgtaaagtaggaatgataaaaccagccccctagttttttaggtgtgtgaggattatggactaataccaacagtaataatcctagctgtatttgtctgttctcatgctgctaataatgacctgaggctgggtaatttataaaagtaagaagtttaatggactcacagtttcaatggtcagggaggcctcaccatcatgatggaaggcaaaggagaagcaaaggcacatcttacacggtggcaggccagagcgcctgtgcaaggacactcccctttaaaaaaccatcagatctcatgagacttacttattcactatcacaagaacaacatggcaaaaactcatcatgattcaattacttcccaccaggtccctcccacaacacgtggggattctgggagctacaattcaaggtgagatttgggtggggacacggccaaaccatatcactagctaagcttttcccagcacttagtatatgccaggtgtcatttgtaaatactttatatgagtcagcacacttaagcctcacaaagtgagaaggaaggcattagtactttacccattttattgatgaagaaactgaggtacaaggcatggaggtcagaagtcacacacctggtatgttggacgtggggctgcaaaaccagacagcatgactgcagtacctgggctcttgtatgaagtgcttcacaaagtgactggcacataggaggggcccagcaaggcagcactgttatgagagctagtttgacctcccaccccacctcacccgggtccaagcttcatgctttcagagtgattgttctgtggtcagttcatgcacccttaggcttctaggaagcagaaatccaacttacgcagagtacaaggtggacgctcggcagctgagatctggacttcccaaacagacctgggtacaggtcactgtcactctccaacccaggagtcagcaaaatttttctgtaaagggctagatatattttcagcttgttgggtaaaatacagtctgtctcaaatactcagctctggtagcacaaaagcagccacagacaatatgcaaataaatgggcacagccatgttccaataaaactttatttacaaacacaagtggtgggccacatttggcccaaggactgcagtttgccaaccctcttgtctcaataccctgtttttttgccttcatgacacttatcactgcctgaaataaccttatttatctacttatttctttgttgttgttctccctccactggatcttaaccttcctatctggtttgctccaccacctagaatagatcctggtacctaataggtacttaatatgtctttatcaaatgagacagtgccttgcagatcatgggtgtttagtaaatatgtgttgactgaatgcctggcacaatgtaggtgcttaaaaatatatattggctgaatcagtgtctgcactatcaaagatgcgctataaacatgtgttgaatgaataaaggcatgcaccgtgccctgtacaaagtgggctctgtccttacgggctcagttttctcagctgtgaaatgggactgctaaaagaacttcctcatgagattgtcatgtgaattaaatgaggcgatgcatggcacccagtgcagcaccaggcacagggtaagtatgaataggcatcctattggtggctcttctgatcctgaaattgttccctttggctttcagaggaggcactgaagctgcacaatgggcccctccgcaatgcctacatggagcagagcttccagagcctaaaccccgtcctcagcctgcccatcaaccccgcccaggtggaacaggcacggaggaacgcagcctccacgggcacagcgctggagggatggctggactcgttggtgggcgggatgtggactgccatggacatctgtgccacgggccccacagcctgcccggtcatgcagacctgcagccagacggcctggagctccttcagccctgaccccaagtcggagctgggggcagtcaaacctgatggccggctcaggtagcactgggcacgaggagtgggccacagcaggatctcaacgggaaagcagccagaggggttgtggggcctgaaccccggcctcccaccctgggggaggccctctgtgaatgggtctctcctggccatagaatgatggaaagggaaggtcagcaggtcaaagcaggatcagccaacaacctgcctttggcaagctgcgggtgggatggctcagtccctgcactgtgactgtctcacctcttctggttgatcctcaagtcctacaggttccttgtcttccccttccagtgacccacccctgaccccagacgtgtgattttcagacttttctttcgagcagcagaacttcgtttacggagcacagtcataagtggaggttcagggtgctgacgaaatccaagctgctctggttgaagctgacaagtgcgaggttccctcccaaagctcagccctctgggcggtccccttgcccagggtatctcctacggtacctcttcagaacccaagggctctgcaaatgccagtttgacaagcactgcccagaccaaccatgggttcaaactccagccctgccctttggttcatttttctgcttctcttggctgggggactctggtgccagccttgaaagtcatggtcgtgggccctttcccatggaggctgcagccttaggagagctctgagcctctcagcagccctccttgggttgaactattctccttagtaactaggtaagtgggaaagccttttgatgtggcatggccaaggtccagccacaagtgcaactgccacctgtccaggggtctgggcctccttccctcaaggctgccacacaaagtagcagaaataggatgatgtttgtgagcaccagactcaagaccatgaccttctttgatccttgaaaatgggaactttgacagccatgaccatgaaactcacaaggcaacgcgatgaaactcacaaagcaatgcttggagcaaaactcctgagctagacagcacagcagcacccatcccctgccagagcccttccgttctgaggtcagacacacaaaaccttcgtcaattgcacaccggtgctgttgggagtgaccaaaccacatgaaccagacttttcccgtccaggaaatagcatttcagatttggtttttaatttcatgcccttcggccacaggctcaacgggacatgcaacataaaaatgggaaggttatttaaacaacaaaaaacagtatgatttaagtgttgagttaccagaaacccaaaaggtttccttgccacgagccccctggagtgtcatccctgttcaccaggagagctcttcgcaggaggcctcccttgctcctgtaatcccacctcccctgaatgatgggattcccttggaaaaaggtctcacccctggtagccatctgcccttcccatggagagccagtcctgacacttctctccagcgtgggtttgaaggggctgcccttcgctttgtgtgacttgtcctaatcctagccagatgtgttgccccatcccaagcctcgcaaggcagggtgtcctgttggcaatggaggacgtagagaagggacactttagatatttattatttacatgttttagtcgatgactaattagtaggtgctgtttttgcagcttgtcaattatgttaccttactaactgaagctgcctttattcacaaaaggccccttttcccatcttttcccaccccctggtgtctctctctctctcggtttctctttctctgcgtctaccccccatcctcctcatcctcagagtaaagcaggggcatcgaacaccacgcaaagaaagctccaacccgcatcttccactggctttgagtggggtgccttggggaccgttggagccttgttttttcccttatgcagagtgtcagcctcactctccctcggattccaagagtattggaattcctgagcctcccatcctccccctactcaccccccgtcacaggcacaaggaggtgacaggcagaaaacgtggagggtgagtggggaatgtgctagctgcagagagtttgtggggaatgtgctagctgcagagagtttgggccattcctgcttgctccgtggttgccttcccatggcccatctaattatgggcattcatgcgaccttaacagagggaaacaggctcctttgagagagatccatcttaggaggagggtcgtcagatccaggcagcagagtccgggagatagccattctcaacagcgattccagggatctcagggtacttttctcagaaagcccctatgatctcttttacagactctatggtggccacgcgctgggtgccacatcctctttctgcccccggcctctgcctctggccagggtttccctggggctgccgaagccactttgggagcttccctttcaccctccttgctgggccaccagtgctttgtgttcgcagcgttatttgcagtggctttggggactcagcagtggcaagtccctgtgcataatgtgaacctgcagacttcaagatggggcccctcctgcacccactaacatgtctgcctttttttgtttttatcctggaacaagtggagaaatggcagagctggctgactctggggacccttccctttttcccatggcttcatttcttcctcaccacaactaattcggggagctgagaagtcacacagggtattcctctcccttctctgatgttattaattaatagaccagagaataaggttgcagatattacatttgttgtgtttttgtgttttgtttttttttttaaggaaaatcccaaacaaagcccagcatgatttgagaaaagaggatgttttcccagggaaaataatttttttaacctgcctgagaatgatttatttatttgttggaggccgttggtcagacagcctggagcttgggctgtggaagatttcaaaagcatagggctgtggtctctggaaacctattacagcctgcagctgtgagctgagccagtgacgaggtccctggaaactcaggaaggctgacaggtgggccttggggtattggtttgtggagaaggaagcattctttaggctgcggcactccttatagtttcccacccaccgagtgacattcaggcagaaattgagctcaggagacagccagccttcccacatcccacttcacttcccggtccacacgtaaagcagtgtgtctccaaggaggcagtgagcaattcccaaggtccccgtgttgtgagaagcgcgctgctttctccctttgcaggggaaaaaaaaggctttcctggtgagatcatgagtccttccggcttcatttctcattgtgggtttaacttctaaaacgcaaatggagtttagagaggatgagcagaaccacaggacctgcccccatctctcactcactgcaattgcttctactctgggcacaagtagggtgtctgaagaccatgtttccctctggttctctagtttgcagataacacagaagacactggctagaaccttaagctttctgccaaaaagatgcagagagcagggcagtagctactggcagtggggtgtgaataaagagtcctttcacaaccaagttcactgaggatttggagcaccagcttcccagcagtatcgaggggtggagaggtgtacattcaggtggaggggtacatctaggggtggagaggtgtacattctagaaacagctgttaacacactccactttaaagacagcaagctagacctgcaggatcaaagccacacactgtggtaggggttacaaatgtttatggggcccagaatactagcatagatgcgtgaaatggttggtgtgaggcaaaagggcatggtgggggcaaggatggggactgtggtcttactggcatgcacgtgacctacccagaatgagcagctgctactcagccccaacctgtcattgtttgtaaaaatgtaagcacagtgtagtggaatcttccaatttggaagggaagccggaaatccagatttaatggaaaaaatctgatttttcaacgtcgggttttttgtttgtttgtttttgttttttttaacagatagtgggcaaagaaaaattccactgttccacgtgtacactgccagcaacctctgctctctggagaggtggtttaaagtgagattatgcattgccctggtagaagaggaaaaaagccagcatcaggtcagggcaaaaataacagcccatgttgaactcggaatggggacctcttgctaagtcattccactcctcaagagaccattccacagaggggggatggatcattcagctctcctggtcccaagattgtgctgaagggaagaaggaatagaatctggagatctggactgctgccccttagatatgcagaggtccacatctgcctggggctacagcttgtgggactccatcaaaccaggccgaaatggcaaagacagtctaggaggaggaggaggtagggtgtgaaacagccaggctctctccaaatcccaagtgttgacacagccatcttgtcccatccctggaagcctctttggaaaccacatagagctgtgctggctcacgggatgtcctgtttgcttctgcctcagttaccttactttgcccatgggtctaccacaggcgctacctcattgtgtctgctgagaagtttacctgggaggggggaacaaagttgtccaaatctgcttgagctgaatgtatgatctatgcaaattctctctctcctctctctcttcctctctggctctcttagaagtttttttgttttgttttgttttgttttgtgtttaccttgcaaacaagatactgtataggaccctcttaagatggaggagggctttcttgcgccacctgtgtctacccctcacgttgtctttggctctggtcttaccaggcgtatgcagggagaaagtgacctctcttccctctccacttggctgggaatattccaactgcctctgcctacagataccaccagaaagcgggttctgcaccttgtcatccccctccctaacgtcatctactccatccctcatgttcctccaacttgcttctcccatccctccttcaaaaacaaaacaaaacaaaacaaaagccttaggtttctcctttttgaaatgtggccttaacattatttttgggaagctgaccatccatcctttccctcccatctccaccaacatcagagaagacagcatcgtgaagcttctgtggcagcctcctaaggaaggggctgccaatctgtagttggcagatgctataggaattgcttacaaatgtcgtctttaagaaaaatgttcttatatttttcctatgggcaaaatgaaggcttgggtgctcatctaaagctcagccaactcctgaagcactctctcagagcatactgctgctgtaatgggctggcttaattatcggcagagtgcttgaaaaggctttgcagacctcccctgcccccaagactgggtgactttatatgtacttcattcaagggtaaatcaggagacgttctccatttatctcttcgtccttcctgcctggaaagtgatagcactaaatattcccagcagatgggtagtgttctcaaaggaatcaccctttccctaccttcagactctattctttacccttccattgctccagtgctgatggaggccaaagacaaccccagggttttcataggaaattcactggaattgtgcgcaattgtctttgtagtccttttgccttttttttttttaaatattatgttgtcaatagcatttgtttgggtatttgttttagaggcctcactctaagttattaccgtccccttcattgttttcaaagacatgtggtgatatagtttttaaaaataactattttgttatagatcataatatgcataaaactgtacagaaatattttgtaatgtgttgattttaaaaaaagaatctgtaaataaagttttaaaaaaagaattcaaatggcacacgctgaaatatgtagatattttgctatttatttaaaggagtattttaagagatattgaactatctgaaattgaccagtaatcaaagttccaatcatctgaatgcttttccttgaggtagaatgtgagtctcagaaatgactgcattacgtgcccttttttgcaccttttctgtctttttattttgcagaacaacaacaacaacaaaattgtgccttagctgtatttttttgtctaggggagtttgtttctgtctgacaaagcaacattttttgcagaaaacagtggatgtattaaatactgtatcataccaaaaacactgcaggtgtatatagatgctttctgtcatactgtgttttcagatgcagaattttaaaattaaaaaaacactgcctttatggaacagtgactatatgtggcttcttttcagcaacattgtgcatctttacacaatctcatattctcttctgtcatctgcatggtgaagataggatgactatataatttatcatccaaactgggatacttttgagagttaaaggaagcaccacgtggatgggatgctgagactgcaggcataaatggcctatcctgggaaaacctgggtgtgtggacacatttccctcataaaaactgctgtcatcttctaactggattatagcaacaacctcctataagtacctcctggttgaggcagaagtatatgatttttaaacccgtactgagtagagaataacaagaagggactgccatggaaagttgcagtttcctatacccaactggttggttggttggcaaacgtgttttcctttcctctttaccacagagactacatttcccagactgccttgctcttagctgtgaccatgtgaccaggccaatggaacagctagactgcatcttccagactgccttgctcttagccatggccatgtgactgactcaggccaatggaatgtaggtagaataggtacatggcacctctagccctggtccctaaaacctcccactggagtctctcctctctcaatctttccctatttgccagctcagatgttttgaatcaccttgattttgtacattcatccacttggcctattcaggtggtctttttggaaactttgcacagcctctaccttaaaggaaggcagagccacagtttggaaggtaactgagcccctgcatagccacataaaagaatgcttgaccagagtcacccctattgactatgacatgaaaagaaataaatatgtattttgttatgcccctgagactttcaattacagcaggctagccttaccttaattaatccaatcagaaatggaaattcaaatgtttctttgggaaaatccacattttggttccttcactcagtcggtaaagtagagagccagacaggtgaagggatttgcctgaagctacccatggtcatcagggtcaagtctagaaccaaagtttcccatcttccaatgagactttcataagtcactgggaagaccagttcctccacccctgaggttagctcactattatgtatatatgtggtttctgagggctatgcccaggggttgggagcctagatgcctgggttgtaaagatgcttctaattcacccttcaaaatccttaaaggaagacaggcactgagacacagataggattttagcagctagaacaaaataggctagatatctccccattagacacacagaggggcaaatatatggagagctgtgtcagcttcagcctccttgagcttggctcaggagagatggtgactgactccatatttagacagatggatggacccaagattcatttgtcaaaacctctttccagcctgatcttacagccaacttccctttcctctgcccggagataattcctcaaaaaatgagttcagttgcaagggaagaataaatttctaaaatctgcgtaggagtaaggatcacagttatcttattcactgtggtacctccagtatttagcacagtgagtccagcgtatgggcactcagtgaatattcagtgaacggacaagtgaatgagaccatatatcttaattaattaacaatatgggcatggggccatttgtccaagattctgtctttaaaaccatcatttgatggatagtatttgtcaaaatatgggtcattgtaaagtaagctgtgattttttaccttcaataatgaggtttctgggcctactgaagggtcagttggaatttctttcctgcttatttactgggtttaagttcattaaattcgtgattttaagagttttttttttcttctttaaggggaatgctttttcaagcagtgtaccttaaacctccacatatatatatattttaaaaaaaaaaaagacttaaaaatgggtgattaggaggggtgccctgggtgaagtgagagtagaaagctttgtctcagcaagtgcacccacccccaccagcccgcctctttcatggctccatgggatacgtagatgaccatgctttgaagtcacaccacaccgatgttgaaaacatctaggctttttgtacggttggctttgaggccttgctgccaaggtgctgaaagttgagttctaggctgggtctctgagcatgagaccaaaccaagaataattcagtccacctggtgttggcaagttgtaagggtggaaacttagagctggggcaaaaaggaggtatggctggcctgacatgttttggagactcttgatcctgtgcattcatagttagttcatttgttccactgctctgcctggaaacatcatcagccctaaccctgacagggagtactggcctgagaaccaagaggcccaggcccttcacagctttggttgtgccactgatttgctgtgtgatcatggcgagtctctcttccatgatgagtctcagccccctcaactgccaaataaatgggagaatggggcctattgatacctggggtccattcaagttcagacgtgtaagtgtacagtccaattgccacccagcaccaaatacagaacatgttaaggtgccagctccatgcaagaaaatgttcccaagatgtgattgttgatgttcacatctatgttagtcaaggttctttcactttcaagtaacagtaacccaattcacagacgtgtaatcagaaggggaatgtattaagttatgaaacgttagaagacaacaattaaaacgcaaattacaagaactaggacagcactcaggggactcaagaactgaaactggagccccaatactcacagccctctcttcctccatttttgctggcctttgtttgatattatctcctacagacagctaattccacatggtaaataaagaaggccccagaagttcttgctgcttgtcctttgaactccataacacaaaaatatcaacgtcctttgtcctcactgccaaaagggctggctctaactctggacctatcactcagatcaggcaaacaaggcactacgattggctgaacctggatggtatgctgacccctgcgaccagggcattggacggtaaactgtgattggcagccccatccccattacatgataggagtagaagagaaatggatccccggcgggagaggatggtgtcgaacagacaaaaacaacagatgtccattcactgccacagccaactgcaggcccaggtggcttctccgcttgccagtccaattcgtttctgctcctcaagtgcccaaattttctcctcccagttcctctatacctccctaaggagaaggactctgggcctatcttaagcaaatcattttaaataaatatcacatggatggtgcagatgatttcaccctcacttaattagctgtggagtgtttatgcttatggaacatgatggattgctccttgtagcctgggcacaggacactttaaaaaggcccttgtaacagccctttgctaatgatggtggatgattttaacttgctgcaggaagcaaggcctgcgtacctgccatgaagagcggcatctctctccacgtttctggagcatcagtattccaggctcc

SEQ ID NO: 1041 - DNA, 2481 bp, Homo sapiens
caggatggctacttttctcatcggccgaaagagaaagtgcgaacagacagcaacaacgagaactctgtccccaaagactttgagaatgtcgacaacagcaacttcgcacccaggactcaaaagcagaagcaccagcctgagttggcgaagaagccaccgagtagacagaaggagcttttgaaaaggaagctggaacagcaggagaaaggaaaaggacatacattccctgggaaaggccccggtgaggtgctgcctcccggggacagagccgcagccaacagcagccacgggaaggatgtgtccagaccgcctcatgccaggaaaactgggggcagctcccccgagaccaagtatgaccagccccctaagtgtgacatctcaggcaaggaggccatctctgccctgtcccgtgctaagtccaagcactgccgccaggagattggggagacttactgccgccacaagttagggctgctgatgcctgagaaggtgactcggttctgccccctcgagggtaaagccaacaagaacgtgcagtgggacgaggactccgtggagtacatgccagccaacccggtcagaatcgcctttgtcctggtggtccacggccgtgcctctcggcagttgcagcgcatgttcaaggccatctaccacaaagaccacttctactacatccacgtggacaagcgctctaattacctgcatcggcaagtgctccaggtctccaggcagtacagcaatgtccgcgtcaccccctggagaatggccaccatctggggaggagccagcctcctgtccacctacctgcagagcatgcgggacctcctggagatgaccgactggccctgggacttcttcatcaacctgagtgcggccgactaccccatcaggacaaatgaccagttggtggcgtttctctcccgataccgagatatgaatttcttgaagtcacacggccgggacaatgcaaggttcattcggaagcagggcctggatcggctcttcctggagtgcgacgctcacatgtggcgcctgggagatcggcggatcccagagggcattgccgtggatggcggttcggactggttcctgctgaaccggaggtttgtagaatatgtgaccttctccacagacgatctggtgaccaagatgaaacagttctactcctacaccctgcttcctgctgagtccttcttccatacggtcctggagaacagcccccactgcgacaccatggtggacaacaacctgcgcatcaccaactggaatcgcaagctgggctgcaagtgccagtacaagcacatcgtggactggtgcggctgctcccccaatgacttcaagccgcaggacttccaccgcttccagcagacagcccggcctaccttctttgcccgcaagtttgaagccgtggtgaatcaggaaatcattgggcagctggactattacctgtacgggaactaccctgcaggtaccccgggcctgcgctcctactgggagaatgtctacgatgagcctgacggcatccacagcctgagcgacgtgacactcaccttgtaccactcctttgcccgcctgggtcttcgacgggctgagacgtccctgcacacggatggggagaacagctgccgatactacccaatgggccacccagcatctgtgcacctctacttccttgctgaccgcttccagggctttctgatcaagcatcatgctaccaatctggctgtgagcaaactagagactctggagacctgggtgatgccgaaaaaagtcttcaagatcgcaagcccacccagtgactttgggaggcttcagttttccgaggtcggcactgactgggatgccaaggagaggctattccgcaactttgggggtcttctggggcccatggatgagccggtgggtatgcagaagtgggggaagggacctaatgtgaccgtgaccgtcatttgggtggatcccgtcaatgtcatcgcagccacctacgacatcctcattgagtccactgccgaattcacacactacaagccccctttgaacttgcccctgaggcctggggtctggacagtgaaaattctccaccactgggtgccagttgcagagaccaaattcctcgttgcgcctctgaccttctcgaacaggcagcccatcaaacctgaggaggcactgaagctgcacaatgggcccctccgcaatgcctacatggagcagagcttccagagcctaaaccccgtcctcagcctgcccatcaaccccgcccaggtggaacaggcacggaggaacgcagcctccacgggcacagcgctggagggatggctggactcgttggtgggcgggatgtggactgccatggacatctgtgccacgggccccacagcctgcccggtcatgcagacctgcagccagacggcctggagctccttcagccctgaccccaagtcggagctgggggcagtcaaacctgatggccggctcaggtag

SEQ ID NO: 1042 - protein, 665 aa, Homo sapiens
MPEKVTRFCPLEGKANKNVQWDEDSVEYMPANPVRIAFVLVVHGRASRQLQRMFKAIYHKDHFYYIHVDKRSNYLHRQVLQVSRQYSNVRVTPWRMATIWGGASLLSTYLQSMRDLLEMTDWPWDFFINLSAADYPIRTNDQLVAFLSRYRDMNFLKSHGRDNARFIRKQGLDRLFLECDAHMWRLGDRRIPEGIAVDGGSDWFLLNRRFVEYVTFSTDDLVTKMKQFYSYTLLPAESFFHTVLENSPHCDTMVDNNLRITNWNRKLGCKCQYKHIVDWCGCSPNDFKPQDFHRFQQTARPTFFARKFEAVVNQEIIGQLDYYLYGNYPAGTPGLRSYWENVYDEPDGIHSLSDVTLTLYHSFARLGLRRAETSLHTDGENSCRYYPMGHPASVHLYFLADRFQGFLIKHHATNLAVSKLETLETWVMPKKVFKIDPSDFGRLQFSEVGTDWDAKERLFRNFGGLLGPMDEPVGMQKWGKGPNVTVTVIWVDPVNVIAATYDILIESTAEFTHYKPPLNLPLRPGVWTVKILHHWVPVAETKFLVAPLTFSNRQPIKPEEALKLHNGPLRNAYMEQSFQSLNPVLSLPINPAQVEQARRNAASTGTALEGWLDSLVGGMWTAMDICATGPTACPVMQTCSQTAWSSFSPDPKSELGAVKPDGRLR

SEQ ID NO: 1043 - DNA, 21437 bp, Mus musculus
tcttcccagaggtgaaggtgggatgaagccaggaagggaaggttctccagccccacctgctgttgctgagcagggcccacaccttctactgtcgggagactgaacagagatataccctgaggggctttggagagaatggctgtaggcttaggagttcccttttctccactctccctttctgggcttctttcttccacttaacaccctttcccagagggctgccttagctggctgtagtttggacaaaagtattctgtgtccttgcagcttgccagtgtcagacaccctagtgcagaacccacagaaaagacactgcactgtcccttaacagggccaccttcttctttctttctttcttctgctcaggtctaggagggccccaggaaggagtggtggatactcttagtgtccctcatgggtcccaaatgagtgcatacatagacagtccagagtcaaaaagagcaacacctggagctcgtggtccatccttcaatgcctgaggagaggggaggtctttgtctgcactgtcaaaatattaaaacaggcccctacggctggagagatggctccgcagttaagagcactaactgctcttccggaggtcctgagttcaattcccagcaaccacatggtggctcacaaccatctgtaatgggatcagattccctcttctggtgtgtctgaagacagcaacagtggattcacatacattaaaataaatacataaatattttaaaaaatactgattaaaaaaaaaaaaaacaggcccctagggtctctgttcagggacattagttagttaaagaagcagcgctaaagcagagggctagtgcataacacaagaagcgtggggttccacccccagaaccacaaaaatgggattggaggtttgtgcctgtcatcccaatactcagaaggcagaggcaggccttcaggagttcaaggctagcctggtctacgtagtgagactcagtcaatagaaagatagataggtagacagatagacagatagatagatggtagagagatagatagatgatatagatagatagatgatagatggtaaatagataggtgagatagatagatagatagatagatagatagatagatagatagatagatgatagtagatagacaggtgatagtagatagatgcagatgagatagacagatagatagatagatagatagatagatagatgatagtagatagatagatagatagatagatagatagatagatagatagacagacagacagacagacagacagatagatatagttagatgggtagatagggagagagagagagagagagagagagagagatggatggtggatgggctggcaaatggctcagcctgtaaatgccctctccatcaggcctgatcccttaagcccacctggtttttcttggtagaaagcaaaaactgactcccacaagctgtcctctgacctccacataagtaccatagtatgtatgtgtcttactaaatacaaattctgcagtcaaacttggtgactcgtgcctttaatcccagcactcagaaggccaagctctgtgagttcaaggtcagtctggtctacagagcaggctcctaggacagccagagctacacagcaaggccctgtgtcaaacaaacaaaagagaaaagttctagagaggtgggctttgtcattaagagcacttattactcttgcagaagactggggttcaattcccaccacccacagggtggctccataaccatctgtaactccagtctcagggactccaaggccctcttttggcttgcaagggcttgcacacacacagcgcatacatgcagacagacccacagatacaatgctaatgctgtctgctcagcatctataaatgaggtgctctgttctggaaatcactgcatcaaattccatccctactgtgaagttatggaaaaattatcttctacagtttcagtatttgggttgtgctagatgttataaagtttgtagtaatttatactaaaacttggatttcaactttggatggtgcaagggaggcctggaatgatgggaggctgaggcaggagaattgctatgcgttctgggccagtttgaatatctatctaagactctgactcagaaaaagaaaggaagggcaggaggttaggaggagccactgagtcacgtgagtcaggtctccatctgatggggccaacctgtctcatgacacatttcccaaaccctacctgagaatgatttatagctccaactttacagtaaaccagtggggctcagagagaacaaatgacttccccaaagccacacagcccatcagggaaggatggggctcagctcatctgcacagtctctgctctggaacctgagaatgctcctctaggctggggaagaagtcatgccagccaggaaaatttgcaggattttgtttctgtccttcttccttccccatttaaggaagaaaaaggcaaaagaaccacgcatggcaggatgtcactcctagccagagccctgtctggaaccttccttgggctccagggctggggtcagggtacacagtgatcaagtctgacctttaaaatgaccttttctcatccctccgaggtctcccaaggctgtgagcaaaggagtgggtgggtcctcactcctacctgccctgccccacgcccttacacacacatgccaaaatcccatcttcccctgatcctgtgcccatagcatgaacagtctctttgggtctccaggagaaactaagggcctcaattataggcttgtggggagaaactagagagggagaaaccacccctacactgtgctgctccctgtcttcctagtacagcccctctatcactgagaccaagctgaggacttgagttctgaaggcatttccaggcacattcatgtggtaaatggagaccaggaattcaggttttatatcccctttggaaagactacacatccacactcctcactggcccttcccaatacctccacatctgccctgggacaccccactcctcacagggctccccacatctgccctgggacaccccactcctcacagggctccccacatctgccctggcacccctccatttttcaggcacctgaagtccctactttctaaaggccattcttctacctcaggtcttgctctaggactgtcaacatggatactctgtagtaaagacttgtcccttccaggacagccagggctatacagagaaaccctgccttgaaagaaaaaaaaagaaagaaagaaagaaagaaaaaagaaagacttgttccattgatggcgatggcctctgggcaaaagatctcagctttgcttaccactattctctgagaatggaggtggggagaaggacaccccctttccagctttggggagtctctcctggccttggggtctttgatttgcctaaggatggggggaaggactgggtgtcacatctgtggcccatgagtgaggtggtggctcctggtggtcttgtcacctcatgggacttaacccccttcaggcctgtacaatgttcatgtagcagacacggtttcaggtcattagtgcaggaggagaaactgaggcaaggacagactggcttggagcctgccttaggcacccaaaggcagaattgaatcccgtgctgttactactagctagctctttgacctgtgaccttgagctagccgtcaagtgctgtgcactgaagtaaacaaactctcccctgccatgaataacaggacacctgacagagcttggccaggcaaaggcagtgacaagcctagctaagttacccacacctagcccaatgaatttacctggaaagagagctttagagttccagtcacctggtcctcagcaactgggaaaggttctgagtctgtacagtgtctggttctgaattcttctgtgtcccccaggcacaccagaaggtagatcagaacccagagagtcagagggccaagaaactgctgctaaaccgccaggcagtcggcctgggcaggcaggtgagaagagtgtggaacatgtggcctggaccacatgtacaggcagggtgtgcctgcatccctggtatcctgccttttctagaaccaagcacagagggacccatttaggtcttagagaaatctgcaaacagacaggttcaacatcatcatctgacaggtgagcaagctgaggtcctcctctccgatgccatgggcttccagcatgatccacacacctacgcctaggggattctgcttccctgagccacagtcacaggagctgctatggtcgttccctagtggggaccagcactaggacaaaacatggcaaagaaacagaaggccatttctgggtacgagaactccataaacagcaaacctttaatcccagcactcaggaggcagaggcaggcagatctcatgagtttaaggacaacctggtctacagagctagttctaggacagccagagctacacagaaaaaccctgtctagaaaaggaggaggaggaagaccttcataagcataggagtgtgattgccaagaaacaatagttattttatttatagacagagttttgtgtaacccaagttggcttcaagctctgtatgtaaggagggatagcattgaacttcaaatcctccggcctccacctcctaaattctgtaatggtagcttagcaccaccacacccaacttaatatattgctggggattgaagcctgggcctcctgagtgctaagtgaacattcttccaacagccccaaccccaagatacctttttataaatgtccttagccaggttaggtgatgggggtgggggtagggtggcggtggaggcgcacacctttattcccagcactcaggaggcagaggcaggtgcatcttggaaatttgaggccagcctagtctaggacagccagctaagactacacaaaaaccctgcctcgaaaagctaaaaaaacaccaaaacaaaacaaaacccaaacttttccaagctcaggggctcccctgtgattctgccccttcaggttgagctgcaggggatggagtccatccatggcagcctgttctacattgggactgtgagcgactggagggctacagagatggcagggtggggaagaacacttgctgccaagcctgacaacctgagtccaatccctggaaccaaagccagcttccagaaagaagagaacttactctggcagaaaaggaccagggttcatttccctgcgcccacgtggcagttttataactatccgtaacttcagttccagggggaggatctgacacccccttcagccctccatggatattacctgcatgtagcacacagacacgcaaacatacgagcaaaaattcattcacattaaataaaaataaatcttttttttttaatctgaaatggcctggagctgttgctcagtggggattggcctcacagtatgacatcatggtccaatccccagtacctccaagtggaaggacagcagtgtcccctaaaacttcattgtagaattaccacgtaccccagcattcccaggaagggctgaaagagctcagataagcaaggacacataggtggtggggttggggggagcacggtggggggatgggagggtagtgtgtcacagcagctccaagagaggagcctgagggttcacagacaaaccaaggggccaccaaaaatgtgccaggctgagtggtagaatattattcagtcttcaaaaagaagggaattcagacacacacctcacctgtgcctgttgaataaattgaattccaagccgtgagccagccctggcacaaagggccacacactgctaggctgatccctcgagtccctagagccctaagctctaccggatgtggctcaaaggggtgggggttggttgggggggagaatgagtcagcatttgaggggaacacagtttcagtctggggagatgagcacattctgagactagatggaggtgcccgcacctcagtactgggcgtgtttgggtcgaagtcagttctctccttccaccatgtgcgttcctgggcttgaagtcaggattgaggtcctcagtgtgtcttatccagagggcaatcctttttatttgttatttttgacagggttgagacagggtctccctatgtagccttgggtagcctgaaactctaggctagcctcaccagagatctacctgcctcagcctcctgaattctaggattaaaggcgaataccaccaattgaggccgaatttgttttttgttttgttttaatgttaaaatattagctgatctccctctcagtttggaggcctgaagagacgtgtcagctctgaagctctctgcagacccacctgccaggccttccccctcccccacccccacctgactgcataatgactttgctgaggctagaagaaggatttaaactgggaatttgtaaagtttaccctgggccctgcccagaggagagcctcctccccccccctcccgcccagaacccaatttttatgcactcctattcttatgacgatgaagctactgaacttacttaacagctaagctggctaccaggagaagtcctgttcctagggagaagtagttattcaagggaatggctctgggactttgtaaggaataggtcatgcaaggtcacactctgagggctagcctgggctggactgcaggctgaaaggtgtcccgccatgggctcacctgccagtctccactcacagcccattggaggatgatttttgtgaatgctctccacagaccttggctattcctcagagaccagcccttgctctcagccaggcccaatctgaggaacctaccatcagacttttctcagtctcttctcaaaggcccccttctgcctttgctggcaccatttggttctcaactctctttgttgctaagggtaaccttgaatttttgatccttctcttgcttctgcatccctcccgccgggattgtaggtgtgcactaccatgcctgggttattcagggctggggataaaacctgggacatcacgtgtggcagacaagcacactaccaaatgagtcgcatccacaacccacaatggccaccgtttcttgtgctcattttgtagactgggacatggagaaccatccacaagtgaaaggtcacatgcaacaacaggctggtggctggacttgaacccagagctggtggttgcaggacttcccaagttcataatagactagacattcaggggtgtgtggcagggcaggaggttgcccaggaccccaactcagataagccaaagtcacaatatcccatcctatctctcccaggcacttaaagcttcagcccctagcctgaagtcatcagcaaacttgctccaggcaagccagtcttagccagtagccactggtccacaagcatcatttaacacttactgtgttccaagccctggaggcaagaactgagaaagacccagatctgtgatcgcactgtgatggtgacaatttcagcagggggaggggcagataataaatggagccttgttttattgttttggtctgtgtagccctggctatcctggaactgaatctgtagaccaggctggacttgaactcagagatcctcctatccttgcttccagagtattgggattagtatgccaccatggcctggcaaatgaagacttttgtttgggttgtttttctttctttctttctctctttctttctttctttctttctttctttctttctttctttttttttttttttttttttttttttttggggtttttgagacaagagtttctagaccaggctggccttgaactcagaaatccgcctccctctgcctcccaagtgctgggattaaaggtgtgcgccaccactgcccggcgttgttgtttttcattttgagacaggatcttattttgtagcccaggctgacttggaactcaggccagcctcaaattcagagatacacctgcctctgcctccttagtgatgggattaaaggcgtgtgccaccactgcccagccacaataagatcctttaaaggtgtgaattggctgcaagtggagtgagtgaaggctcacaggcttggggagactgaggtcctagggcagcctaaggtggaggagtcctgggccaaaagatctctggatcttccctgcagggaaagggctggaaactggacaggcatgaggtcggggtctggtggcagagtggggttagtcccggagagccctatcctcacccgtgctctcatattctccccaacacttctgaacttggaggagccggaagctggaggttctggagccacagcctggagcaaaaagcaggccccaaagcagtttgatgatagtgcccaaccttggtcctcctgactactaaccactgtcaagagcacccacagggtgtggtggccagcagctccttctgcagtcacagagtcagggatgcactcccaaattgagttggggtggggggacctgcctaccaccagagcaatgatctagatctgatccagcctgggcccagccccagaaaggaacacccaggagtgcccagactaaggactgcagccctcctccagtgacacagcaggggatctagggaaccctgttacaggaagggatgtttctcagcagggtgtgtgtatgcatgcttatgtgtgtacatccatgagtgtgtgtgtgtgtgtgtgtgtgtgtgcgcgcgcacacgtgttcgtgggagcctgtgcacagctgactttgctccctagcaagcaaggccagcagcagctctacctgccactggaggatgcggttatcccaggctgccaggtgcatcagaatgcctcattaagggatttggagacatggtgtaatccccactaagggatagatagatgctcaagtgtctcctctaggtctcaggacctggctgcatttccgttggtgttctgagtaggaccaggaatgattggtgcaagcccaatgacagaggtttggcagaaggaagccacagctcccagaagctctggtccaaattactgattcctcggtgagggggtgcagcaggctcttcggctcctccatcagtggccaggtcacctgctggctccaggttcctcagataccacagaacagggacattcacacctaggagaacagtaccagggttctgcccagttcacccccatcaggccagaatggccacagttgggtgtgggggtgctggtgggggaagggacccttccagatccttagagtttgacatgctcctgggttgggaagttctggcctccacacttgaaaatctctggggaactgatgcccaatgtcttgccagctttctgtccttgccttgggttacctaggaggaaagtgcgggtctctgctgtccctgaatgtcctcaacctgagttctcttagaagcacccactccgtagtttagacttcccatcacctggaagacccttaaatttccaagcctctggggccagaccaagccttgcctccctccctccgatcgtgccctacctcccggctcccttagagttacaccctgatagccaagccacagtgtgacttgcctcccaccgtcagctcaagccagtccttggcgcagcagaaaggttctggcggttcaccaagtgtcccgcaaggaaggagcacaggagatgccctggggagcagagagccaaggggcgggatcaacaggttcgagtgcggggcggagccaagagtaaggggttggggtctctccaggtgacagtagccaccgccaggcccgcgcctcctcccccggcggtgattggcaggcggcctgcgccccggctcccaggcgaccgacgccccgcggggcaggcgagtaggagggggcgccggctatatataccactgctccggagggctgggcgcgcggggactatcccgccaccgttgcgtccctatttgctctcgctacttaggtctgtgcgcagcactcaccgaactcacggcccgcagctcgaactcacgcacggcccgcgggccgggatggcgaaacgcgggccgaccacagggacgctgctgcccagggtcctgctggccctggtggtggccctggcggaccgagggaccgccgcacccaacggcacgcggcacgcagaattggggcacggctgggacggcttggtggcccgctcgctggcacgcctgccggtggccgcgcagcccccgcaggcggcggtccgcagcggcgcaggggactacctgctgggcctcaaaaggcttcggcggctctactgcaacgtgggcatcggattccacctgcaggtgctgcccgacggccgcatcggtggtgtgcacgcagacacgagggacagtgagttctgggcgcgccgaggggatagggtcccgggcagtagtagtctcgggggctgagtagagtcgagctcccaccccttgggctccaggactgagagcgcacccggcggccgagccccgcctcccgccttcggaagcctggtctctcggtgcggaattccatcgccttcacccgcccgcacccacgggagcccgggacaagcgcccagactgaggctggacttgagggccaccggtagacaggagatgagctcttaaagcttgctttggggaccctgggcttttcaccccagcatcgagatcccaagaggcttagagtcggagggtctgtgtgggtccagggtcacctaggcttttctgacctgcgatccctcccccccaacccccgcctccccaggtcttctggagctctctccggtgcagcgaggcgtggtgagcatcttcggagtggccagccggttcttcgtggctatgagcagcaggggcaagctcttcggtgtggtgagtgccagcgggtctggctgggccacctgctcgatacagtgagcaagactagcgggattgtaaacccttcaccccacacatacacttgtgtgttggtcacagaggactggcagtaggattgccaggtctcacgttttcagtcaaagtagccagagccaggctgggtttctagaccaagggaactaccccatccaatttcctcctgagtgaggtacttactgattggggcgggtggggcgggaagagggggactccagcaggagatattaagttgataggggcaaagcaggtgagctagctatgcctagcgtggacttatcacctcttcgaaatctgggacagttttgacactccgcctacctaagaaagatctcttgggtcccgattgcggcaggtccctggctcacccagtaccctctttcccagcctttctttaccgacgagtgtaaattcaaagaaatacttctgcccaacaactacaacgcctacgaatcctacgcgtaccccggtatgttcatggccctcagtaagaacgggcggaccaagaaggggaaccgagtgtcgcctaccatgaaggtaacccacttccttcctagactgtgaccctccggagccctgcctcagcctcggaagcacaccctacccctcaggaggagcactttctctcgatggagaattgtttgcaaaaaaactggtctaagatatttaaattatttaaatatgtatatatggacgcccaattatttataattttatgtattctcattttcggggggggggatatgaccaaaagaacaaacaaattgcagctcagacctctttggaatagcggaacagacttctttcttcactatcaaagataagggtgtgatgctgtttcatgtgtgcctctaaaacttggtgacatcagtttccaagggtgcctggcctgtaactggaaaggcctgcctgggacctctgaggcagtgagaaggaccctgagcgttcccgatcgggagcattctgccgtcgccgctccctctgcttcctttggtatgaaccctgtcggatcggtttactccagggacagaagtcctcccgcctctgtttttagatctccaagactgatctttgaactctcttgcagtcaatcatcttcttggacctaccggataggagacccttagacaactttataaactcctgtttgccatttttggactggccaacagggcacgttgcttgtagccactggaactttgcttttctggagaggaactaggaatggacaagagggtgtgtgcgctcgccacaactcaaaactctggggatgaaattctgttttgtgatagaggatgatttgttgggatataacaatgtattttgcaagaatcaaactgagaaaaacaggcttccctgaatatgggaagctttgtgctggaactccataatttaagggtgagctgccctttcccaccccaggcagcctttatgcaggcagactgcaggagtccgaattccggtgctgccccaaggtgaaggaattctatccccatctacctcagagttcctgagaccctggtgactaagctggaggctctgctgggtgcatctgcctgcttctcttccacatgtagtatctggacccttgtcacgttccagctatctttacccaatgatttacttttagtaaggggtattcatggtgaaaatatgcacgaccagctgtcggagtgcactatatggtcaccaagtcaagtaacccttatatttttctttatatattttacgaatgtaacccctgtcactgagaccaaaatggaagagcagggtcggtggcatttaaaaaaaagggctgaggtgagggagaacaattaattttaatgaatgactttggagtttatacaaaatgaccttagctcgcttcagggaatgcttctccccaagatgttaagactctgctgggagacttctgagccacctcccgaattaactttatgggaggctacagacagcaagactggaaaatctgattggcatttttttttttttgtctttcacattcctttagaaaactctttgtttggatgctaatggatacttaaaatactattctgtaccacagcccaagatggaagaagccacgccccaaagctgaggtgggagctcctcccaaacttcctttctgtctggtggctcacaggacaataagattttgtgttttttaaatccaggccctaggctccaagagtgttggggagaagacagttgaaatgtcttttcttcttgttattttctaaaagacggtctcatagcccaggctgtacctgaacttgctatgtcactaaagatgaccttgaatttctgatcctcttgccccatttcctagtgctaaggttacaggcattgcccaccacgcccactccttaggtgctgggaattgaaatcaagtgcctgccaggccactccacagagataggcctccctcttttttgtgggggaggaaatgtggggtcttactctgtagccaaggctggcctactgcttgagcccaagtgttgagactacaggtagaaggcacctgccctgttctgatgggattctctgcagctatgttgcttcaggcaggctgtggtcctacctgacacctattacctgtttcttcagccagctagctccctttcctgcgcccagggacaagactgtatctttggaattttgttaccagaatgggtttgatgtttctgctctgtatctgccactgttaccgagtcggtctgtagttactacaggtgtcgacccagagatagtatgtgctatgcacactggatgctccatccaaagagaagcattcaatcatgtatagacagccccatggactgatgggaatgattgggagagatattaaaatgacaaacgtgtctgcaagcacctgtgtctgctttgtcttttttctatttgcagctgagcagagtgggagcaaggaaactagttttagccagctgtgtgcacacacaaatgtggcttggaaaatagtcccagaggcaaaggtatatcacaaagttttaccgcatcctgtgtctcccttcagtggggttctgtggctgcccactcagtcactaacccgggtgtaagggtctgtgtccacacggtgaatacttaccccatgaagcacaatgaggcagaagctggccaggaggagcacagtcaacacatatgtttgacttcagccaactgctctcagtgaagatatgaaatcatataagtcatcaaagataccagatcacaggttgattattttataaagtttctgtccctgcttcatcctcttaaactcttaagattatgggtttgtactactacatctggttgaaatttggtcttaattgttcttatatatttatagcttgtatgagaatgtgtttagatttttgggtttgttttgccctttgcttttaagatggaattctagcccactagagtatgagacactatcttttaccccaagtagtaggcttctggtgatgaaacacctttatcttcagcactcgggcaggaggatctctgagtttgagaccagcctggtctatagaatgagttagttccagggctaattcagagaaatcctgtcttaggggggaaaaaaaaccaagaagcaagtaggggttagagatgtggctcaggaggcaccaagcacttgcccagcaaacaggagccttgccttgggttccagcatcccataaacaggctgtggcatacctgtaatcccagcatctgggaggcaaaagcagaggatcctgaattcaaggggaccctccaatacattgtgagtttggggccagcaaggaactagggcaagccacttatgacatatccccatgcaaaggaggccaggcataggtcagactccactcaatccacctggcccatttagacttccagccttcaggttaactccacacacccaggccttaagccactcaattatagtaccccaagggactggtacaggagtctgttagtcatagatggtcagaggcaactagaatcttgagcatccacctgttctgttggctcttgggctcctcagcaaagttgttctagccaaagtaaccatcgttagcttactgatgcttttgaattggtcatctccagcacagaaagattgtgagagagtgtgtgtgttgccggggtgtgtgtgtgggggggggtcctctgtggctggcattgagtagggttgagtgtgtctttgttttgttttagttttgaagtttttcttgcatttttttattgtgtatgggcttcaggataggacatatgcacagagagaacaacttagaagtcagttcttggtcaggcatggtagaacactttaaataccagcactcaaaggcaggtgggtctctgagtttgaggctagctcaatccacatattgaaatttcaggccagccaaataagaccccatcttttgtttttcctgtctatcactctccagtcatatggcaggtttggcagttgcctttgtccactaagccatttctctggccctggtttaagggtttgggttcttttcagtttgttgttttgttcaagataggatctcactatatagaccaggctagcctcaaacttccagagatcttgcctgcctctgtctcctgaaggtcaggattcaagacatgcaccaccacacctggtgatttggggtttttaatttactgggagagcttgcacacagtccccactaccacaggtccagtttctcacatttggggaaattgctcaggtcagtacatctggtgtgcagtggatgagcctggggcttcctcaactccctttcttcagggaaaactttctagtgttagagttacagtagccaaatagagattttctcctggtgacaatggctgtaagagaagccagaaggcatactaaactgtaagccacctgaagctgccccaagtgataacatgccactacccagtcaaggccacctgagccagactgagtgcacaaaggtcgcttaagtggtgggtgggagagatgcaccacagggcgtggtcagccaaggttatttccactttcacctccctaagtggtgtggcattcatctctggaggagtctggaaagcgtgtaactcacctggcaggtggcctcactcctttaaaggaccacttgtagcatgtaaaacagtcaggggccctgcgtcattggccaagcccagagcatcccgtcctggacagtctgtatgcatgtgccccacacttgctgagtccttccatgttaggcacagctctgtcagctgtccccttcgactttcctcttgctgagaggaatgtgtgcccctctgcttcatcattggcagaaacgtctctatgtgacttctgaggcaggctaccctcagtgttctgagctactacagggttgggcggcagaggtcctgtgtctgttgtcccaggaggaagcagatccggtgcgggctccggaggtgagtgctctcttaagagcccttattgagctggagttttacatgaagacagcctggctttcaatcaggctaggtcttaaaaactaaacaaaccagaaatccagcagtggggaagtagaggcaggaggctcttgatctcaaggtcaacttcccatacagtgagtgggtagccagccagggatcgtcaggtggtaggggcaggcagatggggattcaaggtcacccaaagctacctagtaagcttaaggccagcctgggctacttgagaccttatatcaaaaaccaaaaaaaaaaaaaaaaaaaaaaaaaaaaaagcagggcagtggtggcacacacctttaatcccagcacttgggaggcagaggcaggtggatttctgagttcaagaccagcctggtctacagctggaactacaaaaaaaaaaaaaaaaaggaacttttagagttagaggctgtaccatgggagtctttctggctttggtgcctgcttagctattgtgtgttagcccaatgctaatactggttgttctagggaggatggaccatgcagggtcttctggcagaagcagactctattgctgtgattaaacactctgagcaaaggcagctcaggaaaggaaagggtttattctgcttccaaatccaaatccaaatctgattcctgagagaagagagaagtcaggaactcgaggcacaagcttgaaggcaagccatcttgctttcccacacagcattacctccaaaaaagacaactcacacacagccaaggacacgcagcagctttcttacacagcccaggatcaccaggccctgtggtgcactcctttaatcccggcattaggaatgcagaggcaggtagatcactgaattccaggagacccaggactatataatgagaccttgtttcaaaaataagcaaacaaaaaaacaaaaacaacaaacaaaaattacccaggatcacctgcccagggaatggggccacctacagtggtctgggatcccccacattaattaacaatcaagacagtcccctacagacatggctacatgccatgatgcacttagcaattcctcaattgagactcaagtgagcctaggctgtgacaaaatgactgttaaaactaagacagggccgggtggtggtggtgcacgcctttaatctcagcacttgggaagtagaggcaggcggatttctgagttcaaggccagcctggtctactaagtgagttctaggacagccagggctatacagagaaaccctgtctcaaaaaaacaaaaaacaacctaagacaggctccaactcagaagagagcttctatcatactaggccaacaccctgcactgaggtgttgtacttactgtacttacactttcactttttttttttttttttttggtttttcaagacagagtttctctgtgtagccctggctgtcctggaacccactctgtagaccaggctggccttgaactcagaaatccgcctgcctctgcctcccaagtgctgggattaaaggcgtgagccaccaccgcccggctgtacttacacttttaagtcactacattttcttcattaattgagtattgcttaactaattagctgactaactgattttgagacaggacctcagtctgtagccatggctgatgtgtaactcactgtgtataccaggctggcctagcaaatcacagagatgagtgctgggattaaaggtgtgagctaccacaccaggctagattttttttcaaagatttatttattattatatgcaagtacactgtagctgtcttcagacacaccagaagagggtgtcagatctcattacaggtgattgtgagccaccatgtggttgctgggatttaactcagaacctttggaagagcagtcagtgctcttatctgctgagccatctctccagccctagatttaaaaaaaaataatgtatatgtgtgcataagtattggaagcagtaggatcagaaattcaatgtcatctttaactagaaattgaatagcttgggctacatgagatcttgtctcaaaaaaacgagagaaggagaggagacaggagtagtgatttgcattttttccccagacagggtttctctgtatagacctggctgtcctggaactcactttgtagaccaggctggctttgaactcagaaatctgcctgcctctgcctcccgagtactgggattaaaggcatgcgccaccactgcctgggttgtgatttgcatctttaatcccataacatggtaaacagaatcaaaaagatctctgtgagtttgagtcaactctgttctatatggtgggttgcaggcccagcccaggctatatagtgtgaccctgtctcaaagaaaaataaaatagggaaaagaaaagaaaagaaaagaaaagaagagaagagaagagaagagaagagaagagaagagaagagaagagaaaagaaagaaagaaagaaagaaaagaaagaaagaaagaaagaaagaaagacaagaaaagaaaagaaaagaaaaggaagggctggcgagatggctcagtgggtaagagcacccgactgctcttccgaaggtccagatttcaagtcccagcaaccacatggtggctcacaaccatccgtaacgagatctgactccctcttctggagtgtctgaagacagctacagtgtacttacatataatcaataaattaatctttaaaaaaagaaaagaaaaagaaaagaaaaggaagattcaggcttctatggcagtgctccacaggcagtgtttttgatagccatcatccactgtaccgttacctcaggctggaaattcacagctgagttacctactttggggctgtgtcttcactccacaggtcccagactgcattctccctgtgtccgaatatgctcattttctttgtatctctgccttgatctttacctatgaggacatgaaccctgtggggtcaagcctcacaatagtgaccctgtcttacctcgttctgagcaactggagggttaggcctccagcaacaacagatttggagaccaagtcccctataacaaagccttcttgtgagcagtgtggggacattgtcatacacagtcaccttctggtctctcctctagccatgagaacttggtagcctgcccacatcccaaattagacgtatggagcggagggacacacatgaggatgggtgaggcaaagcaacactccaacccaggccagcctggaccagccatgaaaacaggttcaggccctggggccaatgggcagtgcccccaaacccaccttggtgtggtctcaccttccctcccattccccagggagtccctgactcttccaagcctcttgacgccagcccaggaggctgcgggtttacagaggggcaagcagacctggagaagaccccaggcctccagaggccctttgaacccctccagggccaggcttatttgtacttcagagctaacttcccttaagttacatttgccagaatttgctgatggctttaaatagctcctaattaccttccagatggacagtggagcaatgagaggccaacctaggttgttgtgcctccctcccacccacccacccctgcccccagacacagacgtgtgctgagggctcccaagagatgtaggagcctggcctcagccccagccaaggcttcagcttggctgaaagaccctggaaaagcaggtgccaaggcactgtctactcctccacccaacaccaacccctcttcctccttgcatgtgggggctacagtggatacctaagccacgtcacccaacatctcctgacactcattcctagcaggcaaaggacttgtgtgtgtctgaaatgggaggtgaaagagactcccagatgtttggggctcatccatgctgaacagggctctgaggacctatgtgtgtttcccatggagcagggcaagggccactggttggtggctctgaagaacacacaatttcctcgtgattctggcagccagcagttggtagtgggctaagcagggtgtgtcccctccccaggtccaaagccgattccttctggcttcctgcagttcctgggctccaggcagtgggtgatggtggctgtccttcagtcctctgctctgtctcctcttcttctctgaaagggcacctggtattagatgtgggtctacttagaacccaagaggatactcttgagaatgttagctatgctgtctctgtagagagttcatttccaaagaaggttccataagctagaaggtagacccatcttttttttgggggggtggggtgggcagcaaggtgcacattctgcttcctacagttagggaagcactgcccatcccccagctccacaggcttggctgggctgtgcatggaacaggcatgcaactggcctttcagccctgtccagtatggtaggccaggcacaggggacagaggagctagccctgtgtggaagtgtctgggattagagcagatacatcaccatactcaagcggatccctaaacactggactcaggagggccagagaaggccatgcaagttctccctgtccagcctggtctcagggcctttgcatttcactgtctcaaaaactccctttcctaagctctcccaagcccacacagctatctctctactctgtatgtttatgccacagactctgagcctgtaagaatgagatcccatattatctgccttctctgagactcccccagtgtcaagagaaggaaccagcatgcaagaacaggacaaatgtctgtgaagaaaatgagtgagcgtgaacaggaggtcaaggatccggtcccaggcagctctcagtctgggcaagcatttctaaactttgccttccttcctgttgggggtgaaggtctgggtctgtttggagactcagggtgtttgttcctgcagagctaaggctggctcattccaactaggtaagagtcaagcagccccccccccccccatggaacatcaagctgccttcacgcctgttgcaggggccaggctgaccgtttgctgatgtgtgcagtgcccaactagggcccttttggcgagaaatgtgcattttcgcgcaactcggcccaggaaatccctggctattcatgtgctaacacaggatctagtccccaatggcc

SEQ ID NO: 1044 - DNA, 609 bp, Mus musculus
atggcgaaacgcgggccgaccacagggacgctgctgcccagggtcctgctggccctggtggtggccctggcggaccgagggaccgccgcacccaacggcacgcggcacgcagaattggggcacggctgggacggcttggtggcccgctcgctggcacgcctgccggtggccgcgcagcccccgcaggcggcggtccgcagcggcgcaggggactacctgctgggcctcaaaaggcttcggcggctctactgcaacgtgggcatcggattccacctgcaggtgctgcccgacggccgcatcggtggtgtgcacgcagacacgagggacagtcttctggagctctctccggtgcagcgaggcgtggtgagcatcttcggagtggccagccggttcttcgtggctatgagcagcaggggcaagctcttcggtgtgcctttctttaccgacgagtgtaaattcaaagaaatacttctgcccaacaactacaacgcctacgaatcctacgcgtaccccggtatgttcatggccctcagtaagaacgggcggaccaagaaggggaaccgagtgtcgcctaccatgaaggtaacccacttccttcctagactgtga

SEQ ID NO: 1045 - protein, 200 aa, Mus musculus
MAKRGPTTGTLLPRVLLALVVADRGTAAPNGTRHAELGHGWDGLVARSLARLPVAAQPPQAAVRSGAGDYLLGLKRLRRLYCNVGIGFHLQVLPDGRIGGVHADTRDSLLELSPVQRGVVSIFGVASRFFVAMSSRGKLFGVPFFTDECKFKEILLPNNYNAYESYAYPGMFMALSKNGRTKKGNRVSPTMKVTHFLPRL

SEQ ID NO: 1046 - DNA, 23471 bp, Homo sapiens
gattgagtgtataccttggcgagtgttcaaatccttgagtgacatcaccataacgaaacttcaattctgtgtcttccacctgaggacaaggcttcttggctttgccatcaacagaaatagaaaatgggaatgaaattgaggccaaacgccatattattctagcaataagtagtggtcatatgaaatttttttttaaagccctgtcctaggtcacattaaaagattcatttcggccaggtgcggtggctcacgcctgtaatcccagcactttgggaggccgaggcaggcggatcacgaggtcaggagatcaagacatcctggctaacatggtgaaaccccgtctctactaaaaatacaaaaaattagccaggtgtggtggcgggtgcttgtagtcccagctcctcgggaggctgaggcaggagaatggcgtgaacctgggaggcagagcttgcagtgagccgagatcgcaccactgcactccagcctgggcgacagtgagactccatctcaggaaaaaaaaaaaagattcatttctaccagaattttatttgtgctctttacttatcaattatgtgatattacattcatggcattttgattaactatgtattagtaaaagttgtttaaagtaaaatccagaacaaaaccatttaatgctaacagtcataagaaattcatttgtttgtttgtttgttttgagattaagtctcgctctgtcacccaagctggagtgcagtggtgcgatctcggctcactgcaacctccgcctcctgggttcaagcgattctcctgcctcagcctctgagtagctgggattacaggggcacaccaccatgactggctaatttttatatttttagtagagacagggtttcaccatgttggccaggctggtcttgaactcctgacctcaggcaatctgcctgccttggcctcccaaagtgctgggattacaggcatgagccactgcgcccagcctaggaaattagttttttaaatatttcatttattgcagtgaataatgatagagtgaacagccaggtgctgtggctcacgcctgtagtcccagcactttgggaggccgaggcgggtggatcacttgaggtcagaagttcgagaccagcctggccaacatggtgaaaccccatctctactaaaaatacaaaaattagccccgcgtgttggtgcaagtctgtaatcccagttactcgggaggctgaggcaggagaatcacttgaacctggaagccagaggttgcagtgagccgagatcgtgccactgcactccagcctaggccacagagcaaaactccatctcaaaaagaaaaaagaaaaaaaaaagaataataataaaatgatcaatgaaagactttcgaggttaaaatacaaagataatgggtgagggtttataatatttgtctgctggagtaaagcttattcatgtattttttctaaaataaaagatggcagctgtcaaactggtattgttatagactccactggacacatttttaaaagtaacagaagaggctaggcgtggtggcttacgccagtaatcccaacattttgggaggccaaggcgggtggatcacttgaggccaggagttcgagacaagcctgaccaacatggcgaaaccctctctctactaaaagtacaaaaattagccagacgtggtggtgcacacctgtgatcccagccactcaggaggctgaggcaggagaattgcttgaatctgaaaggcggaggttgcagtgagccaagatcacagccctgcactccagcctgggggggcacagtaaaactgtgtctcccccaaaagtcaattaataaattaattagaagtaacagaaggcccagcgcagtgactcatgcctgtaatcccagcactttgggaagacgaggtggaggatcgcttgtatccaggagttccacgctagcctgggcaacacagtgagacaccatctctacaaaaaacaaaaagaaattagccaggcatggtggcgtgcacctgtagccccagctgcttgggagactgaggtgggaggaacccttgagcccaggagtttgaggcttcagtgagcgatgattgcctcactgcactccagcctgtaacagagtgggaccctgtctcaaaaaaaaaaaaaaaaaaaaaaaaaccaagaacaagaacaacaaaaaagagtaagagtattttaaatcattcatagttaaaatgtaccagagattatccttatccctctgagcccttgtccctgctgaagtcctctcatctgatctcctatcttcttggacaaagaaacacacatatgtcccaagaatcaagtaatgcttttcagaccaaggtcaatctaaatccaaatttgagtgaaggggtgggtgcatcctgccttcagtgatccagatttacaaacccacatgttataacaccaagttcagaactacccgagagcaaaggagacgtgacttctgtgtgaacaagggactcctccctgataggggagggtgggccccaaagcttcattctagtttttgtcctatgatcacttgagcatccctctcaatcccaatggcaagactccagaatgttcccatccaggtgccaccatagacacctttcttagggtcccccctagatctagtcctcaggcaacacctcttccagggggtgggatggaacctggctttgctgtcctggagggagacagggggaaagagaaggaacccgcctgaggcatggatgtctcacacagccagggccgggtggtcaggccttccccaggcctcgagtccatccagggagagggaggggggagggagggtacagttgccaagactgactttgaatagaacttttcttccacctcctccctaccaggatgcttcccttgaggggcctgtggtctgaaatctggagaatggggagcctctctgcttccccactggtatttcccatcttctctcatggagacaggtggaatcccatgcccagtggtggtgtcagggaggaaagtgggcttctcttccatgttgctgggagaccctgaggaggagggacgggaagaagcaagtggggaggaggcacaaccccaccaccctgagggtcagcccaccaggcctgtggggtgctccttctgctggggaaggttgtgacctcaaggattccctggcatgccccatggggtgagctgagcccatggcaccctggctttcagcacccctcaaagggagctgaaacccttcctgggtccacaaagtcctgcccatccctctgacctcatgcacccacccagcttccacacactggcttcctgaagctcccactcttccaccttggctggctcctactcaccctttctttaggtctcggctgaaatgaccctgtccctagatcccatgactctcctgagcaggcactccataaaggctcactcagctgacggggtgccagacccctgagcgggaaaggtgggtccttaggtaacatgggggagccctttccttcttggccttccactggcttctgtgcaaggaatgggtcactttagcagcccttaggtgagtcccttctggctctgaccattttttatttgaaatattaaagagactgccgggagttggaggcttggtggtctgttttgtgatcctccaaatgaacaaatcaactggggttatgatatcaattcatggagcttaagccccactctgatgctgacagaagagttcacctgcacagtttgagcccctgacatccctctgaggcagacaaggtccagaccaccagctccattttgctgcaggggaaactgaggcagacagcagcatggtcaggggcctgactttggcgtacacagcaggagtttgagttttggcttagctctttgctagttccatgaccttgagtgagctgctcagaggctttgagtctgggttaattcttctgtaaaatggtgatgaccagcagggccacaccctgcagggctgggtgagaagaaaagacgatcagccttgcaaagcagccccaccctgcaccaaacccgctcctgccagcacctaatgaacgtggcagcgatgacttttatctggagaggtactggcgatcctgccagctcacagcccgtggataagacaccgggcactttacatgtctaattcttctaattccctagcaagcaatgaaggcagacatcgggtcctgagaggctcagcaaatcacccacattccctcagtggtgagagacgccaggacctggctccccagccctgcactcaagctgggtagtcacaccactcagccagcgatggctgtgggcacacatcaccgtgtgcctgcccgttctaagggctgaacgcacattctctcatgtaactattccagaagccctctgaggtgagaacgctgattttccacattttacagatgaggaaactgaggcatggcttgtcttccatcttcccagggttgagtatctgatatgtgcaaaagatctgcacgcgtgtgcacagggaggcaggtggttttattgattcgcagtcattgaaaccgcccccaaagcctgtcgcccagacctggctgggccaccttcagagtagaagagaaacagggcagaataacgggagaggggaaactctcctggacgcagaactgggtaagacatcgctataagccaaggagtgacctgctgtctctttaatgccccaggatcaaggtaacttgaaaacaacaacaacaacaacaaaaaacaaacaaacaaacaacaacaacaaaaaaacatggaaaacagtatggcagtttctcaaaaacttaaacatagaattatcacctcatccagcaattccatttctgggcatattcccacaagaaatgaaagcaggaactcaaacagatatttgcacaccgaggttcacagcagcatcgtccacagtagccaaaaggtgggagcagctcagggaccgctgacagataagtaaataaataaaacgtggcccatccatacctggaatattattcagcctctaaaaaagaaaaaaagaaagcaaattcccacacatgctacatcgtggatgaatcttgatgatgttatgctaagtgaaatcagccagatacaaaaaggacaaacattgtgtgattccactcatgaggtccctaagtagtcaaattcgtagacacagaaagcgaagatggtgggtgccggggctgggggagcagaatggggagcgagtgtttaatgggcatggagtttcagtttgggaagatgaaaaccatctggagatggatggtggtgatggttgcactagaatgtgagtgtccttaatgccacttacccgtgcacttaacaatggctaaaatgagagaggctgtgagtgtgtggggacagagggtgtaagggaactctctgtaccttcctctccattttgctgtgaacttaaaactgctctgaaaaaagtcttttaaaaaatagttaacatcaggccagacacggtggctcatgcctgtaatcctagcactttgggaggccgaggtgggtggatcacgaggtcaggagaccgagaccatcctggctaacacggtaaaaccccatctctactaaaaatacaaaaaaaaaaaaaattagccgggcgtggtggcgggcgcttgtagtcccagctactcaggaggctgaggcaggagaatggcgtgaacctgggaggcggagcttgcagtgagccacgatcgcgccactgcactccagcctgggtgacagagcaagactccacctcaaaaaaaaaataggttaacatcaattttatgttatgtatcatgtatattttaccacctttttttttcttttttgagacggagactcgctctgtagcgcccaggctggagtgcactggcgcgatctcagctcactgcaacctccacctcccaggttcaagcgattctcctgcctcagcctcctgagtagctgggattacaggcatgcaccactacgcccagctaattttgtatttttagtagaaatggggtttcacaatgttggccaggctggtctcgaactcctgacctcaagtgatctgcctgcctcggcctcccaaagtgctgggattacaggggtgagccaccgcacccaattaacaccattttttaaaaagctaaaaaaaaaaattggctcaatctccccttattctgaaggtcctaaagaaaaacatgccacttgctttggggtgcttcggctcagtgtagaccagtctatcccaccggccttatcatcctcctggacttttgcagaaagacatcattgtgagggtgtcttgctgaagccaagaaagggaagttgaattgagaaagcagttgagctatttacaaagtttacacagcctgggcccttgccccgggctgagctcagtcattttgccctgaggactataagtggactattatgcagcactttcttttttattattattactattaagccaagtaagttcttaacagctaacacctgagctggtggctctgagaagcctcttcactccttcacgggagacgggaccattcacatgaagatcctacattgttgtttttttttttttggaggtcgaaaaaggtcactgttaggaggctttctgggcctttgctcctctccctcaatttattacccctccagtggctgatgacgtacagggagacttccacccgataatgacatggctttgtttatttcacaaattcccagcatttactgttaatcagacccagtttgaaccacccccaaggggcttgcagtctaaacagctcactttgctcagcctcttcctgaggtcaggcactgtcttgctaaggccgacatcagctcatgcccattttacagatggggaaactgagaatgctaagaagtgaaatagcgtaaggttatacaactaacagggagacagcctaaacttgaacccaaccggaagcccaacatggccccaagccttcctcgaaccccaggacttggcaaagcgggcgtcctggggtaaagcatggcagaagggctttgggtccaagctaagtgagggtcctgtttctagatcacctggccaggtgcagtggctcatgcctgtaatcccagcactttgggaggctgaggcgggaggattgcttgagctcaaaagtttgagtccagcccgggcaatacagcgagacctcgtctctactaaaaaagaaaacaaaaaattagctgagtgtgtagtcccagctactcaggagactgaggctggaggattgcttaagcctggaagtttgaggctgtagagctatgatagagccactgcactttagcctgggcaatggagcaagatactatctcaaaaaaaaaaaaaaaattatatataggtccccttgtccctctgctgagaagtaaccagatctggaaaagatttagtcaccttggtccaactatttctttcacataaagaaaaaaaaaggcaatgcagaccttcccatgggggcagctctgcctgaggcctttgcaggtacctctgtttgtctgccccggggcacagtggcagattgggcagggcagcttgcagtgaggattgctgatggatgagctcctagtgtacctagccagccatttactcacaaacagctattgagcacctactatgtgcccagcactggaggtacaactggcaacaacacaaatccgggcttgctccatggaggtgacaatctaaatgcggtggagggtcagctaacaagtgcagaaggttctcttaagagctcaaagaagctccaaccagaaggactgggcaggggatccagaaggcatccccgagtggctactccaatggagtggcttctccattcaggcaaacctgaatgggataagtcattggcaggaagatctggggccgggggtcatccagtgggaaggggagagatgacgcggtcagcatggcgggaacacaggagcagaaaggaagcaggtgggaagccaggtcaagggccaggggcacggaaaggggtcagatgcagataagtgagtgcttcctggtgcatccttcatccgcaattcatccttacctgtgcttttgttgcctccattgcacagctgaggaggccagggcctgcggaggttgagagtgtgctcagggagcccccggagcaaagtggaagccagattccagatcagttctgctgggaattcccagctcccaaaagccctgctggctgtcagtccccagtcaccacaagcacctatcctgtgtgggtgggcctgcagttctgggagatatatcagctgcctgcagcgtcctttgctgaactcacagcaaataggagagacagggaggggtccttgggaagccctaaattgagcttgctgtgggagtcctgggaagaaaggagcctcatcctatcaaaagccgggggaagacatcagagtccctctgctcaggtcagctggcacaggtgggtctccaggcctgggtctcacttccccagagggtgtgttcgggtggccccaggctgagggaggaaagcccacctcccatgtcattttgcaaatggggagtcagggacctagagatggaaagacaacacagcaagtgagggatgggttctaggtcccctgcaccctgcaccctgcaccctggccaacgatgtctatttggcaccagatctgcaggctcatctgggggaccccaggacccagaggcagccgggttgcatctcgaagctgtgagctgcagcccaggaaggtccaggtctgggtggcgctgcccaagcaggctgcaggcccaaggaggaacaaagatcctctcaaggggtgcggagctgaggttccggtcctgccaaagccacttgatgacccccaagtgcccccctttctgcacctcagagaagagccctcaagcctcccaggtcccctccaggggcacgaataagccccagcagggttctgaaggggtcccaggaatctccctgtggggatgcggtggaggtggaggaggctgcggtggcctggggacatctctggtcacaggtgctggtggtatgagagatggggtaggcaccaagccccctgcagctgtggctaggcgggcctgcaggaagggccaggcaggctcctcagggaccacaaagaacaggggttttcacacctaggtgggcctgcatctagctaggccagtccccatcaggccataatgggcacagtgggaggtagaaccatgagtgagagaggggaggcttccagaggcctggcctgggtccctgctagattgagggctctggctatggtacatggatatttctgctgtggaatcaaaggagcaggggatgctgaatatcccctctggccctatgccctgctacctgtcctttcacggaagggtgtgtgtgtagggggtgcaggaccaggcctccctgggtgcatctctgccaccttgccctttggctcaggtggacctccaccaggtattcagaactccagcccagaaacgcgccaagcctgtggggccaagacctagggggtgggggtggcctccctcccgcctgtagccaaagggtcctcccttgcccagccaggccccggtgtcgcttactgctcttatccacccctccttcccaggccggtcctcaaggccccagcaaaggaaccaagttcccgtgagcctccgaaaggcgaagggcaggcagcagccgctggcttctgcgcccactaggagcttcggatgcccgagttagggctgcgccaaggcggccggagcagagagggagacggggacggggacaggcagggacaaagtgcaagaggcaaaactggctgaaaagcagaagtgtaggagccgccaaggggcgggacgaacaggtccgtgggccgggcggagccaagggtgggggccggggtccctccaggtggcactcgcggcgctagtccccagcctcctcccttcccccggccctgattggcaggcggcctgcgaccagccgcgaacgccacagcgccccgggcgcccaggagaacgcgaacggccccccgcgggagcgggcgagtaggagggggcgccgggctatatatatagcggctcggcctcgggcgggcctggcgctcagggaggcgcgcactgctcctcagagtcccagctccagccgcgcgctttccgcccggctcgccgctccatgcagccggggtagagcccggcgcccgggggccccgtcgcttgcctcccgcacctcctcggttgcgcactcccgcccgaggtcggccgtgcgctcccgcgggacgccacaggcgcagctctgccccccagcttcccgggcgcactgaccgcctgaccgacgcacggccctcgggccgggatgtcggggcccgggacggccgcggtagcgctgctcccggcggtcctgctggccttgctggcgccctgggcgggccgagggggcgccgccgcacccactgcacccaacggcacgctggaggccgagctggagcgccgctgggagagcctggtggcgctctcgttggcgcgcctgccggtggcagcgcagcccaaggaggcggccgtccagagcggcgccggcgactacctgctgggcatcaagcggctgcggcggctctactgcaacgtgggcatcggcttccacctccaggcgctccccgacggccgcatcggcggcgcgcacgcggacacccgcgacagtgagtggcgcggccaggcgcgaaggggcgggggcggggggcaacggccgccgggccaacccgctcagtcacactctgagaccctcggcgggcacctgctcgggggccccgggaaccggggcggactcgggctccggtcccttctgacgcggggctggggacgcagacactcttggctccggcagcccagcgcaacccctgaggccgggcgccgcctcccgccttcagaaactcgggctccgagcgccgaattccagcgccttcgcccgtgggcacagggcgcgcggtgcagccacagggggcccgagacacgcgccccggcctggcccaggctggggaaccgctggggtcgggctcgcgtctgaaggtccgggactgggtgcggccgccgggggtcccctacacaggcaagctaatctgagctagcgcaggcttgggctccggaggccctagagggcagcttgggctctggaggcccttgggggcggctgcgccgggaaccctggccctttatccccaaccccaccccagaaatagggtccccggaggcgaacaagccgaggggcggagtgggccagggatcacctgccccgcaatgacctgcgccccgcccccaggcctgctggagctctcgcccgtggagcggggcgtggtgagcatcttcggcgtggccagccggttcttcgtggccatgagcagcaagggcaagctctatggctcggtgagtaccgcaggggtctggctaggcacctagttgggaacagcggacatggctagcaggctcgtggcttctccagccccacctgtgcctgggtcttggaggggtggcagggtcaccaggtcacgggaccggcaggcctccccagacaaaggaagcagccccaaggcaggaacaatgaggttcctgccatccctgagtgggcccctcccagaccgaggaaagggcgctattgagagcccttcccttctctagtccagaggggtaggtctcagtgttggaactgcgggcttgaggctggacacggagggaatgaattctctggctgctaggtgcagggcaggtggtgagagcaccagctgttgtgggctggccatgtccccttctcaccctgtgtgggtcttgacaccttaactgctcagcagagacatctcagcccagggtggggggtgggacagaagggggttctgacccctggcttcaggctgggtaccttgcccaagaggtgccccagccctgacactgccctgctttgctgcagcccttcttcaccgatgagtgcacgttcaaggagattctccttcccaacaactacaacgcctacgagtcctacaagtaccccggcatgttcatcgccctgagcaagaatgggaagaccaagaaggggaaccgagtgtcgcccaccatgaaggtcacccacttcctccccaggctgtgaccctccagaggacccttgcctcagcctcgggaagcccctgggagggcagtgccgagggtcaccttggtgcactttcttcggatgaagagtttaatgcaagagtaggtgtaagatatttaaattaattatttaaatgtgtatatattgccaccaaattatttatagttctgcgggtgtgttttttaattttctggggggaaaaaaagacaaaacaaaaaaccaactctgacttttctggtgcaacagtggagaatcttaccattggatttctttaacttgtcaaaagttgtcacgagtgtgctgctattctgtgttttaaaaaaaggtgacattggattccgatgtcatcccctgtagtatggcgtggagcatctctgtctggaaaggcccgcctgaggcttgggcagccagttcagggagctcccaggcttggctctcggctagcatcctcagaggcccactccctttgtgccctgttgctattaatcgggacatatcggtttacttcgggtacagaaagtgcggtgttgaagtcctcgctgccactctgtttttagatctgccaagactgacctttgaactttcctgtagtcaatcttcctcgatctaccagatgggagagacccttggacaactttataaactcctgtttgccttttttggatcagcgacagcccccatcgctgtgactattggggaaaagacgaagctctttcataaattccatggagaggaatcaatatcccactggaaggctagaaatggacaagatagtgtatttgcaatcacaaacaaaaccctagtgatgaaaaataatttgtgatggcagatgcttctgatggtgtgatagaatatgtttttgaaaacaaaccatcgaaccccccgccccacccccaaaacgggcttccctgtgtttagggagctttgggctagaactagctacgatttttaggtgaaatgtccttgtaattgtacaaagcacttggtgcagtgtttgcgtggagcagcctgctgctttctgatgcattccctgtttaagtgcgtttaacatctacctcacaagccctgaaaccccaggcaaaacccacagaaagctcatacccggtgcaggagtttgccatcccaagtggctttttttccatatgtagccaaaaaggattgcagatagcgtcggtgcgtcccattcgaaccttgtcacgtttgagctatctttaccctgtgatttacttttagtaagggtgatcatggtgaaaatatttgcagacagctgttacagtacactatatggtcaccaagtaaccttatatttttctttatatattttacaaatgtaacccctgtcattgaagcaaccgtggaagaggcagggtcggtgatgtttaaaaaaagttccgaggtgatggcaaacatttaattttaatgaatgactttttagagtttatacaaaatgaccttagcttgctaccagaaatgctccgaatgtttcgtcaagactttaatactctcctaggatgtttctgaactgtctcccgaattaactttatgggagtctacagacagcaagactggaaaatctgattggagtttttgtctttcacattccttttgaaaactctttgttcgaatgcaaatcatcgacttaaaatactattcttaaccaaggcctggaagaaagaagacacttgcaaagccgctaagacaggaccacacatcttaaactgctgttcctaccatgcactaaactgtttttaagttttaaaccacaccctaggctccaggagtgttcaggaaagatggtgtttgtaggtctccatgctgtttggcgttggggggtgtggagggatcatccgtcgactttctgaattttaatgtattcacttagtaacaaaccatgattgtcttaaatgccttaaattattatgagatttcttgtctcagagcccaatcagattgtcaggaattaacatgtgttaggtttgatcacccttgaccacttcttatagatatttcttcaacaaatcatgtgtgatgcctgtaggaacacaactgtacctttaaaatattgttttcatattgctgtgatggggattcgaggttcctgtatgtgccactgttttcagaatctgtagttttatacaggtgccgaccctcgttgtgatgtatgtgctgtgcacattgacatgctgaccgacaatgataagcgtttatcgtgtataaaaagacaccactggactggatgtacacaactgggaaaggaattaaaagctattaaaattgtgccttgaaatgccaagacctggttccctccccctgtcttccaggggtctttctatttgaggcctgagcctcacatggctgggggttggggtgggggcaggagagacgaattttagccagctgtgtccacacaaatgtagccttgaaaacaggagcctggggggtgtgagtgtcacaaagttttgccatgacagagtcttgcagtttattctcattctcctgatggggctaattcacgccattcccgcactgtaactggccctaaactctgtgcccctcccattggcctcctgttctctaaagcaatttgcacttccctagggggagccgtgaagctccagagctggtcattaggaggcagactcgagaatatttttcaaaatctgagtagacaccatccatgggtattgaactcaatataatgaactgcagctagtcttttatttttaattaactaatttttttatattttttgagatggagtctcactcttgtcgcccaggctggagtgcaatggcacaatctcagctcactgcaacctctgcttcccgggttcaagcgattctcctgcctcagcctctcaagtagctggaattacaggcatccgccaccatgcccagctaatttttgtatttttagtagagacggggtttttctatattggccaggctggtctcaaacctcaggtgatctgtcctcctcggcctcccaaagtgctgggattataggcgtgagccaccatgcctggccagcagttactgttttataaggaggaaatggaactaaatcttatagaattaaaatcatctgagtgtatcaatcacagtaagggtgcaaactgttttgtgaaaatttgggttcaattatatacaattatagtatttataactagtctttcctaggaagtactcatgagtgcagtggattgcttttaagaaagctaaatgctggcctaatgtacctagaatctggggttcccctctccctgtaagacatatccagttgctttgcaaaaaggcaatcagggttggaaaatccttaattgtacgtaatttgctttccaaggcattatgttcttctacccttaaaaaaaaatcattatagagatgggttttcactttattgctcaggctggtcttgaacttctgagctcaagtgatcctcctacctcggcctcccaaagtgttgagattacaggcgtaggccaccaagcccagcccttttctgtccttatttcttgacagccatgatctaggtacgacaaagaaatacgtaggtgatgttagagggtgaattatgtccaaaagatctcttccaaaagatatgttgaagtcctaacccctaggacctcagtatgtgagtttatttggaaatagggtctttataggggtaaaatgagactactgggggtgggccctaatccactatgactggtgccctcctacaaaggaggccatgtaaagagacacagggagaaggcggcgtgaagatggaggcagatgggtgatgcttccacaagccaagggctgctgaggggtgccagcaaatgcccaacagctaggtgagaggcctgggacaggggctccctcccagcctcagaaggaaccaattgtgcggacaccttgacctcggacttgtagcctccagggctgtgagataatcaattactgttgtttaagcccacagtgtgtggtactttgctgccaccggcggcctttcacactggggtggggaggggactgcaacccggacgatccagccatctggatctgcaacccctcatgcatgcagaccctgtaggtctctgtccacatctgtcctggccaaacaaggaatggctcatccagcttctggggtggaaatgtacccatcgttggcaaaatcgatcagctgaactgagctttcgtcttggctttccagctcctagcatagggggacaatggggagtcaaggacaggtcccaagagagattaaaaagtcactcattcacttaacatacttgttgagtgcctcctttgtgccaggcacaattagcgaaggaaacaaggatccctgctcacctagagcctcatcgtaatgagggagatgacagtgaatgaggaacacgggccacctgggaaggtggatggtgccaagacagagagagagcaggatggggaggtgtgggggtgggggtgggggtgggttgctatgaaggtgatgacgtctaagcaaagacttcaaggtgctgagggaggaagccgtgcgaggaacagtgtccaggcagagggaacagcccatgagaaggtgtggggctggcagcaggcctgggatgtttaaggcactgtgggatgggcagggaggaggcagagtcagagaggccagctcctggagccttggaggccatggtgtggactgggcttttccttacagtgagtttgtgccatctcatagccctgggatggagcagaggaaggttgagatgagatggtcggaagctgaggagtcccaggaggaagcgattatggggattcaggttgggtataaggttgcttaaggctggtgtggtggggagtgaaaagtcaaattaacaaaagaggagatggggtttctcagaatcagcctgctgcctaggggaccaacatcttcgtggatgagtgcagggtttggggccagccccacagcttcgtaggtgggtgacccacagcttccttgctgaatgaccgtgggtgagccaggggaccccgcctcacctctcctcatgattcccaccacctgtgtctggagtgaggatggagaagacgatgcatgtaaagtgcctgtcacagtaagcagtgactgtcgtctgttagattacaccctacttatccaaagtttcactttccatagttcggttacctgtagtcaccctcggtctcaaaatattaaattccaggggatacacagtttgtacgtttttttgttttttgtttttcggtttttttttgagatggagtcatgctctgttgccaggctggagtgcagtggtgtgatcttggctcactgcaacctcagcctcctggattcaagctatgattctcctgcctcagcctctcgagtagctgggactacaggcgcaagccaccacacccagctaatttttgtatttttagtagagacggggtttcaccatgttggcctggctggtctagaattctagacctcaagtgattctcccgctttggcctcccaaagtgctgggattacaggtgtgagccaccacacccagccccctaatgggctgtcttcagaaacacagcgagtggccctgtgctggttccaccagactcagcctctcaagggaagaccctggccacaccctaaggaagggccttttctcggcatgacggtggcccctagcactgggctagaaaatcatcccattaacgggaagatagaaaagactgggacattaagaccataattaaatcttttaagggaatgacagtaatacagtagtccctccttatccacaggggacaggttccaaaaccccactggatgcctgaaactgcagatagtactgaaccctatacaggcatcccttggtatctgaggggactggttccaggacctcccctggataccaaaatctgggaatgctcaagtgcccgatatgaaatggcatggtatttgcaaataacctacgcacgtcctcccatgtcctctaaatcatctctagattacttacaatacctaatacaatgtaaatgctatgtaaatagttgtcatactgtgctgtttagggaataattacaaggaaaaataatctgtacatgttcaatacagacccagcttttttcccaaacgttttctttcttttttttttttttttttttgagacggagtcttgctctgttgcccaggctggagtgcagtggcacgaactcggctcactgaaagctcctcctcccgggttcacgccattctcctgcctcagcctcccgagcagctgggactacaggtgcccaccaccatgcctgactaacttttttgtatttttagtagagacagggtttcaccgtgctagccaggatggttttgatctcctgaccttgtgatccacgccttggcctcccaaagtgctgggattacaggcataagccccaatgcccggcctcttttcttttttctttcttttactttctttctttctttctttttttttttttttgaggcggagtcttgcgctgtcacccaggctggagtgcagtggcgcgatctcggctcactgcaagctccgcctcccgggttcacgccattctcctgcctcagcctcacgagtagctgggactacaggcgcccaccaccgcgcccggctaattttttgtatttttagtaaagactagggtttcaccgtgttagccaggatggtctcgatctcctgacctcgtgatccgcctgcctcagcctcccaaagtgctgggattacaggtgtgagccactgcgcccagcctctctctctctttccttctttctttctttctttctttctttctttctttctttctttctttctttctttctttctttcttttctttctttttctttctttctttctttctctttctccttccttccttctttccttacttttttcttttttttttgtcagagtctcgctgttgccctggcacaacagcacctctgcctcactgcaacctctgcctcccaggttcaagagattctcctgcctcagcctcctgagtagctgggactacaggcacccaccaccaggcccagctgatttttgtattttcagtagagatggggtttctccatgttgtccagggtggtctcgaacccctgacctctggtgatccacccacctcagcctcccaaagtgctggaattacaggcatgatccactgcacctggccctccaaatgttttcaatctgagggatgcaaaacccacagatatgagcgccggctgtatacactcttttttttttcctatacatacctataatgaagtttaatttctaaattaggcacagtaagagattaacagtaactatcaaattcaattataacaatatgtcagcatcactactcctattttgggatcattatcaagtaaaatccgggtgacttgaactactgactcataagcaggaccgtctacagtgtggagacgctggacacaggcacgattccgtcccgggtgggacagagcctgggcggcacaggattccatcactccactcagaatagtgcatgatttaaaacatacaaaagtacatacaaactggccgggcatgacagagcaagactcagtctcaaaaaaaaagacagccctttaggaagactgctcctctcaaatgcagcctgcactggcttactctggtctacattaaaataagatcaagggctcatgagctcagagtgtttcttcaatgtgaataattttaagtgtcctcaattcatcattcaagttctttctttctttctttctttctctttttttttttttcttttttgagacggagtttcactcttgttgcccaggctggagtgcaatggcgccatctctgctcaccgcaacctcgcctcccgggttcaagcgattctcctgcctcagtctcctgagtagctgggactacaggcgcccaccaccaggcccagctaattttgtagttttagtagagacagggtttctccatgttggtttggctggtcgcaaactcccgacctcaggtgatccacccacccgcctcagcctcccaaagtgctaggattacaggcgtgagccaccgcgcccagcccatcattcaaattctatatgcttcttatgaaaggaaggagggaggctggacacagtggctcaggcctgtaattacaacactttgggaggacaaggtgggaggatcacttgagcccaggagttcaaggctaggctgggcagcatagtgagaccccatctctacaaaaaaatttaaaaattagctgggtgtggtggtgcatacctgtagtcctagctacttgggaggctgaggtgagaggatcctttaagcctgggagttcaaggctgcagtgagctgtgattgaggaaagtgacatccgtgctggtccatgtcctgtggtggggaagggggacagcaacccagcacagacccaccctcccccaggaccccatgtaggaggggtcctggatcgagctagaagaactggggcccctgtaatgaatcaaactgcccaggagacccagggactggaacacccttgctaggcaacacaacatcattttcacgcccacccctgcccccagcaagactcctctgctgggtctcagatcttccccactgggaggctgccagggttcctcagcctccgtgggtccacacccaatcacagccatccccagcctgtcctttcttccgtccaggaggacaaggcaagcccttccccccacccacccctcccccagcagcctctcactccatctagttggtttcacctcatcgactctgcagtctaaagacctctccatctgcacaggacctctgtgcaggccgcctctccctggacctgggtggctgcagcagccccttgactggcccccccaacttcttcctctaccctgacaggcccttctctaggggccttctcaccgtgcaagctccatcctgctccctgggctgggatgctttccacagccctgcgacgctcttagactgagatcacagccgtcagccaggccgttctgatcactcactactgcctaatgagctgccccaaacagtgacaaaaccgccaccatcttataactcccagtgtggcaggtcagggatgtggacagggtctggctgggtgatttttctgctttttatggctttgaagatcttggcattggatgggctcatctgggggtctgaggccggcaccctgatgggcaaggctggagggctgggctcagctgggcatcggccagagcacccacacagggtctctccagcatgggagcctctcctggggctggaggccttacgaggcggctcagagggctccaggacgcccaaggcttcttagggccaggcccagaaagttccagaacctcattcctgccattggtcatgaaatcagaccagctctgattcaaggggagaaaacaggcctctgctcacagtgggaggactagcacggaatgtgtggtcatctttcatccgctgcagaggctccatttgcccttcccggtgcccatcctgccagctccctccccacatccctgtgctcggccggctcccggcacattgacgttctctcagagcacacaggtaccatccgcttggccacagggcctttgcacacaccaacctcctgcctggaaggatcttccccacccctgcacttcacccagctggttttcccagggcagctgtgacaaatgaccacaaaccaggcagccttaaacaacagaaatgtattgtcttgcagttctggagggcagaaggcagaaatcaaggtgtcagcagggccctgctccctcagaaggctctggggggtggtccttccttgcctcttctggctgctgctggctgccagcattccttggcttgcagctgcatcactcgattctgcctccatcaccacatggccttctcctctgtgtgtctgtgtgtccagatttccctcttcttatgaggacaccagtcactggatttagcctcgtcccagaattccagcaggacctcatcttagctttcattgcctctgccaagcccctatttccaaatgaggttccattcacgggctctagggagacaggacattgggaagacacccatcagcccacacaccagttactcagattcattattaaagtcatgattcaaaggtcctttactctaaggatgaaagaagtgaggcatttggaagataaagggcctggcatacagtaggtgcttattccagccagctagtgctgtcatgtccccagagccttctctggccactcccagcccacactgggccatgcgttgtcttatcacatactctctggcatcctaggttaggttccccagcaacaaaacccaagactgggatccctgagcaaagagtttgtcaagggaggagctcccaggaagaactggcaaggaaaggagagcagcaggacaggccaaagaagcggcaatcacaactcagcctggtctggcctgattcctcactccccggggtgctctggggtaccaacagcatcctagagctgtcccaccttggggcaaggggctgagcatctgtacccccttgtcaatcagtccctggctgcaggctgccctggggatcggggagagtggaccctccaggcctttccaggcaatgtggtccctttcaggagcagggaagctccaagccatcagcagctggggggtgaagacaccatcctgggaaacaaaccacaccccgcagcccttcctaacccctacacagagtaattgacttgtgagttacgcacctgttggggcttgctttccctccctccccaggactggaatctttgcaggcaggggctgggcccatttggttcaccacctatatagatatagatccccagtgtgctgctgggcacctgggagctgctccgtgcctttcctgatgtcctcaggtgtgcacgcccactggtgagcatctgatccatgctctggccccagccaaagaggagaccccaagccagttccagccatccagtcagtgacccagcacacgtagcagccacatccggttggccgatgggaagcagaacaacaccggctcaggaggttggtgcctttttgttttttttttgagacggagtcttactctatcaccctccaacagtcgggattacaattggacatgagattcgggtggggacacagatccaaaccctattagccttcttccagactgcagattgccagcttctccctgtgtccccaaatgacaaaggggcaagggggctctctggggtcctttttttttttaagatggaatctcgctcaattgcccaggctggagtgcagtggcatgatctcagttcaatgcaatctccacctcccaggttcaagatattctctgcctcagcctcctg

SEQ ID NO: 1047 - DNA, 1362 bp, Homo sapiens
cggccccccgcgggagcgggcgagtaggagggggcgccgggctatatatatagcggctcggcctcgggcgggcctggcgctcagggaggcgcgcactgctcctcagagtcccagctccagccgcgcgctttccgcccggctcgccgctccatgcagccggggtagagcccggcgcccgggggccccgtcgcttgcctcccgcacctcctcggttgcgcactcccgcccgaggtcggccgtgcgctcccgcgggacgccacaggcgcagctctgccccccagcttcccgggcgcactgaccgcctgaccgacgcacggccctcgggccgggatgtcggggcccgggacggccgcggtagcgctgctcccggcggtcctgctggccttgctggcgccctgggcgggccgagggggcgccgccgcacccactgcacccaacggcacgctggaggccgagctggagcgccgctgggagagcctggtggcgctctcgttggcgcgcctgccggtggcagcgcagcccaaggaggcggccgtccagagcggcgccggcgactacctgctgggcatcaagcggctgcggcggctctactgcaacgtgggcatcggcttccacctccaggcgctccccgacggccgcatcggcggcgcgcacgcggacacccgcgacagcctgctggagctctcgcccgtggagcggggcgtggtgagcatcttcggcgtggccagccggttcttcgtggccatgagcagcaagggcaagctctatggctcgcccttcttcaccgatgagtgcacgttcaaggagattctccttcccaacaactacaacgcctacgagtcctacaagtaccccggcatgttcatcgccctgagcaagaatgggaagaccaagaaggggaaccgagtgtcgcccaccatgaaggtcacccacttcctccccaggctgtgaccctccagaggacccttgcctcagcctcgggaagcccctgggagggcagtgccgagggtcaccttggtgcactttcttcggatgaagagtttaatgcaagagtaggtgtaagatatttaaattaattatttaaatgtgtatatattgccaccaaattatttatagttctgcgggtgtgttttttaattttctggggggaaaaaaagacaaaacaaaaaaccaactctgacttttctggtgcaacagtggagaatcttaccattggatttctttaacttgtcaaaagttgtcacgagtgtgctgctattctgtgttttaaaaaaaggtgacattggattccgatgtcatcccctgtagtatggcgtggagcatctctgtctggaaaggcccgcctgaggcttgggcagccag

SEQ ID NO: 1048 - protein, 202 aa, Homo sapiens
MSGPGTAAVLPAVLLALLAPWAGRGGAAAPTAPNGTLEAELERRWESLVSLARLPVAAQPKEAAVQSGAGDYLLGIKRLRRLYCNVGIGFHLQALPDGRIGGAHADTRDSLLELSPVERGVVSIFGVASRFFVAMSSKGKLYGSPFFTDECTFKEILLPNNYNAYESYKYPGMFIALSKNGKTKKGNRVSPTMKVTHFLPRL

SEQ ID NO: 1049 - DNA, 2316 bp, Homo sapiens
cggccccccgcgggagcgggcgagtaggagggggcgccgggctatatatatagcggctcggcctcgggcgggcctggcgctcagggaggcgcgcactgctcctcagagtcccagctccagccgcgcgctttccgcccggctcgccgctccatgcagccggggtagagcccggcgcccgggggccccgtcgcttgcctcccgcacctcctcggttgcgcactcccgcccgaggtcggccgtgcgctcccgcgggacgccacaggcgcagctctgccccccagcttcccgggcgcactgaccgcctgaccgacgcacggccctcgggccgggatgtcggggcccgggacggccgcggtagcgctgctcccggcggtcctgctggccttgctggcgccctgggcgggccgagggggcgccgccgcacccactgcacccaacggcacgctggaggccgagctggagcgccgctgggagagcctggtggcgctctcgttggcgcgcctgccggtggcagcgcagcccaaggaggcggccgtccagagcggcgccggcgactacctgctgggcatcaagcggctgcggcggctctactgcaacgtgggcatcggcttccacctccaggcgctccccgacggccgcatcggcggcgcgcacgcggacacccgcgacagcctgctggagctctcgcccgtggagcggggcgtggtgagcatcttcggcgtggccagccggttcttcgtggccatgagcagcaagggcaagctctatggctcgcccttcttcaccgatgagtgcacgttcaaggagattctccttcccaacaactacaacgcctacgagtcctacaagtaccccggcatgttcatcgccctgagcaagaatgggaagaccaagaaggggaaccgagtgtcgcccaccatgaaggtcacccacttcctccccaggctgtgaccctccagaggacccttgcctcagcctcgggaagcccctgggagggcagtgccgagggtcaccttggtgcactttcttcggatgaagagtttaatgcaagagtaggtgtaagatatttaaattaattatttaaatgtgtatatattgccaccaaattatttatagttctgcgggtgtgttttttaattttctggggggaaaaaaagacaaaacaaaaaaccaactctgacttttctggtgcaacagtggagaatcttaccattggatttctttaacttgtcaaaagttgtcacgagtgtgctgctattctgtgttttaaaaaaaggtgacattggattccgatgtcatcccctgtagtatggcgtggagcatctctgtctggaaaggcccgcctgaggcttgggcagccagttcagggagctcccaggcttggctctcggctagcatcctcagaggcccactccctttgtgccctgttgctattaatcgggacatatcggtttacttcgggtacagaaagtgcggtgttgaagtcctcgctgccactctgtttttagatctgccaagactgacctttgaactttcctgtagtcaatcttcctcgatctaccagatgggagagacccttggacaactttataaactcctgtttgccttttttggatcagcgacagcccccatcgctgtgactattggggaaaagacgaagctctttcataaattccatggagaggaatcaatatcccactggaaggctagaaatggacaagatagtgtatttgcaatcacaaacaaaaccctagtgatgaaaaataatttgtgatggcagatgcttctgatggtgtgatagaatatgtttttgaaaacaaaccatcgaaccccccgccccacccccaaaacgggcttccctgtgtttagggagctttgggctagaactagctacgatttttaggtgaaatgtccttgtaattgtacaaagcacttggtgcagtgtttgcgtggagcagcctgctgctttctgatgcattccctgtttaagtgcgtttaacatctacctcacaagccctgaaaccccaggcaaaacccacagaaagctcatacccggtgcaggagtttgccatcccaagtggctttttttccatatgtagccaaaaaggattgcagatagcgtcggtgcgtcccattcgaaccttgtcacgtttgagctatctttaccctgtgatttacttttagtaagggtgatcatggtgaaaatatttgcagacagctgttacagtacactatatggtcaccaagtaaccttatatttttctttatatattttacaaatgtaacccctgtcattgaagcaaccgtggaagaggc

SEQ ID NO: 1050 - protein, 202 aa, Homo sapiens; identical to SEQ ID NO: 1048

SEQ ID NO: 1051 - DNA, 59458 bp, Mus musculus
  misc_feature (1)...(59458): n = A,T,C or G
gactgcacaagtcgatcatgaaaccctgagagtggctttccagatccaaacaggtctgtgactggcagcaatgtcacaaaccaacactggagagtatggtcacttaaacaaacaacactaccaacagacttaaaacccaaactaataaagagggcttacagtaaaaagtctgggttctcagcaaactcctccacacacttttggcttttgtggctgcctctaggcagtaaataacatgcctagcctgctgtttcttgatttattgactttggactggagctatcaacttctacaagtactggagagagccaccttacttccccttcctgttgtcgccttgctttgttaagtagacgctcttgcgcagactcctgcatggaccttggcttgggcatttgcaactttgtttccaagatgagttcaaagtcaaggattctggcccttgacaggatcgtgtggaaggagaacctggcctacctggtccctagcccatgctgtttcctctgagtaactcagcctgcagtggctctacagagctgtgtgagcaccctggctaagtacctaagagaggctggcagaggctgttacttagagatgagggcaggagtgtttgagggggcaagtgaagccagtaagcactttattctcctccattggtcttttctgcacatctggctttccagatcacaagccctggatctccagagaaagatgagccagtagctgaagccagtggaaggctcgcacccagcacccaaggttttggggggaaaagaactgcctttctattgccaagtcttgagtcacctggtagaaacttcaaatgacagaattggcactgggcaccaattcaaacctgtttagtcagaggccaggcaagatgccaaactgccagacaggacagtgattggcaggggccagtgattggcaggggccacacaacagctgagggcacaggagtccttagagcctctttatcttagggaagaacatgggtcctgtttgtggctttgcatatagagaggccctgtactcattacgttacagactttactgtgcctgggcgtcccagcctgtaaaatggttagataggcaagcagggggtaggcatttgaggactctggttttgaaattccgaactgaggctggctcaggggtaataatacacgagagatcctgtcttctatctccagcaccatgaacaataaataaataaatacatgtaaaaagaaacaaataataccagctgaggaagattcttgcagctgtgctaggtggactgttactatggctacggtaatgcccacaaggtgattgttagacagggaatggtccagactgtttagggtgagtatggccaggtagggtaccagatatgcatccttcttttgctctctactccaagatatgccttcatctgagctcatggccaacagcatgtgttcatactcagaatagtaagttggggaagatggaaatgcatggctcttgtttttaaaactctttagaatattatgtatgtatgtatgtatgtatgtatgtatgtatgtatgtatgtattgtgtatgtgtgtttggccacacataccatgtgcgcgtggaggtcagaggtcaacttatggagacagctctctccttccaccatgggggtcccagggatcaaacctaggctgtcagtggtagcaactacatttaacctgatccctctcactgcctgggcctctgatgctcaggaatggggagcccagcagtgcaggctcaggttccaggggccacctattgtccagtgctcagtcacctggccacccttaactgcaaggtgacccagccaaggaagtctggacccagctgtaaaacaggggttctgctcctcacagtggtggtggcattgggaagcagccagccttgacactgactcgagaaggtcccagttggagccggggctgggttctgactttagatggactccattccacctccaatggctttccatccttcaaccactgccaaatttttaatagttggatttctcacataaaattcacatttctaatttctctggcaaaaactgaggaccagggctggagagatggctcagtggttaagagcactgactgctcttctgaaggtactgagttaaagtcccagcaaccacatggtggctcacaaccatctataatgagatctgatgccctcttctggtgggtctgaagacaagctacattgtacttacatataataataaattaatctttgggccggagtgagtaaaggcccagagttcaattcccagcaaccacatgatggctcgaaccatctgcacagttacagtgtactcaaatacataaaataaatctttaaaacaagcaagcaagtaaacaaacaaacacccctgagcaccagactacatggtcccgtatttactgcagcgaacatcctctgagctgggcactgctgttgagcactgggctctcttgttcatgctctctccctcctcctgctggttccacctccctgctctgggccagttttgtcgcctggcttatgagtatcatggtttgtaattcttgtcccagtacagctaccagcatgcaagagacaaagaaattgaggccagagaaacaagggaccaacccccaggaagatctcagcatacctcctgcctcacaggacaccccaggcccagccaggtgcttctgtgcctgggaggaagaatgtcctcttgtggagaaacaggtaggcttgggtctggtctccaacctgaattctgtcctcttctaaatacagcaggtgacaatagttctccaagactcatattcagactttatctttggcagggcatccacagagtctgcttccttggagctcaagggacagtgaatatctactgtgtctcttaactggaccagatgtgatatgaactcaggagatgtgagaaagcaaaggtttgcctcccaacttgatgtggaaagtctgtggctaccgggtctgtgtaagctgcagtttctttcttctgtggttgtggccagaaccatggtactaaagctatggtgagaacagccccggacagggtgtagaggtgagactgagccctgaaaacacaatgtcttcttggctataggagcagagctgcaggccttagcgttctccagcccctggggctgccttctggggatttagttatggcccgggttggtataaccttgggaagacccagctttccctttgagtcagctattttaaggaatgacatgtttcagaactgggctcagccttcgatgcatccccacatctggttttggtctccggataacctgtgtgtgtacctagatactcatgagttttgttttgaacaaacaacctttgcacagccacaatggaaatagttctaacgtggtttttaaacagcacccacagtcccagcccatggttctgcatccttgcagcattgcctgagagcttgtgacaactggggcactgcatggtgggaaacacaggcttagacaggaaagttgaggccccagtggtaggtcacctccttaaggtcacttgaacccagtttgagagtctgccccttactgctcctcagaatggcactccttaccccacactgctactgtgctcaggccttggcttaaatactctaattcttgctatatagatgcttgccatgtagatggtccctaggtaccagctctaccttggaggagaaatactcttgagacaagcaagggcacagcctttgtggtctctgtttctactaaagtgaccactgtagtaagcatgctgtcgtttgcctagaaccaagcagtttcttagagtgcagcactttttaggcaaaaacaatcgtggacagaatgaggtagttggttccctccaggtgaaagctggggccagttgttcctggcacggggcatgtagactctttctagctccttgcttgtgagcctgacagccctgtcacggtcacttgtcaccagagtgtcccttcctgtgtcttccccgagatgaggagaccaggcctctggagttccacagaggaaacatacaagactcaaacccaaagtgtgacccatctcttatctgagcccacaggagacccagagctcacaaagctacttagtaaatgtttagaccacctgcagcttggctgttactgactgtgaatggacaggactgggnnnnnnnnnnnnnnnnnnnnnnnnnnnnnnnnnnnnnnnnnnnnnnnnnnnnnnnnnnnnnnnnnnnnnnnnnnnnnntcagatacctcaaattaaagttcagcatgtgcatgtggtcccaactacgtggtaggatgaggcaggaggattgcttaaggccagaagtttagaaccagtctacagacagcaagtcctgatcacaagaaaatagaaagaaagctgaagggcgagggagaggagatgaggaggaggagggagaggagggagaggaagagggaaagggggcaggaaaagggaaggagggagaggagggggaacgaagaggaggggagaagggagaagagaaagaaggaaaagggaaagaggggaagaaggaaatggaaggaaggagaggaggagagagaagaagaagagagaagagggaaggggaggaggggaggaattcggttacataaacaaaattataaagtagtaaaactcagagtgaagaacttttttctttgcattctgagacaggctctcactctgctggcttggaatttacagagatcctcctgcctctgcctccagagtgctgggattaaaagtatgtgtgtgtgtcaccatgccccacaatggagcactttctagttattacatttaactctaatctgtcaccattgctcagctcctgtctccttttgcctcctttgtcatgggaatcaaggttctgggacccaagcactggatggtttgacaggtgtgagggcagggtctttcctgagttcgtcctgttagctggaggctcctagggacaagccttataaaacagggaaagtgggcccagacaggcatgcagggaatagaagcagaggcccagcaatgctacctggtccagaaatgtcaaagatggccttcatccaccagaagatgggaagaaatgttcttggaaccttcagaaggaaccagccctgctgactccttctggactccagaaccaacaagacatttgtgttctttaagcccctcggtctttagtacttcgttatagaacccaggcagacccctataccttgaggttggtgacatttactacatgaagatcgtggcaatgctgagccttgggctggagagatggctcagtggttaagaccactgactgctcttccagaggtcctgagttcaattcccagcaaccacatgatggctcacaaccatctataatgggattccagtgcccttttctggtgtgtctgaagacagcaacagtgtactcatacagaaaatagataaatacatcttttaaaaagaacacagcagggcgtggtggcacatgcctttaatcccagtactcgggaagcagaggcaggcgaatttctgagttcaaggccagcctggtctacacagtgagttccaggacagccagggctatacagagagaccctgtctcaaaaaacaaacagaaaaaaaaaaagaaagaaagaacacaaatgtgttgttggttctggtcaagggttaaggtgttaacagggttggttccttctgagggccacaagaacatttcttcctggcttctggtggatggaggccatctttggatggaggccatctttgacattcctgggtctggtagcagaaccaagtcaggcagagtggccgattctggcctgctcaggacagacagatccaaggctgcctaacttgcagcttccctggtaactggagtatgtgtctctccccgggagggaggtgtcctctcctagttctcaccatacttaaccagctgtcagcttctctacacttgggcccatccccttctaagcctccccatcctgtctgtgccctgagtctcttcctcactcttgggttatatgtaaatattcatcttcatatttcctgggttaccccattactcctgcaagtttgaaacctctttcctgtcttcatcaaggcatgagtaccctaaaaaacagacatatgtgtgtctggtcccatagagaccatcctgacacttggaagatgaacaaatgagatacatcaagtaagacttcatgatgtagataagccagggatggcatccattcaagatgcttttgctggctttgcctggcaatgcagttacatttgagtctcagcctcctagtccacaatccctggatgagactcagtgcttggacgggacctgaacacacagggactccaaggtgttgaatgttcttacaagtaaaaggatgtgggacttcaggggaggggggtgccagggaaagagctaacttccctggttaagagggagaggacaggtgaagtttctctggcagaggagggatgagaagtgggttccctgtgtgggtggaacccttctttggggccaaccccttctatgcttttctactgtgggccccgatgtgacatttggtttcccccagtttcctgtgtctgtctagtgggctcagggggagtgccaactccaggctgaggtgacggtgagggctgcaaatgtgactcagtcacctcaagaaacagggccaacctggagaagagcgatgtcacggaacactgaggatgtggcccgatagtgtcgattcaccgtggagtggcacaggcacgtctctcttgcctgtaaaacgagggcagatattactcttaggtctgctggctgctggcatgggtgtgtcttccagcagtatcctcccccatgtcccccactccatctcctcatgtgacttacttgaaaacacatcaggatggacctctcattgtcccctacggactgaagatctaagaaaggctccagctccgaagcactgaagtgctactgggtggcaaacgctcagacagcaacagggtgcgcgggggtggggggtggtttcccagttctagattgggcacagatggatgactctgtatggaggaatctagatgccagacttgacctcgaccaaaggacacaaagcttctacgaatgagctcactgagaacttagcccagtcaggctctgctgcacagcccagggtggccttgaactctccaccctcttgccagagcctctcgctgggatgtgatagccatcacaccaggcttaccatgagctaggcagtgccatcagctacccatcccgactcttttctgcagagcatggtgagacagcccggcatgctactgggggtgggctctagagcagtgagctcacacacccacatgcccctgaagnnnnnnnnnnnnnnnnnnnnnnnnnnnnnnnnnnnnnnnnnnnnnnnnnnnnnnnnnnnnnnnnnnnnnnnnnnnnnnnnnnnnnnnnnnnnnnnnnnnnnnnnnnnnnnnnnnnnnnnnnnnnnnnnnnnnnnnnnnnnnnnnnnnnnnnnnnnnnnnnnnnnnnnnnnnnnnnnnnnnnnnnnnnnnnnnnnnnnnnnnnnnnnnnnnnnnnnnnnnnnnnnnnnnnnnnnnnnnnnnnnnnnnnnnnnnnnnnnnnnnnnnnnnnnnnnnnnnnnnnnnnnnnnnnnnnnnnnnnnnnnnnnnnnnnnnnnnnnnnnnnnnnnnnnnnnnnnnnnnnnnnnnnnnnnnnnnnnnnnnnnnnnnnnnnnnnnnnnnnnnnnnnnnnnnnnnnnnnnnnnnnnnnnnnnnnnnnnnnnnnnnnnnnnnnnnnnnnnnnnnnnnnnnnnnnnnnnnnnnnnnnnnnnnnnnnnnnnnnnnnnnnnnnnnnnnnnnnnnnnnnnnnnnnnnnnnnnnnnnnnnnnnnnnnnnnnnnnnnnnnnnnnnnnnnnnnnnnnnnnnnnnnnnnnnnnnnnnnnnnnnnnnnnnnnnnnnnnnnnnnnnnnnnnnnnnnnnnnnnnnnnnnnnnnnnnnnnnnnnnnnnnnnnnnnnnnnnnnnnnnnnnnnnnnnnnnnnnnnnnnnnnnnnnnnnnnnnnnnnnnnnnnnnnnnnnnnnnnnnnnnnnnnnnnnnnnnnnnnnnnnnnnnnnnnnnnnnnnnnnnnnnnnnnnnnnnnnnnnnnnnnnnnnnnnnnnnnnnnnnnnnnnnnnnnnnnnnnnnnnnnnnnnnnnnnnnnnnnnnnnnnnnnnnnnnnnnnnnnnnnnnnnnnnnnnnnnnnnnnnnnnnnnnnnnnnnnnnnnnnnnnnnnnnnnnnnnnnnnnnnnnnnnnnnnnnnnnnnnnnnnnnnnnnnnnnnnnnnnnnnnnnnnnnnnnnnnnnnnnnnnnnnnnnnnnnnnnnnnnnnnnnnnnnnnnnnnnnnnnnnnnnnnnnnnnnnnnnnnnnnnnnnnntgaagtgtgggtgtcacaagttagggatacaagaaatcactggcactcccctgtgtccttatcagggcagacagtgcctctggggccatggggatctgtagtcaagctttttctctgggtcctttttttgacattcatcttccttggctcctccccacccccatctgctcagttctagagatccagtttgtgctgggcagagcaagtttgcatgcccaccctgtagccagaagttcccacgtggaaggggttatggcgggattgagagtcccagtggggcctatgcaaacaggtgcttgtgtcatctcaggggactggtgctcccttttgatatccttctcaactctgtggcctcgtctctgtctttggttccttcattcagttgcacagcagtgagcaccctcctcctcctcatccctaaagtcaggatcaccgaccccagggcctttgcacaggctcttccatccactagaatgctctgctcttggtaccccgtaggctgcctccttggatgctgtctacactcaagcatcatttctcaccatgaatccagccctgctcctttatcaacttccctcaccatattttctccccattattcttactatagctctggatagatttcatatttattgctcattaaatttatgatctgtatccctgcagctttgagcgggcagggattttagtatatggcttgtagctgtcgctcctatgccctgcacagtgcctggatcacagcaggctttccacaaacatgtgacggaatccatccgctggtccatctgtccatccacctatctatctatccatccatcttttcttatccactcactagccatacatcttccctctagaccagaccctattctggccctgctctggtaactgctggggaaaagcagacaagacaagcatggggattgacctgaggggcaagaaacacagtggcggaaaaacatggcgggagggcccggtggggagggaagcgaggtagatcctaggggactgacaaccccatgggcctggcccacaacagtgtttcataccccttgctcagaggatcagcttctgcttggattggcgtcctgagggaagtatggctcagccagcaggtctctatgttgggagctgggtgtgtgcatcaggactcacacacataccccgcccccatactcgtgcctgattgcaagagcattgaaagagaggtgggtggcagggtctgagggaagtgcctgcacgaggcctctctccattggtggagctcgcctggacttctccccttggcccccttccaagatacctggggcagctgccacctcccatccctagcaaaaagctccagttcctgccccctcaccttctgcctgctctgatcccacctgagtccagcaggacatattgtgagagccccacccacagccccggagccctcctgtatccagcctgtggctggtgtgaatggcgctgcagacaggatatggtctgaagaggctggagaagccacaaagggctggcagtttgcaggtgtgtgtgggcgtggcggcctgcctcccacagcctgaaagggtctctgaagcccagagacagcgtgatcccggcctcccacggggcagcttttactgtctagggaagaaatccccaaagtccatggagtctgaagactctgtcaagcctcgctaggaaacctaggagttttagagggcacttggcaccggaagctagccgggtaggcggagcctcacctggattgagttcacagctgcctagacaggctcagactaggtgctgggcacctggaaggaggaggagacattagcagcaaaggctgttaacagaagtgcctgcctaggcttggaggcaagacgctgctgttcacagtgcgagacggaggtaagagagggcagcgggtacggcatggacttcgcctggcctggcccgcttgaccttagtctaaggtttagcgcagtgcttgggagttctcgagtgtgtgctggatcgtatctcccagggaacgactgagtttgaggttctagctggtcctaggatactccttgccgctcagagtgtggggctgggcgtgctcacgagggggcactggaacacgttggccagctgtgtccctctttgctcagaagggcaccactgccacgagggccagagtgaagcttggaccctggcgtgtggttgaggactggcggcatgaaccccatttttcccttcgtccctagtgcttcccaagcagtttcctcctgagatccacgggggcggggagggcggggggtggggggaccggtttagcagcagctcactttggttgtttgacttttgaggaggaagaggcaggcagcctttcctggtaagccagcaaaagggtagatagagctcatgtatatgtctctctgttgctgccagccacaggtccccatgcctgtcagcccaggtctgtcaccccgtctgcaagagtcactagagggggtcccaagagtgcacacctcctaccagttgcttcccccacatggtaaccccaaagatgcacccagatagataaaagttcaggcttgccatggcctctggtgggaccctggcattccttccagctggacccatgtccctagctgtaccatgatggagatagacgggcccccagatgtcaaatcatatatggcttctaaagccccagtgcccagcccccagccctagctcacagcccccactcaaccagacaaaggtgggcggctggcgccgctgtttgcctctgccagtctgactccctgaggcgtgtgggctgcatggtgggcccctgctaatgagcatctgttatcactccattatgccgcctgcgccacctgcaccccagcacttagtgggagaccccggggggttccctggcagctgggcagaggggcatgcagaaggcaggaggtgttgggggggggcaaggtcttccggggctagggggccccatgctctgtgggatttctacaaagtacttaggattccagctctttattgtatcaaaagagaagtgctggggatgggcggggtgtaatcgccacactaggatggatgaggcagatcggttttgagttccaggccagcctgggctacgtggagagatgctgtattgaaagaaaaagggggagggaaaaaggggaggaggtggtggcagtctagggggattttgggtgaggaaacgagtgtctgtgaattcccaagtgagtctccccagccaacatctcacaaacgcatctgtgctgtgtatgtattgagaaggggatgtggttgcacatgagggcacaaccaagattccggtcctggagactggcagtgagtgacctggcatagtgttcttcgtaagatggaatgacctacccattcttcgtacggggctgtactgtcttgtggggtagtccctaaacctctctgggcttcccttgcctgccttggtaccgaggagataatgcttctctgcttgatcagagacagttggaccagttctggtatctgagcagcttccactcaaacctcaggacaggacccggggaggggcggcatagaccgggcacaagtgtgaaacagttggcagcagctgacatggcctttttggggaatgctagtcacctcagaccatgcctggctctctagctgaggcagggtggcttctgtggagggccgaagtccctctgttcctgcacactggagatattttaggagcagcctcaaggggctagggagataactcagctggcaaacatgcttgctgtggaagcatgaaggtctgggtttggattccccagcgccacagtaaaaagctgagcttggtggtttgtgcccgtactcgagagaggcagagacaggagggtctccagcaattctagctgaatcagagagcttcaggctctgggagagactctgtctccaaaagtaatttgaagggccagcaagatgtttaggctaaaggactttctttcaggtctcatgacctgagttatccctctgggtcccacatgaggcaaggagagaaccaacttctgtgagttatcgcacacacacacagacacacacacagacacacaacctaattcctaaaacatttaacacgtaagatggagagtgatggaggaagacacacacagggttgacttctggcctccaccccatttgcacataaacatgcacacatgcatgtatttcaacatatgctcaagagcaaacccagtggtcaggagggtgccgtacccatttttacacatgagaacactgaggcatggaaagatcaaagcccaggaatttgatgctagactctcacggcagttatggagggctttggagctatactgggaggaactagagtgtcgtggagagtggtttggcagcttagtcagtggctcccgtgggtcagcctgcttctgagcagagtacaggccagagagtcacaccctgaagaggccgagcggaagtcttcaccctgagaggaagatctcatcataacaactccccctgatcacctgggctgcagaggggacctctgtttagagatgggtagggtctcacaggaggaccccaggcctctggatcctgaagaacaggcaccagacttgtgacaggattggtgagggcttattcaaggtgctcatctttgccttgggcacaggggcttctgaatgctgagaggcaggggcatggcccatgtgactctctgagcaaggatctggctggatccagccctcttactggagggctcttggagcgggggtggctaaactgagggtcagacattccgtcatgccacaacatgaacaggcggttcttagccagtttgcctgtctcaggtagctgggcaccaggtatgcccacctctgagggcagtcagtgggggatggccttggaggcagccagcatgaacttggctagggaacaagacactggattggcctcttccctgcagtcaggaatgaggtgagcacagggagaaaggtggtgtgcccatgccggggaccaagaccacttctcgttggcatgccatcaaacatcattggggccagaaagagagacctgggggaaggaactgtcctggaagtcaaaccctggttccagccatgacactgggctagggggctccttccctctcctagtgtaaaccccttggcagggctgtaggggaaaacaccacccactcctatggcttatgacaagtctaccactgctatttggcacaaggggtgaagagggacagtgctgtggccacgagggggattaaagaatttctgctagcatctaggatatgggacttgcctcagaccgcaacctagggctttggaaatccgaggcaggtaaatttaggcagaacctgcttggctccattcccatggacctagagtggactccaaataaggtctcagaaatcaggcatacttgacttgggcagactcagctcacatcttgtcctggccttgattccacattatctgctatgttgtccttgaaccccaagcccagacttgaatccctatgaggcccagcccattttcatggcagagagaggcccctgtttcccctcctcttggaccaaccgtttttttttttccgactcctcccttgctaggggaagggatgccccccagtggggaaggctgtcctgagtgctggcacacagctgcctttgtaagtgtggctgagtcacatggacacccccccatccttgctggaccccggggcgatgtgactggaggtggggaggtggcgttatcatggggctgtggcttcccccacccccacgcttgtgggtgggagactttcccacgggaatgaagggagcagggaggtggacggaggaacacagccctagcacgtcttctgtgttcggagctactggattgtggggtggctttgggaaggtcccctttctgtgcctcagtttccatctctgtaaaatggtccaggcattcctgttgtatagaaaggaccctggatgttctcaaggtggagctttatgcccttgtgtccctgttagcagcagcgggctgggtattgtgctctaaaatatacaaggacgttgagcttgcaagagaaacctgtacttgaactctttttgttggttaaaaacccacctctgatcaggcagtgggtttccaggccccttggcaagggtggatacagcttgttgctcttgacaaggccagcttgtgtaacctgttctatcaggaagattggaaagactgaggcctgaaggtccccttgaagttccaccagccacataccctgtcctcagtgctcaggccttgcctcaggcagtagccaccgtaagcagcactgtttcttatccctgtccccgggggtccatgtgtccctgaaggtctctcctcagtgcccagggagcaggcgctggtttttgtcttcgactgacagcaaaggggtgtctgggcagagatgctcgcccaagtcaccagctggcagagtctgctgtagccagttggccagggaccagcatcagtatcgtctctcttccatttcttataaagaaggggcacccatcagccttctgtgcttcccaacccgtgctggctctgtcaccagcctgtaatcccacaacccttcccgtggagctgccatgttttttttttttttttttttcctggctgggccctggtattgtgcttccagtagccatgggaaccagagaggacatgtggttccctaatgctgcacgccacagatccactcgcatcggaccatatattaggacggccttttctctcttcccagatctgtaccccacccctgactatacatgtcagggatgcttttgatacctcgcctttccctgtttgactttcctcagccttgtttctggtcttttggatgagaatcttcaccccagcttttctctgtctccatcttcaaggccccagcctgagcccagccacctgtccacacttcttacaccacgcccacccagttcaagccggtagaggagagatgggcctacttaagctttgtcaaaaatgatagccatccgggaatcctgttaaattttaagttcttatgggatggatctgggggcacatctgaaatctgaggtttctcgtaaattttcataatttgagaacctagcatagatatctttcctatgctcaaacaccttcccagacgcccctgtgccttggattagacttcagttccattcactcaaaaaccttccactatccagccctacttccttcaaaaatagctctccccacctctccaccctgctgctgtccccctagaagtttcttctgagggtctcctttccttgaatttcctgacttctctattatccagctaggactctggagccatttggtccatagccagcctttgaagggtgtggctgagagcccccttgctcactctatatatgggcctcttctgtgtggtggagacatggtggagatgatgaggttaagggcctgtccctactggatgtttgctgagagccagaaacccagctgtgtcttagctgtgctgccttggataagtccctggttgtctctgatgtctcatctcacgtagtggtgatggtgtgcagggtccaggtgccctgggctcctgcctgtctgcctgccccttctacgtccccagctgtgagaccttgaagaagttaactaactttcctgagcattctctctctctctctctctctctctctctctctctctctctctctctctctctctctgccttgcccttttccttcttcattaccacattcctggagaattccttgagactcattaattgtctgggcaggtgctgggaagcagggaggaggcgggaaggctggaactcagcgagtgtgattgctgttaccgccattattgttattgttgccacttgccctcattaggttgtgaaatcctcctgggcgcttcatttggctcacacagtatggagtatgggagagcagagtataggagcctttactctggagggccatgcnnnnnnnnnnnnnnnnnnnnnnnnnnnnnnnnnnnnnnnnnnnnnnnnnnnnnnnnnnnnnnnnnnnnnnnnnnnnnnnnnnnnnnnnnnnnnnnnnnnnnnnnnnnnnnnnnnnnnnnnnnnnnnnnnnnnnnnnnnnnnnnnnnnnnnnnnnnnnnnnnnnnnnnnnnnnnnnnnnnnnnnnnnnnnnnnnnnnnnnnnnnnnnnnnnnnnnnnnnnnnnnnnnnnnnnnnnnnnnnnnnnnnnnnnnnnnnnnnnnnnnnnnnnnnnnnnnnnnnnnnnnnnnnntgtgtgtgtgtgtgtcagggtcaggatgtgagttttgaaaggttgagactgagggagactggtctggctccctgctgggaagacgctcaagagacatgggtcagcagtcagccacatatggcctccagccaggcggcctgacacccccttcctcttggagtgccttccgctctgccagtcagcaccggctctgcctgctgccacagaggttagactgtccttcaggaaggggtagttgttggctgggcctggaggaaggggcagcagcagctgagtagcctgttgccatggcaaactggttgctttgaaagaacttcaggggagcccccagggacttaatgatgggggcggggtatgtgaggggacacactcatcccagctcatacccatttttgaaactggcaccagggtctgggatgatgagaggagagacccaggtccccacttgccaggcctgagtcacgggcatcccttagggtccccgcctcacctccgtcagtcagccctgcctcctcctgcctccctctgagaaagccatgactcacagttagccagtcatctcatctctagcctgaagggaggagctgagcaggagggtgtcccggccctcccccagttctccgggttctccagctccacacagcctgctgcctgggctctatctactatagagaaggggctgctggcttggtaggagcctccccaaccccagccagtgcacttgcttgctctagctcacactcttacccagagacccagactgtaaaattcagcattggaggtgaatcctgaaaggtggttcagctgcctggctccttccagaacccgtcgcctggcaccaggtaccggactaagggcagccagtgggtgggagtagatggggagggcatgtggctgctaaacagagattatagaatgtaaagggatctggagggcgggggtctttagtgcaccgcaggggtagagatgtgtgtaaactgagagctgcctagaaagaggatgacatcagaaggaccagaacttttggagccattagttgttgggcatttgggaaaccaagcctccactggtgtggttcagtcttgggcccagcagtgtggtggcaacgctctgggccttttgataggctggctgttctcaccttaggctgtggcattcacctgtaatcccggtatttggggaggtaggggtaggtaggctctcaagttcaaggcccgcctgggctacgaagaagccgtgtgggagttgggagactcttgagtgggcaggcagcttgtctgaggtcacacagcaagttcagagacattgagagccaggctccggaagagggcactgtggtagactgagcatggtgcccctgacagtggcctcctctatctcttagggacaggacaggggcccctagagaaccagggcagtaacaacttttgacaaaggaacgaaggcacagtgcaatgttggtctgaacaggaggcacctggaatgaagatcctgggaagggaagccaaggcgccaagagctccttacccactaaccacaagacctcagggccccagctgcctgggcctgataggacctcaggccccttcccctagtataggaaatgggggcagggttcctgtctaaccccactctccaaccagccctctctgtgtggtgaccgttagggcctctaaggggctcattttactgagggagggggctggagtgaatagtggcagaaccccttttccacctgggccatcgtgtcatgggatgggtgacatgggtggagaaatcctgtgtctccttcagaaggccaagggaggttgctgatttgaagcatgaagtgcctactgtgtgctgcacagtgagcaacaaggcaaaggtcagttggaacttgcaaacggctccctcctggcagcagccctccaggatttggagaccgctgaaagagcaagctctggtcattgagtgctgcaggctgccaaggggaccccagagtttaggccagtccctgtgtggtcctccctgccctgttcagagtctgtactagcttttggggccagacttttatctccttttgttattagagccccaggaacttgagatacatcccaccctgatccaccttggtcaaagtcaatgcaaccggcttctctttgggttgctaaattggcatgggggggggggtgaccctaaccactgtgcctctgtgtgggctgaggacctggctcctagagtctggggcagggggctcctggctcctggtgcgaactttggctaggaggttgaggttgtcctaatcagcttgtatgtggcccgccatcctgttagggacaggctggtaaggaggtctgattgcagagatgacaggagctctgggtctgttagaaaggaggagtgagtatggccctaaaatgggtagaagcaaagagggaagggcgggatccgggcatagatgtgtggaatgtccatggcggagaatataatatggggagaatttgggggaacaatgaaagctcggaaacatggtgccagccacagaactgcagcatgacatgggtcacaacagagggtctcaatctcccgtgctgtgggaagcgatagtgagaggaccgggcagcagggtgagcagggcagaggatgaacactgtgggtccgacctggctgctcagcccctggctgctgagtctcaggcttagggatggcttcctgggtaatggaaaagaagtggaacttatagtacaaccacaaggaagggaaatgaagagagtagacagacttacagccataaaggtggccactgtggatgacctcccggccagtggatgctgagccctcatcgggattcgggatgcaggatgagcttctagtcagtaggggaaggggcaggcccttgataagggtgttagaggtactggtggggaggttgggggatgtgtgacaacacaggacccaaacctcagtgttgtgccccctcccctcggggtagaggtcctcagggtggccctactttctgactcacatcagatgggggcatcatgtgagtgcgcccggcagccgagggtgaccagcctccagggacctggcagatggcaagtagggggtggggcagggctggcacaaaggggcctctcagatgcagtgggtggagcactggcaagccatcccttgctcggctgagagcttgtccctgctccaggctctggacctccagcctcatctggagttgctgagggcccctggggagcctgtagattctgaggtcaggcctgagctgctgaggagagggactaagggtagtagctctctgctaatcactgacctgcccggcgtgaggtggtctgagatactgtctggggccccatgtgctctgagctctccaggttccctagaagcccagcctggattagaacaatcctgaacgttccattctggactcattgcttactgtagagacaaggaatgggggtgaggagacttccctggtgagggatccaaatctttggggctccatgtctcattgttgttttctgcctctcttgggaggcaaggaggtccttgtctgggtcctaagctatctgtaggcaggcatgtgcccatgccccaccactggcaagcccttgcatttggcgatgggattcaggcacttgtcaaagaggacttgactatactcctttctggttgtgtgggcttgtgcctctgtttccttgtctttaaccacatctttggggggctgctccgagcatcacagagttaacacaaaaacatgcagaatagcactggaatcatgggaagttagcattcatccttctggctcctactggatggataggcataccgaagccggagtcgtcacttcttatctccaaggcctgtgggggagctggatgctggaacaagtcggcttgcccccaacgagtccaatccgtgtcagcagcaaggctagcatgggtggttgggcatcaggctcctgggctggcactgcccttagtgatgtgtggatgcagttccaggcaggcagagataagagcttagagctgagaagttggcggagcatcccacatcagcaggcagtcctctctgcattaatgggagatggtctggggatgagggactggctctcaagtccatgttccatggttctgtggctaatagcctcagcctgcctttcccatttcagggccactttgactctagaatgacgagatagaaaactgtccttactgcttcttcatcctacccttctgtcccccaggcctctgccttcttcctcccagcaatatctgcctagattcccactttctgtagcagaaagtgggtgagcaccagagactcacattatactgtcaaagatcacggcttctctgggcctcggcttccctgcctgtgagtggaaagaaccagacccatctcttgtaagatttgttgcaaaaaaacagggctacaaatgtacaatcagtacgctgcaccttttgggggnnnnnnnnnnnnnnnnnnnnnnnnnnnnnnnnnnnnnnnnnnnnnnnnnnnnnnnnnnnnnnnnnnnnnnnnnnnnnnnnnnnnnnnnnnnnnnnnnnnnnnnnnnnnnnnnnnnnnnnnnnnnnnnnnnnnnnnnnnnnnnnnnnnnnnnnnnnnnnnnnnnnnnnnnnnnnnnnnnnnnnnnnnnnnnncccccccgccatcctgtcctccctctcctgtcctctttcctctttcctcccctcctcttcaattccactctttccttttgctttttcacacagggttttactatgtagcccaggctggcctcaagctcatggtctcctcacctcagcctcccatgtgctgagatgacgaccaggagctgccatgtttggcaagcaacttgcttgttttgagtctcatttgcagtaaggtgaggatgaagatacttggctctctaagaggcactgtggggagcgaagggaatagccacaggtcgctaaggctcaggagaagtggccttcatcctgatctgccccagatcttctcagtctcccactttggcagtgccctagcatagatcagatgggtggttaggactcagtgtcggcctggttccgtctgagcgccttcagctgtgtgaatttggatgggtgtgtttaccctgccccctggtttcctttagttttaaagcatgagtaacaatggcatcttgagagccgtgagacattaagtgcttccttcccagtcctgtaagtgctgtgctgctagtggtaccatttctggaaccttctttggcagagtagcaacaaacttatcccagagaaacagtctgccccatctcaaaatgtcatgtcatcaggaaggcttcaaaccatagatagcccatgccctcagatattccactgacagggtcttggttgctgttctgaggattgtcctgactcaatcctgccttctaagacctggggccatcctgtcagactcttgcctgggtgtctcttgaaaaccaatcagttttattcaagggtcacctcctttgggactgtcttcctcagagttccatctggggtccttgggtgcgcagacattcttgtctggagaggatggcagtaagatagtggacagacagactgcacatgatgagcagtctttgccatctacggtgtctgatcctccttttcccaggaggacactgttgaccttgaccttccagaactcccatggcccattagacagatgttacttgtctgcaagagaagtctctcagtggtttatggtttgggttcattactcgcagatgctcagcagtagcgggaatgcagcccattttgacactatcttagggtcatcagatttcctgggttctgcagtctttgagagagatgacttcacagttatattacagnnnnnnnnnnnnnnnnnnnngaagaggcaggcagcctttcttgataagccagcaaaagggtagatagagctcatgtatatgtctctctgttgctgccagccacaggtccccatgcctgtcagcccaggtttgtcaccccgtctgcaagagtcactagagggggtcccaagagtgcacacctcctaccagttgcttcccccacatggtaaccccaaagatgcacccagataggtaaaagttcaggcttgccatggcctctggtgggaccctggcattccttctagctggacccatgtccctagctgtaccatgatggtgatagacggggccccagatgtcaaatcatatatggcttctaaagcccccgtgcccagcccccagccctagctcacagcccccactcaaccagacaaaggtgggcggctggcgccgctgtttgcctctgccagtctgactccctgaggcgtgtgggctgcacggtgggcccctgctaatgagcatctgttatcactccattatgccgcctaagccacctgcaccccagcacttagtgggagaccccgggggggttccctggcagctgggcagaggggcatgcagaaggcaggaggtgttgggggggcaaggtcttccggggctagggggccccatgctctgtgggatttctacaaagtacttaggattccagctttttattgtatcaaaagagaagtgctggagatgggcggggtgtaatcgccacactagggtggatgaggcagatcagttttgagttccaggccagcctgggctatgtggagagatgctgtcttgaaagaaaagggggagggaaaagggggaggaggtggtggcagtctagggggattttgggtgaggaaacgggtgtctgtgaattcccaagtgagtctccccagccaacatctcacaaacgcatctgtgctgtgtatgtattgagaaggggatgtggttgcacatgagggcacagccaagattccggtcctagagactggcagtgagtgacctggcatagtgttcttcgtaagatggaacatgacctacccattcttcgtacggggctgtactgtcttgtggggtagtccctaaacctctctgggcttcccttgcctgccttggtaccaaggagataatgcttctctgcttgatcagagacagctggaccaattctggtatctgagcagcttccactcaaacctcaggacaggacccagcgaggggcggcatagaccgggcacaagtgtggaacagttggcagcagctgacatggccttttggggaatgctagtcacctcagaccatgcctgnnnnnnnnnnnnnnnnnnnnacagctgggtcatgcagaacctgggcctgattcccgtctgttgtatcatcacctgggcacgtgccaaatggcttgggtttggccaaaagcctgtctccgccatagcctccattccactgctcaaagccctcattccatctctggtacttctgaggctgaaattttcaatccatgcttcagagatgatgaagtaggttgaaggtttttggacagtccatggtgacagagacctggactctggtcacttacctgtgatcagacatgttcccgtgttgtcgaaatggctgtttgcacgggaggtagttagctctccatccttgcaagtagttaagttggtcttgaagggacctgaggggtcaagaggctcttcttcacagctgtttccagccatgagcttttccatccctagaggggtggcaccaaatgaccacatcctttagtgttgtcaagtgttacggagcacatgggtagtaagtagcacatggttgttctagtgtatcaggtgatgtctgtgagtgatgtctcccctactgccttgatggtcattgcacctagctcccccattggtgtgtctcactacaccttcaggggtgaggagctgggggtgagcgaggttgttttgttcagaaaaggcacacacctatctgcagggtctggggtctcttgatcttcctaaagccctgaatctaggcagggtgtccacgctgcctgctcttcttccccaacactggctatgatatcaccttgtgggcagtgggcaggccaataaggaaccttcttgccagactcctgcgagctgtacttatcctagctagtagagaagcttgccccaccctctcgggatccctgctggtagggtctggcagaggaggagccatcaccagctgtgattgggaaagacacttggcatgtctctctagagaccctgctgtgggtttcaacacaggcaggtgtcccatctctgtctccctactaagggaaagcttcaataaacatgatctgcaaagacagtggtgttcacacagcacatgcgtgtagagggttggtctggcacagcccctctgctgtgaggctgtggggtttcggtaaaacctctgtgagcctcctccatcttcacctctgccaaatggcaggggcggctagcactctacaccgtggccctgcccatgcaagggtgacgtgctacaagagcaccgtagagatagagatgaaggagtcaggttggattgggatccagttttaccagctccatggccctaggcaaatagtttctttctaagcctgtttcctctgccggcccatgcgattagaaagaaaacccctcctcacagatgacagtggaagtgtgggggcgggtgcacatcatggggctcacaggtgtgtggtccctgctgtgacttaactctgtgtgcccatcctagtcttcagaggcacctgccctgggttctcagttctcaggctgtgcatggtctagggatccctgcactgccctaacacccagcagaggcatgcgatctcctaatctagtcagaggctagcgagagcccagtgccctgttcttgagcagatgtctttagcctgaatctacagtatcaggaatcagctgttggggagacagagcctgtggcctggctttgagcctcaatttttttcatttgttcatgtgttcaactagcttcactgggcagctgctctggtcttacactgtaccagcaggggtgtcagaggtgctaagacagacagactgaaagacagacagacggacagacggacagacagacagatggacggacagggttagagagacagctcggtggttaagagccaacattgctctatcaggggactttggttcccagcacccacgtcggggagcttactctagtccacctttaaccccagacatagagatcttctacctctggccccacagcaccggtgctcataggcacagacacactcagagaataacaagacagcaaaggccactgaagaatagcaaacaagctaaatgcaaggccacttcagaaatgccctagggctctcaaaatagaacaggtcactagagacacagaagtcactttgaattggggagtcacagatgggatttcaagagagaggacatttaaatgaaggcccaagaaggccagtcggaggggaggtcttagaaagtacccataatgggggaggggagcaggtgcaaaagccctggggtgcacctggacttggtgagtgtgaggagggcagggtgacaggtgggaccagggtcactggcttgtgtggacagctgtattgctctgtaagcatcggagaagctctgtgagaacagagttggttctatcccaggctgtggtttctgagcagtcgttagctctgccaggtttctcatgggtgaagatgggtaggggtctgcagatgggaatgtgtggccgtgccctggtttcttgctgtagtgagtgagaactgagtgtgtgcgaagagtctgagtgccctccttctgggacctcagcaccctgcaccagcttctctgaggtcttagggtcctttgatccaatatggctgccttcccagctagtgggccttggagctctctctggaggcaggggaaggtgtccccaccccacccccacccctgcccaggacagcagctcctttctttgctttcttttcctcttcctccagacccaaaatagagcctgaatggtcccaggctctggcagtgagacaatagtggcctgctgaccgaggcagcctgctggccggggtccatgggctggaggcactaggctagtatgcctggggctccaagctcagctgcctttcccagggcccaggccagccctttcacctgaggcgtgagatctactggagtcagtggtgctctggggaaaggcttgccacagcgcatcagagagctgggtgggaccctgtgcctcagccttcccagcctgactccgtccttctctgctgccaactggagctggaggccttcagatacctctctctgttcttgctcaagtttggagctcagaggtgaccccacgtgatgaagatctttcccttttgactcactgggtagaaaagtgtcacagaggtaagagctgtgctcgcttagaaaggagtgagtgctctgtctagaaatcaaatcaagcttggatgagatgggttcttaagcgtctcagagatcggtgtttgagtttcataccctgcccttcccagctatgtagccttgagcaatcatattccctccccagactctagagtcctgtctcagcatgggctcagccaggcttaccacacagagcggtagaaatgagcttcaaaaattcccggtgctaggggcaaggcttcagaagccttgactctgtcctgctctcctcctgggtaggtaaagaggggcccagaaacttcctgccatagcctgggagcactaggataagcaggaggagcctcaggcctgggctggctcactaaggggattatgagtgagctgtggcaatctgggaaggcttccaggaggagacagactcggcgtcttcaaggaagaatggcatacactctgttcactgcagccaatggtagggattggaggctctgccacctggcttgtgaccaaggccatggggaggcaggcagcaagtggcagcctctaacaagtattcatttggtcaagggtctcgctcccatcctgttctcaaaccacttggtgttaaagtcactctgagggctagaagtggtggcacacatctgtgatctctgtacttgagacagaggcaggaagatagcaagttctcgctcccgttaaccctgtatcccctccccgttcccctgatactgacgtatagctaatggtggggtggggtgttattggggaccctaggaaaggggtatcgcacatagctggtcctctaagaagacacagacagcccacttgcctggactacattgcaagaccttcttccctcaaagggaaaaaaaaagtcactgggagatttcatgcaaaaatctacccttctgcttctctagagaacttgggtgctctgagattttggggtctccccaagacagatcccttaagctctaggacccgttctctccgagtgtgaacccagcttgtccctgctagtaacctgctttagccccaggcagcctcaggacgaaagctctcacgcttgggtacagacaagttggagagcccgcgctgtaagccaggcagtgacgcagtccatgcagctgccaacggttgccaggggaacggttgccaggggctgctgtcacctgcgccccttcctcccccttggcgctggaggcccgggcttctcagctcagcttcccgcctgccccctttgtttgaagccctagtaaggggatggtgactggggggggggggttagggggacccaggctttcattcgaccttcagccccctgtactaagaggaaagtgtcccttactccagtagtctgctgcctgcaaacagggaggctccgtccagtcacttttgcctggaggagaaaaccaggtagattcttgctcctactcctttttggcttctttttcctcccatctctcccttcccaccatctcctttccttctccacagcctcctttcttccctctctttcttgttatcctgaatcctccctcccccctcctctgacactgacatgtagttaatggtgggttgtcaggaccctgggggccatcatagctggccctctaaggggacgcaaacagcctggagagccatcaggaagtggttaggggtggccacactccctacctctccagctgaacatttttgagtctcagctgtcacagcataggtctcagagaagggtagtgggagataactagacaaggagaattggaaataccacagccttgggaagagccagagaggagctgagatccattgtcacctgggtaagttcatgcagacccttggactggggtcttgcgcagatggcagtctgcttcacccaaggagaccatttcactatgacttctaaagagaggctctcactagcaggtaagctttccattcaagagcgggtctcttctggagctagcctggactccccatgcaagcttcattctttgctgtgtgaccctagtgggtgacttggcttccccgggggcttctcatttgtccgttcagtgggtcatgggctttttctcatgggttttaaagaagattaaatgtgttaatgggggctcaggcctgtaatatgaacacttgggaggctgaggcaggaggatgagaagttcattgccaggctgggctacatagagagacaccatctcaaaacacaagcacataaatgtattaattgctcaaagagctttgagtcctgccctgcctttctgaagtatttttattatattgctggagctatattttataagtgtggctgtattcctgaaggggcaggcacctgcttgtcacagaggagctgagagaacctttgtgtgcttggggatggggggggctctggttagtgcctccggtctcctccatagttgggagctgcctggctttgtgtccctgagctggcagcctctgggccaggaaagagggggagaaaagggaggtttggtagctgaccttgggaacagaaagatcctgcagtccacagacgggcattctgcctgggccttggggaacccagtgcatcccccagaaagccagcggggtggccttgggcaactcaagaaagcagatagaaaaaggggaacttagaggggacacagagactgctgtagtctgaaagggaagaaagtctggacagatctgtgcgtcttctttgtccctcactgcctgctcaaaggtaggtttttccctaatgtacataccctaaattggccaaggatgggggccatagtctcccattgcagaggacggggtcatagttacccattgaccaagcaggaaactgagacccactgagatgcaggctagctcaagcttccaggtttagagacccactgagaggcaggctagctcaagcttccaggtttaggcagcctctctgtaggtgccacctggctctgagaggcagatgctgaccctgtgtaccgattcgaaaggctgaccacagtggctcattgaatacaactgtgtgactgtgacaaaaatgagagtctggggtttttgatgctcaaagccccgtggaatcttggggccaactggagagtcagagaaactacgggagagggagtggggcaatgcccggagagctggatcgctctagtggactggattacttccggtcaggtacgacactattgtttccccatgagctgctgttgcaggtgaagggaggcaggatcgtcctggatgcaccccaagctcacgggggacccgtcgcctggaagtgtcagagatggtgatgagggcctggggaacactgcaacctaaatggcttcagtggctcatcttgtgcttgctaatagccttgggggacatctcagaaaagaaaacaagggacgggagacagaatatgtatgtgcacatacatgtgtgcacttacatgaagacgtgctgataggctacgctctctgtggtgccagggcatctgagaatttgtttctcacatgagtgatgggtgtctatgcagaaaagggcctgccacgttggtttagggaatggcccccgtaagttttgtgctgtttctacttgtggcacttaccagagtctttgctgtgctaaggcccaaagtagggtccaaaggtctctctaatcagaggataagtagcaagtccccccaccgtaaggtcagggagagggagggaggggagggatgcagtaaccgcggtggctgaaaccattgctttgaggttagaagaactaggtttgaatcacagcgtggctccttctttgctttgtgatcttggctgcgatgtaagacctttgcatctaatgcatcgctttagaattagtgggaagtgagtgggctacagagttgagaccctgggctgccctgtggcaaggctgctgctggtgctggcacagagtgcttgctggaggatacctggattccagagtcccttccattgttctggataaatccctgctgcctcctagctaccatgatgctgtaaaggaagcctgagccagggaccgtggatgtgttacaagttagcaccacaggaagggcctgtgggcaaggtcagttaaggaagtaaccaaggctagttcactcctgcttggtgatgatccctagccttcctagccgcccccctccccaatgtgcatgcctagttgtaggaagaggaagctgcagaatggtcagccactgaggccttctaagggcaccttttgtacccacaggtcttctgctgggctggcgctcaatgcccacagctcccctccctcagtttccccatggggcagggcttggcagagggtattgcagctcatggatgttggcaggaaatcacaagaaggtgagacctgtgctagctgagtagtcctatatagcaaggctgggtctagatggtcctacctacagccatgctcagtgtggtagctcaggcctataaacctggtgcctgacagactgaggcagggggattgctatgagttcaaggccagcctgggccaagtgcgagacaaacaaaaacaaacaaacaaacaaacaacacagaaagtgagccttgccttagtgggtaagacctgggaacctgccagcctctaggacaggtgccaacttgatttttattatcatgcagtctagacagattcctgaagcctgaagtcacggtgctgccctgtgaccccagtgctccctctcagtgaggggtaggttccgaaggggtcagcttgcttgggtgtcagtctcccaactgtggagtggggggcagatgcagaaggcagagcccagcatttacccagaagctggggacatagcccagtgagccctggctgagtggggaagggtaatgcaggtctcctgggtctggtaaacagctcctttgaagatgtggctatgtggtgctgataagtgaggagttgtactgatgagccaagcctggaaggatccccttagccctgtgccccactcctactctagccttggatgtgtgtttgagccacctcctccgcagagattggagtccacgccagccatcctcccgttcctctttacccagtgctcactgcaagtgcacactcatgggctccaggacacacacacacttgcagctctgcacgttcataccgtgaaggctcctatcatctcccatcctctccccgagtttccatagctcccaaggaacacattctacaactgtacaaagtagctgatggtaagctgaggccacttcagtttccccagataggccctgggtcggtcacaggagactcagacctggaaactagttagctcctgccttccttgatctggctttatctccatctcttgccggaggcccctcagatgaccagctccctgccaaatactgggaggccatatatcatgtcgtggggaagggacagggatcaggagaggcaggctgcctttgtctcttgtccacattttgttctttcacagctgagtaaatccagcagacccttgcctggctcctgggtaccccctggcccccatgggtggcctgtcaatcactggatactgccaaagccagactctgggccacacctgagctgtggtgcaaggatccaagccatgtccttcaaagtatctttcctggggttggtccccatacactagcagtttggggcaactctgatgaagccagcccttatcagggaggctcacagggccgtatatggctgggaggaagttggatactcctggtgccttgggctttgagcagaaggtcacagtggaaatctgtcattcagaactcaagaacacatcccagcaaagacctaaagctatgacagatgcccttaggatagctaatttgtaaccgtagtgggtggaaaggggtcccgctcaacatgtgaggtgacagcccaggaagggttaatttagagctctcttagtcccgttcaacttccacctccatctaggaggaaatgggttttccaggagctggtggcgtctaggtgacgcaggtccacataggatggcaggggaagtgactcaggcctcgggagagaaagtgagctctaatattgctgctgcccaccatgctggccctttccctagcaaccaatcatgctaggaatggtgggggctcacacagccttagcccccctctatcttgtggaatccctggggaccctgtgattttatccattgtatcaggctggctcagcgtgttctgttcttagcatgtttacgggaagctgaggtcaagaataacagccactctgaaaggggttgtcagtccagcaacttctgtctaggctggacttgcctgctttgtgcccgtgacctctgtagctcctgcttttctctctttgggggaccctaagccaggggggtgtgtacctcaggaacttttgaggagagggcttgggagcagccttgtgtgctcttgtgagagatggcctttttctggcctcagtttctgcatctgtaaaatggtaaacccggaacagtactctgcagatgtggttgtgactattggggtggggctgctaacataccttctcagtaaccattggctctggcagtgctgtggcaggtggcatttggtggctgaagccggtctgctttgccgttcttcatctacacaggccaaaggtggtccctaggaggtgggcctctgctgctggctgcagggactagggtaaccagatcttgggatgcctgcaggaggcactagggtgccatcctatgatgttgctcttaccctttggagtgtgaggctgggtggcaggtgtgtgtgtgtgtgtgtgtgtgtgtgtgtgtgtgtatgtgtgtgtgtgtgtgtgtatgtatatatatatatgtaggcctgggagggggctcaggcaggaatgtgctgaatggataaataggactcttcctgacccatgtggtggtcccttagctatctgaagagacccccctccccagttgttctccttgtccagcttctggcagcctgtgacattcagggccagctaggagggaagttctctgggtggggtcacagccttcccgatactctgtccggaagggaggttcatgttctaggaatttcccctcaagtgctccgaaggccaagctggccacctgcagtagacagaggcctaaggaggggagcatgggatagagagttggggggaagggtctgagtcagggacggaagtgcactggtcggaaggtacacagagacagtctaacttcagtggaaccccatgtgcgctccccacccccacccccagttcaaggccctttttgatgagtggtagacttaattctcacagtgacagctgaggtaggtttgatttgtaatcctctttacaagagaaggaaatgaagcccaaatatggtgtagttaacttaagagcacacagctaggaaaatagaggggnnnnnnnnnnnnnnnnnnnnnnnnnnnnnnnnnnnnnnnnnnnnnnnnnnnnnnnnnnnnnnnnnnnnnnnnnnnnnnnnnnnnnnnnnnnnnnnnnnnnncaaccatcctcctcctccttacctccctcctcctcctccccctcctcccctccttcttcctctccttttcctcttcttcctccttctcctcctcttcctctttctctttctcctctttgtcttccttctcctctttctcttcctcctcttccctcttcttctttcttcacttcctcttcttcctcctcctcaaaccccaagaatgcagacaggggtgtttatcctccttaaagtgactccacaaaggttcgaagtggaggggaagtcccttgtttgtgcttgatcccttccatgggttgccatggtgatccagcctcactgtgccccgcccatgaggcggagcttgctcccttccctgcctcttttgttctcaaggccatttggggagagtcagtgcaagacaaatggctctgtcctgtcctggaccctgtgctgacagtggtggcccactgagaaggcaagagcccttcctagttagctgtgtgaccacatgaagttgttggctatctctgggcttcagatctaaaacgtcacaaaatggagatcggatggaagtctcaagtgatttgtaagcttcaagttaaagagaggaatctgtctggaagaagagagatttgggttaaaggttgaatggacagtgtcagggacagcagagagcagaagggaagagatgctggccttctgctggcagtttgatgcagggaaacccatgcctccatggagggagcacgctctcccctacaactttcctgttctccgtgcagtgctctggcaccggatgaggaccgtggcctctgaaattgaccttcccttctgcgtgtttcaatgctcctcatgcctgggtgtatgggactggctctcacttgaagggcccagggtgaccagaatgagactggtccagaaaggagacagcaagatcctgcttgagccacccagtgctcagtttaacctctgcctcttctaggaagccctcctagttttccccccaaattcagattgcctttgctccctaggtttccagccttccctttgcctaatggtggaagatgagtgtctgtcactgtggtctgacacaattccctacagtctgagggatggtagtcgggggtatgtcagcacccacttggccactgggccagctgggagggccaacaacggaggacatcgccagcggtggtatagttcatgtgggtgtagtgtaaagaagcacccagctaatagtgacccatggagtcagtatggagagatggagctgaccctcagggcgggagcacatagactaaaccacacctctctgccaccagcttctcaggtcctggtggctggctccccctagtggtcatgacaggaaacatccttccctccagcactttttatcacgttcaccctgctgctttcctgcttccgcctctgtactaggctctgtttcctgaatgaggagggactgtgccagttgatggcgtgtggataaaagattcaggcagtggggcaaggggtggggttatcaaatgtcattgtgactggtcccaggagcaaggttcctgtaactacctaggccttagggactgtgacacttggttcccaggaaaaactcagatagcccgttcatttccctgcatctcctccaggcctggcagatgcaggatagtgttcaggtggatctagacaaggcccctcgtggcccctgggctcctctgtgagccacttacaccttgtggcagagcagcaaaaggcagagcgtgtggccatgtctatttatagcctcttgatgctctggagagaagcctgaccattactttgtgacctttagctcactcccatccatatacaggcctcccgctgtggcgccggcccctcccccattcccctgtccccgtccccaccccggtcataatgttctcactctcttccaggtaggagtataatggctgtccaggtgctgcggcagatggtctacttcctactgagtctgttttctctggtgcaaggtaggctttcttggggcccagggtttgtggtgactttgtctaatgcctccatgtctgtgtgagggctctctgtgtaaaggatgggtctgcaaagcagccctgagggcaccttgggggaaaacaggcatctcttccttcttagatgcggctccacagagcgaaacttgggatgggtgcagtcctctcttcctttgcagggagtgtccttggacagtgcacacgtgtgtgtgccacagtctaatacaatcatggtctcattaattaaataatttgcattaaactttggcttttgactttgaaacaannnnnnnnnnnnnnnnnnnntccccccccccccccactcccctgcaagacaggctttctctgtgtagccccggctgtcctagaactcactctatagaccaggctggcctcgaactcagaaatctacctgcctctgcctcccaagtggtgggattaaaggtgcaccactgcctggtctgaaacaaattctttatcttcacttttatctatttatttatttatttatttatctatctatttatctatctatttatttatttgttggaaaccagtaaggtctagcaagatagatacattgttatacattgttgtagactgatagatacattgttgtagaccaatagatacattgttgcagacccttgaaatctagagccttagaatgtgtgtgagtcccaggtcctagcccctggctggtcctgtttatagcctctgcctcctcaggtgcacacagtggcagcccccgagaagacttccgcttctgtggccagcggaaccagacccaacagagcaccctccactatgatcaatcttcagagcctcacatctttgtgtggaacacagaggagaccctcacaattcgtgcccccttcctggcagccccagatattccccgcttcttcccagagcctagagggctctatcacttctgcctctactggagtcgccacactgggagactccacttgcgctatggcaagcatgactacctgcttagtagccaagcctccagactcctctgcttccagaaacaggagcagagcctgaagcagggagccccgctgatcgccacctctgtcagctcctggcagattccccagaacaccagcctgcctggggctccgagcttcatcttctccttccacagtaaggctggggggacatatgagtgtggggtgggagtcacggaagacatggaaagcccatggaggaggacctgggtgctgatggcagctattgtcacctgacctgggtatcctctaggaggataggtggctggggaggggaggattggactgttttgcctgtccctgttatgatctgagatctttgtgatgaccatagcatcacttcagccattaggagagcatcttagctacttttcctctctatgataaaacactctgccaaaaacaacttaagggagaaaggtttcctttggctcgcagttctacggcacactccatcatggtgggggaagtcctgatggcaggtgcttgaagcaactggtcattagcatttgtagtcaggaagcagacaatgataaatacttctgttcagcaagcctaggggatggtgctgcccacttttagggtggatcttcctacctcggttagcctaacatagatccctcacagacatggctcctgtcaggcggatgagcaatattaattatcacagagaacaagggatggagagaaagagattattacttacaggtcctgaggtgcagtgcacacctggaggtcatgcttatatacacacaaaggtcaggacgcagcgggaggaggctaggggggaacataacttgatacatacctgggaatgtaacactaggaaatgtgagctctggcagagccactctccagccagaaggcccagcttctattcaaagtacaggggctggaggaatggcttaatggttaagagcatttgctgttcttgtaaaagatccaagttcagttcccagcagctacaatgggttgtccccaaacatctgtaactccagttccaggagcccccacaacctcctctggtttctgtaggaacccagtgtgtacacaatacgtgtttatacacacacacacacacacacacacacacacacattaattaatattaaatcattaaaaaacaaaacacaggtagaagcaacataaactgtgggcattccgtgtaccctagtatcagcaaagaggaaactggggtacagggagctatgcaactaacagattggggctttaggatgtgaagctagcagctgattagcagggacagggagaattaagggttggggaagcagggaggctgtcagggaggcctggggaccatgaccttgtgggtcaggaaatggatgctttctcacttgggtctcctcctagagacacccatgtttccaggggctcaggtagagatggcgaagctagagactgggagatccccaaagctggcacaataacccacataatcacataattcccgaggagatctgcttaggcctggtccctcagagccttctgtgctcatgtgtagcaggccctaggagacacagccccacttagctggcttcaagtatctgtgatctgtggcccctctgcctcttgggcccttgggtccctcttctgtggagtgccatatgagggttgcataaggctgtatgctggccgtgggaacctcaagcagtctgttgccttcccagatgccccacacaaggtctcccacaatgcatctgtggacatgtgtgatctcaagaaggaattgcagcagcttagcaggtacctgcagcaccctcaaaaggctgccaagcggcccaccgcagcgttcatcagccagtaagtgtggattacctaactaggggatgatggaaggtctaacctgggctaggaggaactgggaaatcttctctgaggctggaccttcctcattggctcctgctgggttgtcagtaaagacagatactaatgcaatgcccggcctcttccctacaagagactccatcctggagtctggcacgttgagttcccgagagaggtttggacatagcataagtgggacataggcatgagctgaattccaaagtactgtccctcgctgccactcccttgaatctgcatactcagctgcctgtgtcctttgtcctcagcaccctctcctctctgttcctgtctatcctgtgtatctagaccatcaccactacccccttccctctgtcacctgccatgttctcccccacaccaggcagttacagagcctggagtcaaagctgacctctgtgagcttcctgggagacacattatcctttgaggaggaccgggtcaatgctacagtgtggaagctgccacccacagccggtctagaggatctgcatatccactcccagaaggaggtcagtgccctagggtggggtgggctagaagggcaggcaggagcactccctacagcatagcggtaacccttgttttcccctgggtctggggacaatccacagcccacagggagagctggtgtctgaagatccaggttgcaagaccccactgaagacctcttagcctttgctcctgccacccgactccctggtctcttgtggggtggcccagagcccagtgtttagaagggggttgtttggcgtgaggggggaatctggggtgtttgctgggccgggaactgaggatcctcgatatgcaggaggagcagagtgaggtccaggcatactcgctgttgcttccccgggccgtattccagcagaccagaggccgtcgccgggatgacgccaagaggctcctggtagtagacttcagcagccaagctttgttccaggtacggagtctcctctcacctgctcctagggtaactgataatacacacacacacacacacacacacacacacacacacacacacacatatgcaaatatatgtatatgggtatatatatacatatatgtgtatatatgtatgtgtatgtatatatatatgtttacatgcatatatacatatgggtatatacatacatacatacacacacacacacacacacacacacacacacatatctgacagaggggtggaaaggtggtagctaacctactccaggagccaaatacaggcaggaagggccctccaatgcacagagctcctaggagaggtgtgaatagtgctgttctcatccagtgtgaatgaccagcaagaccctcagagcaaaatgttaggagcgacagtagtctagaaagggtgggcagaggccttcttagcttttcttcttctcagccttaaatctccaacctgtcccccctacccccaacctcatctatctaggacaagaattctagccaagtcctgggtgagaaggtcttgggtattgtcgtgcagaacaccaaagtcaccaacctctcagatccggtggtactcaccttccagcaccagcctcagccagtaagtgtgagcaagccaaccccagggcaagggtcccttcctgctgggtcacatgtctgcttcctgtgtctcccaacccacttgtcttttatggaagggttgcccagcagccagctcccagattgggggcgggggtggggactgcaaggtgggtagtgaggtgaataggaaggttaggccgtaggagggaatgcggagggtgggtgatagagggaacatgaaagatgagcaaagagaacacagagtggtctatagagagaaaacgcagggagctggctgtggaaaggaacagaggctgagttatggtggcccatgcttcttgtccccacagaaaaatgtgactctgcagtgcgtgttctgggttgaagacccggcatgtgagtagggcgggggtctctaggggaacaagtatctggaggaggcatggagttctgttggggtaggagagaggagaagccccagggatgaatttctggagaagatgggcgtaggggaaaggtgcgacggaggccagggatctgctggtggtgcaaaagtttgcaccaatgacccagtcttgtgtggagtgcatggtgggtggggtcttgaggactggggttgaccagggtcctgtgctttcccctcagcaagcagcacagggagctggagcagtgcaggctgcgagacagtgagcagagacacacagacatcctgcctgtgcaaccacctgacctactttgcagtgctgatggtaggggtctccccgagatccccctgcagtcccgccacaggccaagcctatgtcctgtgtcatgtacttggaaccggcttcctcatttaatcccaaataacctgccaagatagctctgatcaatcaccctatttcaaaggatgctgaggctaagtactgtatataaggctgcacagtgttggtgtgtgacgaacgtgcagattcctgctcccaacccacaggcctgggccagcaaactgtttcctataggcccccaactggaagccactgagatgggctcttgcattccccaaatatcagaggctttgttgaaaatatgctaagtcaacaaaggcatagactctgcccgaccccagctctgctgagcacagtgggtgagcatctgctaggtctcagggctgatgtagcttcagtggtcctaggagatctcaaactctgagccgagcttctactgacaactggggcttgagtggacaatccccagctaaagctgccccccttagggctttgtggggttcaggcctggcctgagcctacttcttgggcgagggttcctgtggtgtgggtcagagacttactggcatgggaggaagacaaaagggtattcatgtgggaggggctggctagctcccagctggccaggaacagatgctagccccttggaggggaccgtgctgagattgtcactctgtccccatccaggtgtcatccacagaggtagaagccactcacaaacactacctcacgctcctgtcctacgtgggctgtgtcatctctgctctggcttgtgtcttcactattgctgcctacctctgctccaggtaggccaaaggaagtagagtggacccatttcattcctatagactaggactcgtaccgtgcaggcttgcttcacccaaaatatgtgcgttgttgggaagctatgggtgggctctctgctgaccaccacactctgtggccgtcggaccccaacaataacattagttaatccagcattagcactgagtatctgcacagtcaaaatccaaactgcagnnnnnnnnnnnnnnnnnnnncgagcttctactgacaactggggcttgagtggacaatccccagctaaagctgccccccttagggctttgtggggttcaggtctggcctgagcctacttcttgggcgagggttcctgcagtgtgggtcagagacttactggcatgggaggaagacaaaagggtattcatgtgggatgggctggctagctcccagctggccaggaacagatgctagccccttggaggggaccgtgctgagattgtcactctgtccccatccaggtgtcatccacagaggtagaagccactcacaaacactacctcacgctcctgtcctacgtgggctgtgtcatctctgctctggcttgtgtcttcactattgctgcctacctctgctccaggtaggccaaaggaagtagagtggacccatttcattcctatagactaggactcgtaccgtgcaggcttgcttcacccaaaatatgtgcgttgttgggaagctatgggtgggctctctgctgaccaccacactctgtggccgtcggaccccaacaataacattagttaatccagcattagcactgagtatctgcacagtcaaaatccaaactgcagggcacacagggtaataacacaatgataataagaactaggggacttctcatggagtgtccacatgcctcacactgttcaaagagggcagcagactttgagacctcacagggagggagtgacagaagttgtccaattatcagtgtttggtatagcctccattaaggtctgctagaacctgggcctgcctgagtggaggagagacactcttggctgtgggtcttcagttgtcctgaggaaggagtaggggtggagctgggaaggagtaggggtggagctgggtacaggtgggctgtaagcaggtgcatcatagccaagtgcatccgcaggtgcacactcccaaggctggccaggtgctttgtggagggtgaggtaggcaaagcactgagcacagggccaggggcatgggaactagtaggaaatgcagagcttcctgcaccagacactttgccagatccatcctcctgctgtgtagaggaggaggcattctgaggtggactggactagcccagggcagtacagaagtcaaggatagtaatgtcggggccagtgtcttctggtgaaattctggaactccttagaatgccgtggtacaggtacacactgtgctagtgggcagatatccacagctgctcagagccacatggccagatagctatggtgcagacatgaaggcctcctggaagagggggagagggaaggagggaaggggggggggaagaggaatatgagaaaggggaacaggacagggccatgcccctgactctgcccctgcgctggcctgctagcccatgctcacgttctccctgtaggaggaagtcacgtgactacaccatcaaagtccacatgaacctgctgtccgctgtcttcctgctggacgtgagcttcctgctcagcgagcctgtggcactgacgggctccgaagcagcctgtcgcaccagtgccatgttcctgcacttctccctgcttgcctgcctctcctggatgggcctcgagggctacaatctctaccgactggtggtggaggtcttcggtacctatgtgcccggctatctgctcaagctgagcatcgtgggctggggtaagtggcagggggagaggggaccccagaacccactgtctcatctactacacactaggcttcgttcaggccaagcacagacagcaggttctgccctcccccgttagggaatcaagcagttcctccagctggactgggggcatggactttagtagagactccaagatcccccacaaacctccgtgacacagtggcattttgtcttggctggtgataacttagttcacctgtgactcagactactcaagtcagactgaggcacagagtttcatgcataatcattttacacagttnnnnnnnnnnnnnnnnnnnntattcatgtgggaggggctggctagctcccagctggccaggaacagatgctagccccttggaggggaccgtgctgagattgtcactctgtccccatccaggtgtcatccacagaggtagaagccactcacaaacactacctcacgctcctgtcctacgtgggctgtgtcatctctgctctggcttgtgtcttcactattgctgcctacctctgctccaggtaggccaaaggaagtagagtggatccatttcattcctatagactaggactcgtaccatgcaggcttgcttcacccaaaatatgtgcgttgttggaaagctatgggtgggctctctgctgaccaccacactctgtggccgtcagaccccaacaataacattagttaattcagcattagcactgagtatctgcacagtcaaaatccaaactgcagggcacacagggtaataacacaatgataataatggtaatggaaacagaactaggggacttctcatggagtgtccacatgcctcacactgttcaaagagggcagcagactttgagacctcacagggagggagtgacagaagttgtccaattatcagtgtttggtatagcctccattaaggtctgctagaacctgggcctgcctgagtggaggagagacactcttggctgggtcttcagttgtcctgaggaaggagtaggggtggagctgggtacaggtgggctgtaagcaggtgcatcatagccaagtgcattcgcaggtgcacactcccaaggctggccaggtgctttgtggaggctgaggtaggcaaagcactgagcacaggggcaggggcatgggaactagtaggaaatgcagagcttcctgcaccagacactttgccagatccatcctcctgctgtgtagaggaggaggcgttctgaggtggactggactagcccagggcagtacagaagtcaaggatagtaatggtgtgggaccagtgtcttctggtgaaattctggaactccttagaatgccatggtacaggtacacactgtgctagtgggcagatatccacagctgctcagagccacatggccagatagctatggtgcagacatgaaggcctcctggaagagggggagagggaaggagggaagaggggggaaaaagaggaggatgagaaaggggaacaggacagggccatgcccctgattctgcccctgtgctggcccgctagcccatgctcacgttctccctgtaggaggaagtcacgtgactacaccatcaaagtccacatgaacctgctgtccgctgtcttcctgctggacgtgagcttcctgctcagcgagcctgtggcactgacgggctccgaagcagcctgtcgcaccagtgccatgttcctgcannnnnnnnnnnnnnnnnnnnctgactgtggcagccttggctatgtgctgttccctcccccaatgaactttctatttctacttataagtgcgtcaataagaccaaggcaatgtcttctctactagagttgtctccctgccctccccaccagccccatcatcccctcatctccctgactgaccatacttccacagtgtaccacaggccttttctcctgggagacccaggaagggacagggaaaagttgaaagagagtctacccattatggaaacagaggggacctacccaggcccacggggatcagagaaaatggactcagagggtggactcagagcttcccccttgctctctgcaggttttcctgtcttcctggtcactctggtggcgttggtggatgtgaataactacggccccattatcctagctgtgcgccggactccggaacatgtcacctacccctctatgtgagtggctatggcaaggacaggaatgtgggtctcgagggtcgggcagggacagcagccttaattggccaggttgtctgggagctatgggctccagtatgctgcaggaataggccccacaatggtcagagcccgggattaaggaccacagggacaaggagaagccaagtctgccctttagcagtcaggtgcctgtgcccagagccgggcctttctctgagcctcagaggagaagtgttgggctacatggtcccccaccaggcttccttctcacatccattggttctgaagcagatggaagtctgtggtgcagagagcatgaaccacttgtaaccacgccgtgattactatgtggcaccagctggcaggggacatcctgaaactagacctgaggagccagggtgctcaagccccaggtcagggaggaatgctttcccctggctccaccctgatgacatagaaccccaaatgtcccccttcccccacgccaggcctggttgaggcttgccccaaccttgtactgtcaagaacacggcttctttaacaccttccttaaagttatctgactgggtaactggatgccaaagatggctcagggcttaagagtgcgtactcctcctgcagaggacctgagtttggttcccagcactcaaaccaggcagctcacaaccatctacaactccagttccaaaagattggatacctctgagttctgtgtcctccgtgtgtaccagcacacatgtgtacatatctgcatagaggcacatacacataattaaaaataataaaaataactatatattttaagaaactaacttttaagatgacaggaggccagtggtgcttgtcactagtgaatggtcccaacaccacaccctgcaccctccaggtcccgctgttcactctcctgagctgagctgtttcattcttgtccaggtgctggatccgggactccctggtgagctatgtcaccaacctgggcctcttcagtctggtgttcctgttcaacctggctatgctggccaccatggtggtgcagatcctgcggcttcgcccgcacagccagaactggccccacgtgctgaccctgctgggcctcagcctggtccttggcctcccctgggccttggtcttcttttcctttgcttccggcaccttccagcttgtcatcctctacctcttcagcatcataacttccttccaaggtaggcatgatgagggccccgcccctactcagtagcccttgtccctccagctggtggtaggtaggctttccatatgtggagcgggagggggagagatgccctagggacccccagatgctcccttctctgggcctcagctgtcacagtccaaaatgagcacatgcaggccacacacaggacaagcctctgctgagcacttacttctgtgtcggtcctatgagaagcccctgggttccagcatgagctgaccactcagttctcatgagggggacagtagagtcaagaaagattgaagccaccaaggggactcagagtaggagagttggcaatgacaagtgttgcacccggggcccagtgcagacagtggtcttgcgtcatcagcgtcagcatcacaggggaccttgttggaaaggcaaactgtgatccactctggcccaccgatcctttctgcatcttagcaagatgcccagggcatcctgcctataacaccagtcagagagccctggnnnnnnnnnnnnnnnnnnnncccctccgggaggacacatgcatggcgtccgctcacgatgtctgtggcccagtgctgtgcccacccagcctttgttggttagtggcatactagagaaggccctggtccttgaaggcgtagggctgttgctctggtaggtagatacctagcttgccttggggacgactctggtcctcaaagggctcagaagcacactgccattctgtttgtggggccgtttcagtctggagctaaggccttgtctttctggccacctctgggtccagctgttgctgctgggtgttgagacctgcagacccaagctggggttagatctcgaaggaggctgacacatccggcctgagacacagctaactgtcttgacttgctgctctgtctctgtggtcaccatgcagatcccgagggtggcactgggggtaaatgttctgggagaaggtttggaggcagagcaccttaggagctgagcatctcccccagcctttctgcaaaccctcctcttcattccccatccccaacccctcctctgtgttcccctaaccctccacctgaagcctggggtcctagaccaatgctgtgatttggggtggtagttcccagcagtttcctggtgccagctatcaacttctgtctgttgtgtgggctttggcctctgactcagggcaggtttctgtctgagccctctctccaagctgcctcacctttgctcgcacctcagagggacctccatctctcctgaagcctcctccctctggcaagtactgggatacagccaccctttcaacccagcactctgaagaccaagacagccccctctggtgacactggccaagcttgatctttttcctaagaagtggtcttcagatccctgcaggtcgctcagaagacactgggctgcctagtgtgaattctgtcctactaacgtacagtgagcagctcctcacccccacccccgcaaaagctctcaccaagtcctggagtgtcaggcagggggctggaaatccaggaggacttcctgcaaaaggcagcatttcatcttgacctcagccttcaggttggggagaatgttctttttaaataccagttcatttgtcttttgatattaaagctctttatagagagtctggaaactgtaggcgattgtcgagaagagaaataaaaatgagctgttatctaatgccatggcaaagcagcacagtttggagagttgcccgtctcagttttgtttgggtttgtctttgtttttttgtttttttttcctcccacttctgttactagtgttgctgattcaggagtcttggggatgatcaggaaatggccaagagggaaatgtgacaaagaaggcatctgaggacactttctcaggagaacaagagaaatggcccactggtacctcctcgggtggtgccgggcagaggcccgtcaagaataacccggagatcctgaccatctgctgcagatggccattgctggcgtggagggagacctgggtagccacatcagttgcctttcatggggaaaccagactggttcatcaaagccattgatcttacaatgttggcatatacaaaaccttccgtagccaaagaggtcactcttgagagctgagttcagattttaactagtcaggtgatccaaggaacagtttggccatcagtctggagcagctgggctgtgagaaatgactcaggttttctcccagcgtctagcctgctcctcaagtcccttctcccacttatgtggcacaggttagacatgtcccaggtgtctgtctcccttgggttatatgtgattgtccccatctgagttcaagtacaaagaggtataaaaagcagggtgtggtggtacctgcagtcccagcacttgagatgctgaggcaggagattgagagttcaagaccagcctgggctgtatagtgagcctctcaaggagtgaggagaggaagctaagtcccctttattcgaagtctgagattcgcccaggtccacagccccaccccagctcccaccctcagcccctgctgtgccaggggaaggtgggggtactctggggcttgacagggtgagtggaacactgccttggcagttctaggtataccagcagttcccacagcatggcacagatgtgacagatttgagacctgtctggactttggcccgtggaagccccatgtctctctccatcttcctccacaactctggtggcctctgcttttactttggagttcttttgtttgtgtgcttgattgcttttttttttttttttttggaaggggggggcagggtttctctgtatccctgcctgtctggaactcactgtatagaccaggctggtctctacctacctacctacctctgccttttaattgctgggattaaaggcatggaccaccatgcccaccttactttggagtccttatgttcctccccctgcggaaagaaccagactttcccgagcccctctgctgcgtgtcctggcctgacatcccccctcctctcacaggaagaaagcctccaccccaatttcttctttcctaacctctggttctgaggctggctcagagaaggagatgggacccctgatgtctctgagtcttctttggcccgagtagttctttctaggctgaggatcggtagacaacacacttaccttcccattaaggcaagcaagagagtctctaaagacacgtttctgatctggatacagtcaggtgataccggctggcctggcaaagggcttgagaccttggaataagctgcggtgacaggagataggatgggacatgactgttatgttagtcctgaaatgtgggggcccagggctctgcaaaggatctcaggctagtacctagctagtctcactgggtccttctagaagctctgcagggcctggctctcccacctctctacctcccagggacactgggcactatgcttctgcctgcaggtcaccaaccttttttttttctctctcatgtatccatgagacccatggagccatatgagacacaacccagcatatcaggaaccaccgtgtcacgacatccttgcctgaggttgggagagacgccacaagcaattaggggaggctgactcagggcagagcaggcccagtggctcccatcttcctgtcagaggaagctcagggacacaggaacttctggattctgacctgggactccaggctctatccgtccccacccccaccttctacagagcaagagtgacctgtatcccttcccacaccccctcagatccaaagggcccagcaggggaccatgtgaaaggaaggagagacagatgatggttataactggacagctccccagaaagagcagagctagctcagtcctaagggggtgtcggtaacaggtgacggtattgaggctcttttacccatctgagtagctgtggacaaccaagggcctggccttctccatgactttcttggggtcagccgactggtaggctccacctcttccccaggcatgtgcatgtgtgtatgtgtgtttgtgtgtatatgtgtgtatgcgtgtgtgtatgtgtatatgtgtggttgtgtgtatgtgtgtttgggtgtatgtgtgtttgtgtgtatatatgtgtgtttgtgtgtatgtgtgtttgtgtgtatgtgtgtttgtgtgtatgtgtatatgtgtgtttgtgtgcatgtgtgtatgagcctatatattccccatcctcctgcctggaccagcannnnnnnnnnnnnnnnnnnnnnnnnnnnnnnnnnnnnnnnnnnnnnnnnnnnnnnnnnnnnnnnnnnnnnnnnnnnnnnnnnnnnnnnnnnnnnnnnnnnnnnnnnnnnnnnnnnnnnnnnnnnnnnnnnnnnnnnnnnnnnnnnnnnnnnnnnnnnnnnnnnnnnnnnnnnnnnnnnnnnnnnnnnnnnnnnnnnnnnnnnnnnnnnnnnnnnnnnnnnnnnnnnnnnnnnnnnnnnnnnnnnnnnnnnnnnnnnnnnnnnnnnnnnnnnnnnnnnnnnnnnnnnnnnnnnnnnnnnnnnnnnnnnnnnnnnnnnnnnnnnnnnnnnnnnnnnncaggttaggtttgcctctggcctcattcataggctttccacatctttggcctcatgggtgtgcttggctggttacaggtctcatcaaatccagacactgacaatcagcctgtgtatgctctgtggaggatgtaaataagccgataaccagcccaagcacatgatagtaatcacttctgtgaagtgacagtcacccttccccctcccccaagatggtcactgctggtccaggcaggaagaaaggggaccacatacacacatacaaacacacatacagaggcaggaatgagtctcagacacccttgctagggagatggggaaggtatgactgactccaagtcttagggtttcgctgggcagagacacctatggctgctgggctcctactccagcatccactcatacagtggtggaaggttagcccagttccctctgcaggtggtctcaggagcatttgagatccagagctccgcccagttcctcacattcacctttcacaacccctcgatggcgccattcattggtcaggaagaacgagaaagaggccacaggaaacagtggccgcacgtcagggggcaggaagaaggtcagttggacagtttgggactgagggaccacacagccatagaacttcgctgagcactgatggcgacagccaggagtctgggcctcctgttctttctgctgctgacttcaggtgagcgggcggggctcctctagctatcctgctaagcctgggagactctgtgctgcaaagggccccaggggagcatgggaagagacccagggactcgtagtgactccctcatcatcccttctggccttgtccctccaggtcatccctgtccatcttgctgggtctcaggctcctgttgtcaccccatagtgtattgtcggtgggcaagaaagacactgcccatctgttctggctggaaccaggttcttggacatggtgggtcaaacaagctattcagttctgggctccaggcaaaggcatcagaggccctggaagctgcctgtaagggcggacagctgctctgcccacatagtccatccatcacaggctccccgttcctgtcggcaccattcagtgtcatcagtgacaggagacgggacccagagcactcccatcacatacagctcaacttaatacaccgacatgagattcccagtcctgcctctacccaagttgagcctgctacccccctcacctccgtagatggctatacccttcttgactgttgagagatggctatgtggagtgatgaggtgctcccgtctccatgccccgcctctccttgtttgctccaactttggcaagtatccttaggtgtctgcctttctgagtcacttatggacaagtgactagtcacacagattagcatctcttggttcagaagaaaaaaaaatctcttctcttccaatgctgggacagtcagtcaaggatagagttgagtgtctgactcagaggtggaccaggtattgtgacatatacttgcacttggaaggtagagaggcagaggatcaagactttgagttctgtttcagctcatagtgagtttgaagccatcctgagctattggagatcctgagtataaaagtgggtagaaattgacagggctgtctttcagcagagcaggcaatgctggacaggccaaaaagactcctccgaatggagatgtggatctagtagtggcagggatgctcatgactgggcaatgtgtcagtcacctgagtgacataggaggtagcatcggatgccttttgtccatttacctactggctctttgcttacatacccaagaaatatacatggtgctaaaaagaggcacaaaagtggtagctacttgcctgagggaggctcttggcaccctgagtctgaaggctgaggaatgggctagccccaggtattggctgcagaagggaaagaggctggcagtaagtggagggagggaggctgaagggacaaggggcagggtatagggaacatatgggtcaccttctggcctctgacctcctgcctgccctcacctgctgcatcccaactgttgaactcacaccaaggcgtccaaagtcctcagcaaacacccttgagacacagcacttcctaagatcttgagtttgaggctagcctgggctatatcctaaggacaaagcggggtggggagccacaagttggatgtcaagagcttcccttaggtatccctgctgggattcccagcaaggtggaggaaagctgtattcttacctaccctgaggccatccccccctttcctaacccttgacacccccctcccccatggagtccttcttcctcctctctaaccctccttagatttcatgtgaatgcaaatagggccgatctcagagactgagcctagcatctggtctcagtgcatcttataagctccacatactatttgaaaaccgaagcaaaattgaacaacatatagacccaatttctataaatatgctaatatgttcttccctgttcactctttgtcctgccatgcctttatcatgaattttattttctgtactaatatttgaaaatgaaccagctttctttaaatcggaagtggtaatgtccatgatatttttcgtgggtttttttgtttgtttgtttaagatttatttatttcatgaatgtgagtacactttcactgtcttcagacacaccataagagggcatcggatcccattacagatggttgtgagccaccatgtggttgctgggaatagaattcaggacctctggaagagcagtcagtgctcttaacctctgagccatctctctagctccaatgatattttttcaatcaaataccagcaaaggatatttaaaaagtatcaaaaacaaaaaaacaaaacaaaacaacaacaaaaaacccacaaaaaccaaaaaacaaacaaaaaacccccaaaccaaccaaccaaccaaccaaccaaacaaaagtcacaccttagtcaggtgttggtggtgcacgcctttaatcccagcacttggaaagttgaggcaggaggaactctgtgtttgaggccagtttgacctacatagtgagttccagagcacccaggactatgtggagagactaactctgtctcaaaaaaaaaaaaaaaaaaaaaaaaagctacatcctccagaatacctcagatggtctgtgtgctcaggtatattatctcttttcatctctaaaacgtaaagggtgagaggaccaagcgcttgcgtaatttgccagaggacaaacggctaagcagggacaggaagcttcctgcattccatagcacagggctctgcaccagaagtcacggaactggtctctagtcctgaagcaccttccaacatgggctgactactccccagcctcagcctgctgcagcctttacccagtccaggcaaagatgggaggctaggacagagccagccacaagacttacaagagttagagaatcggccgcggcgcccgggtgcctagcctgggaggatctgacggagcaagggcaggaaaccaggcaggctctgtggaggatgtggctgaagagccacagttctgagagataaaacactgtgcactgccaggcaaagcctttgtctggagaaccacatgccacgtgtcgtcatctcccacccccacccccaaccccacccaggccctgtgaggtgggaatgccagttctcccctgagaactccgggactggggagggtggagtctgccggagtgcccctagctgggtgatggaccagctacctctcctaggccactgcccctctcccacttgccccatctcaccccacttcctcccctagatgaggagaccacggaagagccgaggaatgtctgccgtcggcttcaggagggccacgagtatgacaccttcgacttgaatgacactgctcagtgtttcaccaagtgtgggcaatcggagcacagcccctgtgacgtggggaacctgcagaggtgagaggagaggaatctgggcaaatgggaggagtggcctgttgggaagccatactgtcataagttctcagcgccctagaatagcatgctgttcccctttcaccctttcatgttctccctaacctggccctgccttggtcatcagagttgctactgattaggacagtggttctcaacttgtgggtcttgatccttttgagggtcaaatgacccttttccaggggtcacctacgacagttgggaaacacaggggaaggactttggggtatacaggacagctttctggtgaatccacacagtggtggataatgtagctgcttaatttcatagtactgggaaagaactagagtgctttggactgtaagcatgcaaagaggtgcgggggacagaggtggcaatgtcgagatgagatgagggccggggggtggggtgggtgttcagactggaaacgcaagcaagaagtcaggggtgaaggaccaagttaactagacaattatgggaagcagagagatgatgtattcaaagttaagaagggtgtggtcaactcgagattgattgcttggacttcagggacatccaggggtggtgaccaacgtggaggtgtgacccattagggtggaattctgctggtactatgaagctgctcaggaaagatggctcaggcaggcttcatgggaccaagaagctggctagatggggcaagggagacaaagctccctggtgctgtccctgctggagtcacagttgacacactagctctgcctctctgctcttctctgggctctaggcagagggacccaaagctcacctgggataccacagaagtgcccagcttacagtcagaactcagaaaatggttgttgaagggaggaatgaaaaatctctgctcaagtctggctattaagacggtgtttatattgaggttcattctttctgtggcctggaaatgccctgagtcctgcctacagcttcttagacactgtgaatgaagcccagggtacctgtgtgctcatgtcctggataagcaccttggagagagcaggtgccttggttctgaagggtgtggtctgctccctctccatacttgggactgaagggtgtggtccggttccactccatcccttcagtttgcccttttctcttcataacaacactatcttcagctacttctcttgcagctgtaactgggtacatggcaggagcagcctaagggaggggagggcatggtgaatggagaggctccgtccccggcagcagaggcttacagcatgatgagctcatacacaccttgtcagggaggaacacagaagcagaagagaatgggaagcagctctggctatccttctacatatgccacctagacccagcttctcaaaggctccatgatctctgaaaacagtacaccagaggaggttgaaatattgaaacacatgaacctatgaggaccatgaaaaatgccctgaggtaggtcctgttatcaacccattctcagatgagcaaactgaggctctatgctgtgaataacttgcctgtggttacacagcaggtaggaggcaaaattgataggagctgatatagaagtctcagcggaggcacttgatgtgacaggctggacccagactgccagtgctcaggtggcttccagtatacctgtctgtaaaatgggatttacaggatgatggtggaggctaaataattctgcacttgagagccatggtaaccccgccatcctcactgtcagaacgccatgccctcaagtgcctgctcccaacctctcaggcttcctcatagtatcactgagggaggagttattagcagatagcaggagctcaagaaatgttagtgtgctttatttcaacggctgtcttgattataaaagtagcacatggtgggcatgatggtgcatggcattaaggcagagcaggtagatccctgagttcaaggcctgctctacagagtgagttccaggacagccagggctgcacagagagagcctgtctcagaaaacaaacgatgacaaacggtgatacatattcattgggaattcgctatagaaaggaagtgagaatttcccttaacccatcagccagagacggctgccatcttcatccggatgtgtatctttttagcatcttacaggacatataactgacaacttattttgtggtgtgggtggctcctgcttttggacgttcttggtcatgtattgttgtgaacttgtattcctaggcttggaattcgtgacttgggggggcggggtgggattaactctagcagaaacaggctagagtagtcagatcagatttcactcctgcaggcagaaggtgacattccagttgccccgtggccttgacaacccctggtcttgtctgcctttctcctttagccatccttaagggtttctagtgcacctcgaggtgactgtgatgaccgacgtcaagcgcctccagttatttctttcatatcttaacatctctatttctgtttattggtctataaagctgttggaattttccatagtgattttggggatcctttatttgttctgcatgcgtcttcgtgaatacacatagagaataatcttccttttcatgggcttcccgttcacttccgcagcactgtcttttgaccactgctaaaggttttaattttagttagtgtaatcgatcagatctttagatttactttaagtattggtgtgtgtgtgcgcgcgtgcgtgcatgcgtgtgtgtgtgtgtgtgtgtgtgtgtgtgtgtgtgtgtgtgcatgtgtgtgtgtgtgtatgcatgatgtgggggaactaacatgccacagcatgtgtgtgtgtgtgtgtgagtgtgtgtgtatgcatgatgtgggggaactaacatgccacagcatattctcgaagtcagttctctccttccacctttacatatgttctgagacttgtgacaaacacctgctccctgagccatctcaccagccctattgcctgttactctgttctgttctgctcttctctgtctgttttctattctaaactaggcaggcatggctgttgaaacatctttaatccccaaattcaggaggtggaagcagaggatcaaagagaccaagtccatcctcaggtacttggtgaatgaggccagcctaacctagataagactagactctcacagacaaaaagagaagagaacaaaa

SEQ ID NO: 1052 - DNA, 2865 bp, Mus musculus
agacagcgtgatcccggcctcccacggggcagcttttactgtctagggaagaaatccccaaagtccatggagtctgaagactctgtcaagcctcgctaggaaacctaggagttttagagggcacttggcaccggaagctagccgggtaggcggagcctcacctggattgagttcacagctgcctagacaggctcagactaggtgctgggcacctggaaggaggaggagacattagcagcaaaggctgttaacagaagtgcctgcctaggcttggaggcaagacgctgctgttcacagtgcgagacggaggtaggagtataatggctgtccaggtgctgcggcagatggtctacttcctactgagtctgttttctctggtgcaaggtgcacacagtggcagcccccgagaagacttccgcttctgtggccagcggaaccagacccaacagagcaccctccactatgatcaatcttcagagcctcacatctttgtgtggaacacagaggagaccctcacaattcgtgcccccttcctggcagccccagatattccccgcttcttcccagagcctagagggctctatcacttctgcctctactggagtcgccacactgggagactccacttgcgctatggcaagcatgactacctgcttagtagccaagcctccagactcctctgcttccagaaacaggagcagagcctgaagcagggagccccgctgatcgccacctctgtcagctcctggcagattccccagaacaccagcctgcctggggctccgagcttcatcttctccttccacaatgccccacacaaggtctcccacaatgcatctgtggacatgtgtgatctcaagaaggaattgcagcagcttagcaggtacctgcagcaccctcaaaaggctgccaagcggcccaccgcagcgttcatcagccagcagttacagagcctggagtcaaagctgacctctgtgagcttcctgggagacacattatcctttgaggaggaccgggtcaatgctacagtgtggaagctgccacccacagccggtctagaggatctgcatatccactcccagaaggaggaggagcagagtgaggtccaggcatactcgctgttgcttccccgggccgtattccagcagaccagaggccgtcgccgggatgacgccaagaggctcctggtagtagacttcagcagccaagctttgttccaggacaagaattctagccaagtcctgggtgagaaggtcttgggtattgtcgtgcagaacaccaaagtcaccaacctctcagatccggtggtactcaccttccagcaccagcctcagccaaaaaatgtgactctgcagtgcgtgttctgggttgaagacccggcatcaagcagcacagggagctggagcagtgcaggctgcgagacagtgagcagagacacacagacatcctgcctgtgcaaccacctgacctactttgcagtgctgatggtgtcatccacagaggtagaagccactcacaaacactacctcacgctcctgtcctacgtgggctgtgtcatctctgctctggcttgtgtcttcactattgctgcctacctctgctccaggaggaagtcacgtgactacaccatcaaagtccacatgaacctgctgtccgctgtcttcctgctggacgtgagcttcctgctcagcgagcctgtggcactgacgggctccgaagcagcctgtcgcaccagtgccatgttcctgcacttctccctgcttgcctgcctctcctggatgggcctcgagggctacaatctctaccgactggtggtggaggtcttcggtacctatgtgcccggctatctgctcaagctgagcatcgtgggctggggttttcctgtcttcctggtcactctggtggcgttggtggatgtgaataactacggccccattatcctagctgtgcgccggactccggaacatgtcacctacccctctatgtgctggatccgggactccctggtgagctatgtcaccaacctgggcctcttcagtctggtgttcctgttcaacctggctatgctggccaccatggtggtgcagatcctgcggcttcgcccgcacagccagaactggccccacgtgctgaccctgctgggcctcagcctggtccttggcctcccctgggccttggtcttcttttcctttgcttccggcaccttccagcttgtcatcctctacctcttcagcatcataacttccttccaaggcccctccgggaggacacatgcatggcgtccgctcacgatgtctgtggcccagtgctgtgcccacccagcctttgttggttagtggcatactagagaaggccctggtccttgaaggcgtagggctgttgctctgagggacctccatctctcctgaagcctcctccctctggcaagtactgggatacagccaccctttcaacccagcactctgaagaccaagacagccccctctggtgacactggccaagcttgatctttttcctaagaagtggtcttcagatccctgcaggtcgctcagaagacactgggctgcctagtgtgaattctgtcctactaacgtacagtgagcagctcctcacccccacccccgcaaaagctctcaccaagtcctggagtgtcaggcagggggctggaaatccaggaggacttcctgcaaaaggcagcatttcatcttgacctcagccttcaggttggggagaatgttctttttaaataccagttcatttgtcttttgatattaaagctctttatagagagtctggaaactgtaggcgattgtcgagaagagaaataaaaatgagctgttatctaatgccatggcaaagcagcac

SEQ ID NO: 1053 - protein, 686 aa, Mus musculus
QKCLPRLGGKTLLFTVRDGGRSIMAVQVLRQMVYFLLSLFSLVQGAHSGSPREDFRFCGQRNQTQQSTLHYDQSSEPHIFVWNTEETLTIRAPFLAAPDIPRFFPEPRGHFCLYWSRHTGRLHLRYGKHDYLLSSQASRLLCFQKQEQSLKQGAPLIATSVSSWQIPQNTSLPGAPSFIFSFHNAPHKVSHNASVDMCDLKKELQQLSRYLQHPQKAAKRPTAAFISQQLQSLESKLTSVSFLGDTLSFEEDRVNATVWKLPPTAGLEDLHIHSQKEEEQSEVQAYSLLLPRAVFQQTRGRRRDDAKRLLVVDFSSQALFQDKNSSQVLGEKVLGIVVQNTKVTNLSDPVVLTFQHQPQPKNVTLQCVFWVEDPASSSTGSWSSAGCETVSRDTQTSCLCNHLTYFAVLMVSSTEVEATHKHYLTLLSYVGCVISACVFTIAAYLCSRRKSRDYTIKVHMNLLSAVFLLDVSFLLSEPVTGSEAACRTSAMFLHFSLLACLSWMGLEGYNLYRLVVEVFGTYVPGYLLKLSIVGWGFPVFLVTLVVDVNNYGPIILAVRRTPEHVTYPSMCWIRDSLVSYVTNLGLFSLVFLFNLAMLATMVVQILRLRPHSQNWPHVLTLLGLSLVLGLPWALVFFSFASGTFQLVILYLFSIITSFQGPSGRTHAWRPLTMSVAQCCAHPAFVG

SEQ ID NO: 1054 - DNA, 64958 bp, Homo sapiens
tgctgtctatggttgatctcactaaagctgcacaaccacccagtgaggaagaaacctgtcacagatggagaaactgaggcaccaaggggcaggtcgcctcctcaaggtcacacagtgaggactggaatccacctccagggtcctgtgcttgccacctcctcagggctgcctcttcttgcctgtcatccctgccacctctcagcttgacctggaagcatcaatttgacatcactgttcactctgtgcagagcttttccaagtggcccctgggtagcagccctgtctttgagtggggaaacaggtccctgagacaggtggagacattgcctttgttttctgcttatttcactgaattttgtattacagtcatcccccaatacctgtgggggaccaaattgtaggatgctcatgtccctcagtcatgcccccaacgacttgtgcagagggccaactgtataagcgttttccttttgttgtgaccatatgaccatgagctggggggtgaccagctctctcagtttactggaactgagaggtttcccaggaggcagagctttcagtgctaagcagagacagtccccggcaaaatgagatggttggtgaccccagaggacaaacctgggttgtgctttctgagccatctcctggtgctgagcacttggaccgcttcagctctccacgggtcaggctggacagccctgtgaccacagcttgtcactggagtgtcttttcttcagggcccctcttgagtaggaggagaccaggctttgaaggttcctgagaggagatgtacgggacctgaatacagctttcctgacctgcccctcataggagcctgcagggaggtgagatggggacccaggacagggctgagggcaggcaagggccaggggtgtgttggagcttgctgttttggcttgcaagaactggtggttaaatttttaggcattttgtgagttggttgttaaacatagccactgttaagaattaaattacatacacaaaattaaattacagtcatgtgttgcataatgacgttttgggcaatgacagaccacatagatgacggtggtcccataagattatatgggtcatataaagaaagctacagatagcacttcatattggccttgcagatcaactagggggaaatgactgatattcagtaacggtgctgggacatttggttttccatgtaagaatatataaattttaaaatgcatcctctaggtttggataaatgcactctatgatgtttgcacaatggcaaaatcacctaatgacgcatttctcagaatgtgtccttgttcagtgactcatgactgtgtatttaaaaagataataaatactcagaatgaaacactttctgattattttaccaccatcattcgttgtaatggattgaatcctgttcctctttgccccaaattcttaagttaaagttctaaccctgagtacttcagaatgtgagcttatttggagataaagtctttacagaagtaagcaagttaattggcgtttattagcgtgggccttaatccgatatgacaggtgtgcttacaaaatgggggaatcagacagagacacacacacacagggagggcaccatgtgaagatgaaggcagagatcggagtgaaatttctacaagccaagcagtgccaaagatggccagccaaccaccagaaaccagggggagaggtgtgggacagattctctttcatagtcttcaaaggcaccaaccctgccaacaccttgatcttggacttctaacgtctagaactgtgagagaatacatttctgatcaagccaccctgtttgtggtactttgctgtgatagccatagcaaatgaatccatctgtgctcttgaagttgccatctgttgcactggtagagtaaaaagaatggtgagcttctgtgcaccttttccaaatgccgtgttcgatgtttgctatcttgcaattggccgtggcagaagtatttatttattaaaactttttttttttggtagagattggggtgggtctcaggaggttgcccaggctggtcttgaactcctggcctcaagcgatcctcccaccttggcctcccaaagtgttgagattacagacactgcacctagtcagagagtattaaaaccacggaaatctacaaatgttacaaatcaggacttgctttgttgttttgttgattgtctagatagagttgagaaagcagtgaaatgttattaaggcatattccatgcaatcaatgtgtcatgtctgtagctgttacatcacgaacagcacaaacaatttgaaaaccatgatccgattcagccaactattcaaaatctgtattcaaaatcagactcagcaaagattccagtatctgaagaccataatcccactcggcaaaaaattgctcacgtcattgatggacaaatgaaattccgacacgtatctttgttgtttccttttttttcttgttaatgtaaatgaaaatatcaatataggtatccaaacaacacttagagagcctgttgtcaatatttagcagcccaccactaatgtggggcggaggaggccagctctggcccgcccaggactgaggggcccaaggctgcagggcctgcacgggtgggtggaccgactgcctgcgtttcagctgctctgggtggaccagttccagtgtctcctccctgggagtggggtggggggctgccttcctaccctctaccctgggaggcttctgcagggtttctgcttggttcctagtgatctccggctatcaggaccctgtggtgttagcagctgaatttgtttttcttttctttcttttctttttttttttttttttttttgagaaggagtctctctctgtcacccaggctggagcgcagtggcgcaatctcggctcactgcaacctccacctcccgggttcaagcaattctcctgcttcagcctcccgagtagctgggattacaggcgcccaccaccacgactggctaattattttttgtatttttagtagagacagggtttcaccgtgttggccaggctggtctccaactcctgacgtcaagtgatccgcctgcctttgcctcccaaagtgctgggatttaggcatgagccactgcacccagccagcagttcaatttcttgatggggaagtaagagaagaaataaaaaatcaatgatgtaattaatcaagtaattcaataaatatgaaggcaaatacatgtaatgaaagggcaatgaaaaaagcaaactaaaaaaacaaaagagtggagataattatgcctggtctggcatgcaggagaggctgctaggcctagcattgatcgatagcctttatcttgtcagagcagggctgagtccttcagctaccctccttgaaatataaatcgatcccctcactcccttttgaatccacccatggcttcctgcttccctcggactaaaattatacttccgttcctgtcttcacagcccggctctttgccctcatctcctttgcctctgtgctccagtcacaattaccagatcctagtttctccaacatgctgaggatattcctcactccgagcctttgcacatgctgttccttctgtctggtatgctgagccccaggcccactctttccacggctggctcctccttatccattaggaccttgttacaaacatcacctcctccaaggagccttccctaattacctggctaaagtgcattccctatttcatttcatcttcactcttttgttgtttaggttgctttttaaattgccctcccattacatgtatttgtctttgtatttattgaattatttgattaattacttcattgattgtttaatttcttaccttacttcctcatcaagccatcagctccatgaaggcagggatggtttctgggctctgtcaggtatgcagagcccagcttgaggcctggcacttggtgggtacttaggaaatgttcgttgaatgaatgaataaaatacattcactgagaaactgtatgacctagagataaatcatggacctatggtccaacagagatatggattcaagtcctgccactggcacttattgctggtgtgctctgggacaggttcctaaatctctttaggcctcagtctccctgtctataatcccctatgtaattcccttcaaatgattgttatggggattaaataaatcaatccatgcagttttaggaatgggcttggcacagagaggtgcttgggagtgttggatgccagtattcttataagtaaagggatgtgggactttggggttcaggggttcaggggttcagagcctgactttccataaaagaggacgggataactccaagaggagttcttggaagaaggggcatttgaactgggccataaaggggggtggatggcgtttctctaggcagagatggcagtagggaaatcaggagccaggagggacatctggtcccagaaagagatctgcgggcaggccaggcctgctcctggctggtcccagaaagagacctgcgggcaggccagacctgctccagggctgggaggaaagccactgggtgccagggatacgctcagtatgagctgccttgttctaggccacggcctctgcccccagtcttgacatttggttttcacctgtttcctctgggtagttgacacacagcagctgctgactctgaggaggcatggggaggcccagctgaaaatgcccccggaggaggtgactcagtagctcctatctcgaccctggcagaactcaggtaactcaagacacggggcaaacctgaagaggcccccagagctgtaccaggaaagctctgcagtgtcatggaacacatggaagtggcctgatgctactgactcacagaggcttggtggattgctttgagttgttttcggtcaccctccatctccttgtctgtaaaacggggacaggcactcctcagaactgctgggacagtccggggagccttttggttggcacagtgtgtttcagagtggttctctgtccccccgccccaggcatcctcatgtgattcgcttgaaaacacggcaggacgggtcctgtcattatccccgtttcacagatgaggaacactgaggctcagaggagggccctgacctgctcagtaccacatagctggagagtgatagatccagggctggagtcagaccccagacagtgcacagatggatgatcacatattgacggaacttgggtgtgaccacaggatacagagagtggagaactgatctgatgaactgactgcaggaggcagggtaataccatggcctagctagccctcacctcttttctagaaagcatggtgaggatgggggtgctgatcctagggctggctgcggagcagtggcatggagaccaccttccagatgtggccagaatggaggaaagttttcctattgctctaatatgaggaggcaacactgcagaccagaatgagttaaaaggtcagtaatttatttttatttttattttttgagacagtgtctctctctgtcgcccaggccggagtacagtggcacaatctcagttcactgcaacctctgccccctgggttctagcgattctcctgcctcaggctcccaggtagctgggactactggtgtgtaacaccatgtccagctaattttttgtatttttagtagagacagcattttgccatgttggccaggctggtctcaaactcctggcctcaagtgatccacccacctcagcttcccaaagtgctgggattagaggcgtgagccatttcgcacagaccaaaggttagtaatttaaattctcctctggattttgatgtggcagatgtttactgagcacttagccacgtgccagccatgggtggtagcacttagcattgtctcatttagtccttacaactccatggatagatactgctatcacccccattctgcagatgagcaaaccaaggctaagggagataaaccaaccggtcagtggagccgggtaccgacccagacggtctgctctagagccccatggctaatcacgcctctgctgcctgctctgtgggctgttttctaagtaaatctaaggccctggtacccagtagttgctgtgcaaatatcgggttagcggatgaatacatgaattagtgaaaaatggcccaagtaaaataacctgtgagtaggaggtgattttagagaccatttagtcctccctgtagatgtggtaagtgtcttatctgcaacgccctagctgcacaactccttggcttccctctgagacaggtagctcacccccgaccttgtgggcagcaccagctctcagagggagcagagaggctgagcccgcggccctgctggagcacaagatgtcagagctggggacccttcctgcccctccacacctcctatgtgccccaagagggaaggagtctgcatttcctgaggccctccactgagtggggatgaggggtgggcaggctgagactgggcttacccagggctcaataaggggcctggagtcctggtgggagttctggagtcagactgcctgggtgggatctccgtcgcgttcctgaaccccctgtgccctatctgtaaaacccgcattataaagtggctccctgaggtcaggagttcgagaccagcctggccaacgtggtgaaaccccatctctactaaaaatacaaaaggtagccaattgtggtggcacatgcctgtaatcccagctacttgggaggatgaggcaggagaattgcttgaacccaggaggcggaggctgcagtcagccaaggtcacatcactgcactccagcctaggggacaaagcaagactccatctcaaaaaaaaaaaaaaaaagaaaaaaagttataaagtggcttccgcctctcggggtatggtgaggagtctgtgggctgattcctgtaatgggcctagcacagtgcctggttgccaggattacataatagctattattatcatctgcagccaccagacatagaactggacactctccggctccaccccttcatcccaggggtgctgggctaggtcccggattggtggtgagggaggagtcccagagccaaagccctgacctcacaaatgctccctaggtacctgatgaagcaatttcctgaccctgtctcttttcttccctttatttattttattttatttatttattttttttgagacagagtttcaccttgttgcctaggctgcagtgcaatggcacgatctcagctcactgcaacctccgcctcctgggttcaagcgattctcctgcctcagcccccagagtagctgagattacaggcatgtgccaccactcctgctacttttgtatttttagtagagacggagtttcaccatgtgggtcaggctggtcttgaactcccgacctcaggtgatccactcgcctcggcctcccaaagtgctgggattacaggcgtgagccaccacgcgcagcttcttcccttcacttttagaaggcaaacaaggcaaaggcatgtgccctcatttactagatgatctgaggcacagagaggttaagaaacctccccgagtgtacctagtgagtgaaggtcccagcccagggcctcaggcccagcccctgctgctccatcacaagccagggaccctgaggccagaggtcatgggggatggagcatgggtgtcaggagtggcggagttgccagcgggtagacaggaagtcactgggactcccttggtgtccttatcagggtgggtgacatctctggggctgtggggaaaccccggagcctagaggtcaggctgtcatcctgcagatccccctctctctgacactccttctcccttctggtaccccaaccctgtctgtactcaagcaggagactcgtagggcagagcaggcctgcaggcccatgggtgcggcaaaggtggcatcgactgttgggaatttgccatggggaagaggggcaagagggagctgggactgggaatgccagtggggtctgggctggtcttcaggaatggacctgggctgtggccagcagataacccttctttactgccttggggagtcagagagggctccagtccagacctggatccacctctgctcccatctgaccacctgtccacatccctgtttcacctcttgcatctcatctctacctcagctcctttgttcagccacagaatcaagctggcctcctcctccttgctccttaaacaccaatccctggtctcaggggatgtcccaaaggccgctttccccactatattcagtccgtgcacaggtgtcccttcccagagagcatctaagctgcccatcccacctccatcactctttcccctttcctggcttatttttgttccataattcttaccactggatttatttatttatttgagactgagtctcactctgtcacccaagctggaatgcagtgtcgaaatctcggctcactgccacctccgcctccggggctcaagcaattctcctgcctcagccacctgagtagctgggactacaggcatctgccaccatgtccggctaatttttgttatgtttagtagatacaaggtttcaccacgttggccaggctggtcttgaactcctgacctcaggtgatccacctgcctcggcctcccaaagcactgggattataggcgtcagccactgcactccgccgccactggatatttttaataattacttgcttattcatttcttgtctctcctacagttctgagggcagaggtttctatgttttcttggctgcaggatcccccatgcctggcacaggacctggtgcacagcaggccctcaatagacactcgctgaaggcgtggtgcatcccctgcctgtccacactttcatccatccaccgtctgtgctttcttcccacacttcctcacccatcaatcacccagaatttctcgatcccaggccctgtgctggttcttgggtttggtgcgctagcagggcacacggatcaggaaagaaagaattccgacacttagggattggtcccagccaagggggagcctgggggactatgggagaaacagtggggtgaggggaggtgagggaaggtttatagggtgcattgaggtgcatgcagcacctcgcaccaggcgtgacccacagtggcacctgatagagactttgtagaataaatcagccattgcccggatggcttctagaaggggtggcggggctcagacggtgttctcaatgttgaggatgtgatgcaggaatcagaaagcatctagaggaggggtacctgggtgtgagagcttgagaaacttcccctggagaattgccagactgagacaaggagtgaagggtgggacaggggccaggcaggcagggttaggggcgagtgggccaaggcctgcctggaggactctgctgggcaccctcccaggatgccttgagcggtggccgctgagctctttcctggaagaggcttccatccctgcccctttgtctacctcagttctccctctgtcaggtgtcctgcaggagcctggaaactcagagagaagaatgagcaggactccccatccccctcgcttcccgcctcctgaccccaccagctgctggctggggcctgtttttattacaggcaggtgagtctggcccaggattccaggcggggcctggactgagggaggaggcaggaagaaactcacaaagagttggcagatcacggatggagggcagcatctcccaacagcctgggcggccgctgagacccagagaacccaaggactcccctgggctcatccagcagcctctgcttcccaggagagaggtgctgaagtccacgaagaggtgaggggtggggggactcagcacctaagggtcaggttggcccctgcaaggacacctgggaacaagagagggtggcggctgcagtggctgtggggcagccggaaatggggcgagacagacaggcggagcctcacctggggctgcccgccagcccagacaagctcagactgggtgcctgtggccctgggaggaggtggaaggggaggagcaggccacacaggcacaggccggtgagggacctgcccagacctggaggtaagagacgggtgggggacaggggtgggaaagataagtagggtgccactgccagcctgtcccccttgaccttggccatccctcaggtctagttcaatgccctgagagtcccgatgtgtgtggcctggcccttggcctgttcagggtactgggcgtctctcagtggaggccctggctgttctggggttaccccttgcagtgcacagcatggccgggcatgctggcatggtggtcatcctagcaccgggaagctggcaggtgtgaggtgtgttcccggtgtccaacggacactgcaggacgcagggcaagggtgacgccgcggagcctgagcatggacgggaggcaggcggcaggacctgaagtctcctgcctgctttccgcagcgccctgagcagcttcctcctgggatcccacggaaaccggtttgggagcaggttggcccaggtcgtttgacttttgactggggaggagaaggcagcctcccttagcgagccaaatggaaggaacagggtgcaggcctgggggggcgtgcccagccagcggccagctgagggtcccctgctccccccagctgcctgcacccagcatcacagccctccctcccctggctgcaagaggcaggaggagaacttcaaacggtccctccctccaccggctgcttgtcttctctgggccaggcccctccatggtggctgaggactctttggaacagggaactgtcgtggaagaaagggcccggccctgccactgcctcctgtgggaccctgggccaggctcccctgctgtccaggcctgtttccctgtctgttccatgaaggagaggcaggggcagtggtctgtaaacccataagctgcagcagtaggcccctcccctggtctcatgggccacacacgccagccagccagaggtgggtgtctggagttgcgggtggggtgctggcgctgtgccctctctaccaacttggctccctggggcgtgtgggcagcaaatggcaccccccacattccctctgttaattaggcagcccctgctaatgagtggcttcatcattgctccattacgccttctgagccatctgtgccccaggacttagggggagaccctgggggctcctggctgctgggcacaggcacatgcagaaggcggcatttctgggatgtgttggggggctgggtgctccgtgggctttccacaaagtagtttcaactgcagctcttcattttaccaagagagaagtggtggcagtcctggtgtccaggtgaggaaacggaggcgccctctttatgattctcccagtgggaagtctcttgtagccaacactttaacacattctgtgctgggcactgatggggtgtgtatgggtgtagggagtgggggtggaggtggggtgcacggggagatcaaagctgacctccaggaacactgtggcatcgagtgagatgatacacagtcctttcgagttggagcaagtcctgccatctttgcacactgctgtgccaccttgtgggtagtcactaaacctctctgggcctcatttggctcccttggcacaggagcgacgatgcctcactgcctgaccagaggcacctgacaccaggcctggcatccgagcagctgccactcagacctcacaggccagggccaagggagctgctgatgcaagaggcacaattttaggggcaagagcagcaagtaggatggtcttgaggtaaggggatgctggtgaccccatgccaaggctgggacccctagttcaggaagggaggtttctacagaggagtcagaggcctcttctgctgccctctccactgggggaatttggattttaaaagagaacccaagctgggtgtggtggcctacctgtaatcccagctcctcgtgaggctcaggtgggaggatcatgtgagcccaggcgtttgaggctgcagggagctctgattgcatcactgcactccagcctgggtgacagagcaggatcccgtctctaaaaaaaaaaaaaaacaaaacaaaaaaccagagagagagtggggagtttatgctaaaccaaagatacagcagtggcagtgacagaggctctctaagataggcggatacctccattttacacaggaagatactgaggcacagaaagctctaatttggtgcaaaatctcatgattggctattcagagggcttcagggtgatgctgggtggcgtctaggtggagtgatgggcagttttgagccccccaaccgctggggctcctccagacaaggctgcttctagctgggcgccaggtagggatcatcccaggagccacactcggaggaggggctgtgcttctggctccaataccctgaggtgcagaggacaccgtgacatgcagggatgtgtagagtctcaccgaagaacccagacttctggacgcccagccgtgcacactgcaagaggggcccaggctggcaggcatgtgattgggtgagggaagggcttattagaggtggctcagccttgctctgggctcaggggcttctgaaggctgggggcaggggtatggccagaatgacctgttctggatggatccatccttcctgccaagtgctcttgggaggctaggcaaaaggtcagacattccgtcatgcttaggaagacggggcggccacactgtctaccttctatctcaggcagcggggcacccaggcatgccttccccgctggggaggtcagcaggcgggggtggaccttggaggcccagccagcctgaaccctaaggaactgcattctgcagtggccctttcccggcagggcagggacagggtgaccctgggggagggagaacgtctgtctgcatctggctcaaggccatttcttgttggcatgtggtcaagttgccattggaaccaagaagatggtatggaggggcaaagcaggacttaaataaggcagctctaatcctgtgtgacctgagtcagtccctttccctctctgagtctcagtcttctcctctcacaaatggggcaaatcctccttgacagggttgtgggggaaaatgcaagtcacctgcctagcacaggataagtgctaaacaggggttcacctgctccaagtctagaaccttccgggggtggggtggatagaggccagtgctgcagccaggtgtggacgcaggagcccgactggcatccggggagtgcctcctccctgaccacaagctccagcgcttttgaaaccagatgcaggttaaacatgggcagggcacctgccgaggctccactcaccaagggagccagttagatggagtctgtccttggagctccaaataaggtatcagaaaatgtcttggacctggtcatgctcgcccctcctgtgtgcccggcctttcattctatcatctgagctggcaccaaggcttgcatcctaaggctggtcctgaagcaccactagatttgtcccgttttagcgatgaggatgaccttgcttcccccgcatcttggctaggccaggctccctgctctttccctgactgggggatgggcagtgggtgggggaggcgggcctagggaaccagacacacagctccctttgtgaaggcggctgagtcacatgtgcaacgcaatccctgctgggcctgggccctgaggcgggtgtgatgggagatggcgttatcatgggactatgggtacccccacgcctgtgtccaggaggctttcccacaggagatagcagggaggtggctgggaacattggccgcaaaacacatggtctgagatcaggtcctgactctgttgccaacttgctgcaaagctttgggaagttcctctctctgagcctcagttttcatctctgttaaatgggaacaatcatcactgttttgtagaggaggtagtagatgtgaaagggttctgcaaactgcaaatggtggagttctgggcctttggcattcatgtggactttatcataataataatgatgttggccaagatttattgagcacctactgtgtgccttgcattgtgctcaatgatttatatggtcactcagcttgcaaggggagaagcctggatatgaactgctcttgtctaaaaaatacccacctctgaggctgggcgcagtggctcacacctgtaatcccagcgctttgggaggtcaaggtgggaggatcgcttgagctcaggagttcaagactagcgtgggcaacgtatcaagaccctgtctctccaaaaaaatacaaaagttagcctggtgtggtggggcatgcctatagtcctagctacttgagaagttgaggtgggaggatcgtttgagcccaggagattgaggctgtagagagctatgattgcatcactacattccagcaagggcaacagagcgaggccctgtctcgaaaacaaagaaaaaacccacttctgagcaggcagtggttgctcatggccatttgcacaggtggggacagctcttcactgtttgctaggctggttcccactaaatgctgctgctctggccagagggttagagatagaaaaaggggctgaagacctcctcctagccctcccagccccaccatgtcttcctactcccccaggcctcagtcacagcagacaataaggatgccctaaccccttatccctgtcctgaggctctcatgttcttgaagatctcctcctacctccccggcagcctcctctctacctcctttgcaggcccctctgaataacagtgccctggccaatgcattggggtgcccattgtctgccaggcctgggctgcaagatttacgcatgtggcctcatttaatcggcccaatagaaggtgctattttggtccccacttggcaggcgaggagataaatggatggagagatgcttgcccaagtcatccagctggccggctgggagtagaggccagctggcctgaacccagagtctgtgatcacagactccgggctcagagagggtgcagcagcattgccccctctcctctgtccctcaaaacgaagggtttcctgcaccttcagctttctgctttccccacaccatctctggactccgtcgccagccaatgatgccatgaccttctctgggcctggcgaccccagtccctcactgctgagccccaacgacgtgtttccagctgccttgggaagcaggggggacctgtggcttccccacatgacacagagctgcccccattccattgcacacagggcagtctcttctctgccttccggatctgcaccccatcctgtgccccgattcttcagggacgtttcagacatcttccccctctcctcggtccccaccttcacttgtcgggttgtggggggtggggtgtcccagcccttttcctggtctcttggaccaaagtctcctcccccgctcttcccccatctgcctccttcgaggccccatccggacccaacttcccctctactcctctgcccatccctccgcatcattgctggtacaagtccctggcgtctagaccagggcttctcacacctccaattctggaatcccctgggcatcttattaaaatacacattcagattcagcaggtctcaggctatctgtaggtctgaagaccacattttgagggctaatcaggcctctccctacccaaacatcttctctggctccccagtacctttgatttaagcccaaactctacactttcaaaatcttccagaatctgccccttgctgcccagttagatcccacttccttccaagcatggctccatgccctacctctccacctcagccaatgctgttccctctgcctggggtgcccttcctgctggtctctgtttatcgaagcccccttcttctccttcaggtcccagcaggggctctggggtctacacgcttagttcagatcctggctgttatagaaaggcgtgggtagccctccctgtacctcggttccccttctgtaaagtggggatagactgttgtgagaacagaaggagaagatgaagtgcctagcaggggccggatatctggtgtcccgtgtttggttacagcccacacacctggaggcccagccaggtccaagctgtgcgaccttggctaagttacttcatgtctctgaccatctctaacatacaagtggtacccaacccacagggttgtgtggataaaatgagaatgatctgtacaagcagagcatcttacaccataaaacctccagacatagcaggtgattattagtcctgttatcagcactcataacagatagtgttgtgtttaacaagtcattgaatttctccccctttactcccagagacccctggatgctgaataccaactccaggtatcgctactatgagaaccaggcttgtctctctagccagactcagagctgggggcctgcttcctcacctgcctgcccctagctcatagtaggtctctgcaaagtccgacggtgagagaggcaggcagagctgggcagccaactccgcccggccaggcagccccataagcctctcctatgtggccagagtggcagctggctccgcactctcttcagccatctgcagagagagtggtgccttcaactctccatctgtgcccttctggtcagcacgctctgtggggtgtgtgtgtggtggtggtggtggggggacagctgccctgtgggcctggtccctggggaacagctgaggctgcccgggttaccagttgatcaggccctgaaggactgaccttggggaaactgaggcagaggtggtggtatgtcagggacaacccatcctcccctagataactcacttgtcctcccttgttagtgggcccccagtgtaggctggcctctgctgctttggcaataagggagttcccactgcagccccgggagagagcagagggtatgacatgggcccagtccccactgtgcctccctgccccaggtattggcccacagcctggactggggactgtgaatgtgggaagcacagtgccgttttctggaagctctcaccttatggcctccctgcaccccacggggtggctttgtggcccttcctttctgcagcttgatttcaagcaggtaggtgaggagtgcagttcacctgcagcagccctggctcctaggctgcccgagacgttccattcattcttcctccacgtggcatggggaagcttttcctggcccccttgtttagaaggcagatctctaccggagagaaggaatctcaagttccccaagcatccacgtgtccaggccccaggctgaggcctggggtgctggattgctgagtggttaggagacccgctatggagccagacggcctgtgctcccgccatcccaactcgggcacctccctgctgtgtgatcttgggcaggttaattctcatctctgagctacatgtatctgccttaagctccctcttcttcatcaccacattcacagggagtatttattgagggcttggcaagtaccaggcactggtctgagtagcaggtttgacttctctccactgccaggggcgctctggagctggaatgcagacggtggtcagcgagtgtaattactgttattgtcaccactcacccttctggcattgtaaaagcctcccagcacatctgactgaggaatcatctatcctcattgctcggaggaggagggcagacaggagcctctgcagggagtgtgagttatccaaagcctcctgactcgagaagggcactgaaccccagcagcgggaggtgctgctgacagaggaatgaccagaagggggatggggcatggtccatttccacacttctctgtctgagcttttggggccactgggaatggctcttcacccaggcctcggtttcccctttggctcagcagatggattaaaggaggccgtttccagaagcccctggggtctcagaatccaaaatgacttgggatgttgaaactgtgggtgcttgaggagcactgagaggggagacgggtcaccccccggggggacgcaggtcagccggtcagtcgtgcgtggcctggctggcctcctgcccggctgcctgtcacccgctccctcccgactgccttccgctctgccggtcagcactggctcccgtcggctgccaaggaggctggactctccttcaggaaagggcagttgtcgccctgacctggggggtgggcggacagcatccaagggccctgttgccgtggcaaccccggcctctctgtgggaactttggggagactggccctgggaggcgacagatggaggctgaggaagcagagtgatccccggccccttcctgtccctgaacactgtctgcctggatgaggggtgaggctgaggtgcccccttgcccggcgctgagtcatgggcatcccccaggatcactgcctcagcgctctcagccctgccccctcctggtctccctctgagaaatccatgactcacatatatcgtccgtcatccccagtcaagctcagggaggagggaggagcccagctggggcaggagaggggtgtctccccaccaaacaaacccggtccctccctctccgcactagctgtctgccctgccctgccgtaggagatgggctgggagcctcccacgctctccagctcactcggcaggcagcggggaccagggctggcaggttaagcctctgggggtggatcctgaaaggtggtccagccgcctggccctgcgtgggaccctccacctggcagcaggtacccaaacaagggctggacagcaggtgggaaggggaatagtgtgagtgtgagagtgtgagtgtgtgagcgtgagtgtgtgagagtgtgagtgtgtgagtgtgagtgtgtgagagtgagtgtgagtgtgagtgtgagcgtgagagtgtgagagtgtgtgagtgtgagtgtgtgagagtgagtgagaatgtgagtgtgagtgtgagagtgtgactgagagtttgagtgtgagagtgtgagtgagtgtgtgtgagtatgagtgtgagtgtgagtgtgggagtgtatgtgagtgtaagtgtggatgtgtgcatccgtgcacgggtggctgttggacagtgggtagggatggtggtgaaatggggaaatgggggggtcttggtatcttggtgggatctagtccaggtcagcatggctgtgggtgggtctctagagtgggggcggacccacaaggagatgcctgggaggggactggggcccaaggggagcgacacctcccggggctcccaggcattttgttgctggagaaactgaggctcagagtggtacagtcactgggcccagcaagctggggtctgctctttaggctgtgagatcagtgctcctactacacagatgggagaaccgaggctctgggagggcaggtggcttgcccaaggtcacctagcacatccaggtatagaaagccaggggccaggctcagggagggggtggcacttgagggaactcctgaggacagctttcctgcagctgtccctggggctgggtccggggtccccactgagcaagggacagccgtgctcttcatcaccaaggccagctttgggagaaggtggccccgcagggtctctgaacgtgggccacgtgggtgagagtcctggaaccggtgacaggcagacggggaagcgcaggctgcgggctgaacaccctgcccgttgccaccagacctcagggctccatctgcctggcactgataggacttcccaccctggtccccgcgggggctgggagtgtgtaggaaaccaatgattcctgtcctcccccgtccccaacccacctcccctgcgtggtagagttggggtctccctgtgccccactgggagaggtctgatgttcattttactgcgtagggaggaggggatgggtcaaggcaggggcctcccacccccaccaatgtggagcagttgtagcctggggtccacgggctgtgtaggaatagcctttgttgctccttcagtggaccaagaaagttatttatagaagcatttattgagcgcttactgtgcactctgtgctctgtcgggaacatggccgtgggtgaggcaaataaggtatctcagaactcgtgagtggcccagacccagagccaagccccctgcccctcccagaggatagccccgggcagcctgttggctccttggggtcagagactgtgtgagaaggagcatatctgggcattaataaccatgggctgccaagttggctccccagagcccaggcaggggtcctgttgggctctttcctgccaatgtccaggtgtggaatgagctcttagggccagacctgaccccttctttgctgcagggacccgagatatgcacccaccttggtcacagcatcactgtggcccccttgcccttcctctcctctcgcctcaggagctcagctgctaaatgggtgtgtaggggtgatcacagctgccctggctcccgtaggcctggggcttggctccgagagtgtcgggtgatggagaacgccgctccaggtgtgatctgtgacggacaggctgtgtcccggcctgggccactgggcaagggccagtcagcctggtgtgacacttccttttgtcagggatacaaacaaacaaacaacagttaggaggtgagatggaggcgtgagataagcttgctaacagagggcccagagaaggggaagaggaccagggagcctctgcggaaggcacttaggctgggcttgggagaaggtgggaggggaagggactgatgtctgtatgagcactgtagggggagtcctagtggaggaaactacttaggaaaacatttggggaacgatacaagctggggaccacggggagggtgataccggacccctggcatgggtcatttcatgggacttgatgagccaggccagcaggtctcaatctgctctgtgggggggaagagaggcaggaggactcgccaggcaggtgctgtgtggggctgggggcccaggctgcaaacccagcaggacggggagggccaggatgggtgttcagtgtgaggttggccaggcagtcccagtctctggctgctgggttaaggctcaagcttgggagcagcttcacgtgtgagggagacgagggggaggtggcgcccagtcgaggggaaggacaggagagaggtggcagagctgcagcagggttggtgtaggggttggcctcctggcaaggcccagcatgacaaaggcaggtaagaggagtgggcaggacagccatggagggaccactgcggaccgtcctccagccggactgggatgcgggttccgccatcctgtgcagaagctgtgtgcaggtggggtctggggggctgtgccatttcagggatgcaggatgggcttccatgtggcagggctcccagggaggccatggaggaggccgtggggaagtcgggtggaagtagggaggagaggggagtgtgacaacagagccccaaaccccagcaccacctcctcctcccagactggagcttgatcagggctcagcccccgtccccatgctgggggtggccctgtggaccccgccttctgactcacagcagatggggacatcatgtgagcaaacccagcagtcaggggtgaccagacacagcaactgggcagatggcaaatggggggcggggcgggctggcacaaaggggtctctcaaaccgggtggggcggggctgtggcacggcctcagcctcccaggcctcctttctcctgagccgtcacttggctgagaccctgcccctcctcctgtctctggtgccccatctggggctccttgaggcccccaggggagccctgtagattctggtcttaggtctggactgctgggtagaggggccaagggttggggagtaggaagggacacacattttctgaccactgcccagtgccagcctgccctggcaggaggtcagctaagccccaaactctccctggttccctgatggctcagcctggatgggagcaatcctggaccttccctgacctcagattctgccaggccctgggctcagtgccttgcacacgacacccacttttcagatgaggacattgaggcaggggaggcttacccagtgagcaaccccacatctttggggatccagaatttgggctcttgtcccttggtggagaggaggctcctcagccagccaggcacatgctcgtgtcttgaaccctgcccctgccactgccaaatccacgcacctgtagggtgacagggcccgtagagacagcaagggtggcttgcccagggagaatcttggctttgtttctctctggttgtgggaacatgggcctgtgcctcggtttcctcatctgtaaactgtggatcacaatcacatctgcttcagaggctattatgagcatgaagagagttgatagaggaaagcatatgggaaagtgcctttcccatacgtgggaatgttaagcctttttttaatacctctcccattggacagatggctgtattgaggcccagagataacctgaaataactgtgagcacttctccctgcccccgctactgctgggagagctgcggccacctggacaccagtggcgctcactcacccacctccagcctgactcgtgctttggtgaggaggccagtgtggtgggcgtcgggctcccgagctggcgcctgcgcaggctcaggcagtttgtggtatgcttggcagttccaggcagagataaaagctcagccccggaggagctggcatgcttccgggcaccggtggacaggcctctctgcattagtgggagatggcctggcggtggggagatggccttgctgtccaagagccagcccaaccctggtggcctgaaaagttctgcggtgaatggctctggcttggcttcccagactcggggccacttacaccaactgcaaaacaaggaacagtgagatagagagccgcctctgccacctcccaggccctttcccctcccgtccccaggtctctgtcctcctagtacccccagcctggatgctcaaggcccatgggggaaagctgacttttgagaggagctgtggagacttgcattccactgccaaagatgacagcttctctggacccgtttccctgcctgtaaatggagataacaatacatccctttgcagggttgctgtggaatttggggcaaaagtggctgcaaagtatgtacctagcacagtgcatgacttcaagaggttctccctaaacctcagctggaggtttaatcttccaggtcatgggctcattgacttaggctcaaatccttgaaaaatgacttagagcaagcggctgaatttctcacaacttcattacttgggctgtgaaagtctctgatacctaaatgcggctttgtggggatgaaccgagacagccacacgtcataggggctcatgagacgcagaccctgtccccagctgtcccagacctttgcttttccatccctcagccaggctgccccctaggagaggcagcacgaggtgggctgttaggggtgtgggctctggggctgcctgattctgtcccagctctactggctgtgtggcctgggacaggtatattaacctctctgtgcctcgtcttcctaattgtaaacatgaggctggtaatggcatcctgagaggattaagtgagcctctgtattttaagtgctgagtgcagggctgggcacacctcaagtgctattgtaattgccccttctgggccatgaccaagccttgttcttagagagcattggagactttatccggaacaatggtgccatcctcccaggatgttaccgggaaaaccaccaatcctgtgacagcttcccctttggacatgcccattcctggggtcttgatctgctgccccgaggcattgtccagcctgggactccttcatgttccccaagacctgagacctgacccaggttttggagtgagttaatgtgaccctgggctggggagctgagctggagccattacccacagaaccgccgacctttcaaaggaccagaggccatggccctagccctggagaggaggcctgggttccagtcgagctggtttcctgggacagaacagcactgtggtcacttctctgctgggtgagttcaccctaggcccctgggagctaggctgagcagctgaccccttctgggtccttggctgagtctgggcctcagggtgtggctctgtggctggcaccctgggtctcggaccctgtggcagggggtcagacaactgcccagacccacctgctttgatggtgacagatgctaggggtgagcccaaggggctggcaggggcccctgagtcatgctcagccctgtgccctctgcccactgctcctctgctgtgtcaccatctgggcacgggccaaacagttcaggggcgactcacagcccaaacttccgcccctggggcatacacttcactgcctacaaagaccctcattcaatcttgagtgctgctggccctctaagacttgaaactttatccacatttcacagatgaggaatcaggcccaagagctcggagcagtcagtggtagcagagcccgaacccagtctcctgcctcttagcctggacttttccccagagtaccacagatggccattcccatgataggtagtgagttccccacctttgtaggtgttcaagtgtggcaggggcgttgcagaagcaactttggcatcgcatggggctcctcttcatggctgcttccagccctgagctttcctagccttgggggagatgggcacccaattcccacattccccggagtcgctatgtccttaagcatcacatgggtctttctagccgcatcaggccatgcttgtgggcaggtggtgcctctatctagaaaccctcttcatagcctggctgtctggcaaggttcttccaaggaacctccaccatgaaagccatgaatgcatcttcagagacccctgtccatgtgtaaatagctcagtgggctggatgggagggagcagagggggagagggacccagctgaagaggactggagtgaacagggagaggctgagggaggtcaggagggcaggacacccacctcctgaatcttcaggaccccttgctctcccttatccaacaggcttgaacctgaataggggcattcctgaccccatggcacttcccctgccccccacctgcctagagccatgggcagtgggcaaagctggaagaaaccctcgtgcacagcttcctcaaagctgtacttatcctatgccatggctgtcctggccacaccttctgggggactctgccacctgtgtgcacacctaggggaccaggtgcacacggtctgtcctccagctcctctcctgcctgcctcctggcaccttaagtggaggtggtgggagctgggaccagtgcagcacccttgccagccatggtgggggaggacagccagtgtctcttcatggagatcctgcagcaggtggtggcatgccccagggtcccgtctctgtctacctacctgggtttgggaaactggagtcagaacctttagtgattgcgatctaggaaggacggtagtgtttgcaaaccacgtgagcacaggagtgagcaaggtccaaccccgcccctgttccctgggccgtgaggctttgggccctgtggctcagcccctctgagcctccctttccctctctatggagtagctgctgccgactctccatgtcgttgccagggcatgcaggacaacagaggcagcccagggaaaggagtgcaccatgctcctttggatccagttttacgagctctgtgtccctgggcaagctccgtgtccctgtgtccctgctataaaatgggaatgatagtacctcctcatagagtggccctggaagcatgggaggccaagtgcatatcctatggtttgcacttgtacgtggctccctgccctgccccagctctgcctcgtgagtctctgcagactagtcctcgggacacaccccacccccagcctgctagatcgcaggaccccatggccataggcacgtgccctttctcctccttgcttgaccttggagagcccatggggagcccaggtgggagcttggggtctgcagcaatgggaacgggacccacttttctttgcacatctgctacctgggctccccttaggcccgaaccacaggagtgggcctttgagggtcttgggggtggtaattttgctttaatgtagagagaaaatccaaggttcagtgctcacagattcagatggaatctcagacatcttctaatccagcagccattaaagctgtctgtggccccagtggcataggaaaggcatgcgctcccaggcttccatgctgtgggacttctcagagcctttatcgggaaaacaaaggggagtttgccttgtgtttcagatcctatcaggctatgcacagtcttgggaaccgttctctggccaagcagccggcagaggtgtgtgtgctcctgatcctgttagatgctggagagtggagatggctcagtgcttgaaccctctccatcccctatcccctacccctcacatagcctgagtggcacttttgggttggatcttctagatcttctatcaggaatggctatctagtatctatcaggaatggctccttttgggaagaggtgtggagcctgcctgccctgggttagagtcccagctccgtctcagtcttcatttactcatccagcagtcactggggatcttctatggaccaggcactgtgctaggtactggagatgcaggtggtgagcaagacaggtgagacagcaaagctgagcaagggataacaggtaagcaaatggcagagtcatgtcaatgttgggtgccaatacgggtaataaatcacatggaagcgagtgatggatacggaagataattttaattgggtggtcatggaaggcttctcagaggaagggacatttgagttgaggcctgagaaggaggcagtcagggaaagggtcctggaaaggatgtgctatgctgagggaaaagtgcacgcaaagaccctgaggtgtgtctgaggacagaagtctagagtggctggagttggcgactgcaaggaagggatggggtggcgtaaggctgggggacgggagtaggcttgtggtcactggcttgtgatttcagcagtcctgctgctccctgagcctcagttctctgacttacaaaatgagcttcatcatttcagtccccgccccgaccctggtcgggaatgttgtaggtgtgaagtaagacagtgctttggcttttggctctgggcagcaatgagctattgcagttatttttattattactatgagtgggatgtttagggactatgggtggggctggggaagctgtgcctctgtttctccgggttgctgttgtaagtgagtgccaagtgtatgtaaaaggcgtggtgtgcctcgtctgtacctccccccaggtcccctgaaccacagccccttgccagctccctttaagcacaggatcctttgatgcaacagaggccgccttctccggccagcaagccttgtgagcctttccgggagaaggtttcaccagagaacagcaagtcctttctttgctttcttttcctcttcctccgggggccaaaaatagggcctgaatgggacccagctctgggcctgcagtgagacaatagcagcctcctgactgaagctgcctcctggctctgctccacggaggggcgggggagaaggggagttgcagagacaccatcccctcagccccaagcccctgctgcctttcccatggcctctgccagaaatcatcccaaagccccttcctctgttggactcccctcagaatgtgattgccagtggggttccccacttgtgctctgagaaagtgcttgtagctggttgactgagaccccaggaccttttgcacccctgagcaaccccaccctatctgctggcctggaaccgaaaacctcggtgggggttctaacccctggttcttttctgtgccctgtctggggcgtaccacagtttttatgtccttttccctttgactcagtgggtatgaaaaacttagagatcaaaggaatgtgccctcttggaagagagcgagctccctgtcactggagatgttcaaataaagttggctgagcattgaacgtgggggagagttagggattagccaagtgccagatggacaactggtcttgatagcttcatgtcccagagaaaatctccatttaaattccatacccttcccttaccagctaggtggctcacagcaagtcacatcccccgagtctctgtttcccaatctgtaaggtgggtcccctagggctaaccttgcagagtggtagaaatggatctccaaaatgcccagtgtagttcctggcacacagtaggagtttcagaagctctgcctctattttcctccttccccagactggcaaaagagaatctgagctcccagccccgccccgggagctctagaaggaagccaggaggaacctccaggcctagggctaactcagaagggggattcttggtaggctgtggcaatctgaggaggcttcctggaggaggtggaccctaaggagttttcagagaaatatgatgcacacattgtgctcacaaaagccagtggtgggattagagggtgttcagcttgttttgagggcagggccacaggctggcagcttccagaagcaaatccagctactgttaggcataatttggttactgggtggcctgcactgggttctaaaaagatttggttttgggccaggcgcggtggctcacacctgtaatcccagcactttgggaggccgaggcgggcatatcatgaggtcaggagttcgagaccagcctggccagcatagtgaaaccccgtctctactaaaaatacaaaaattagccgggcatggtggtgggcacctgtagtcccagctactcgggaggctgaggcaggagaatcgcttgaaactggaaggctgaggttgcagtgagctgagatcacgccactgcactccagcctgggcgaaagagcgaaactctgtttgagaaaaaaaaaaaaaagatttggttttaaagtcaatgttgacaaacttgcagatttcatgtaaaaacctggggctctgcctctctcgagaaattggaagctctggctctttgtggtcccttcaagacaggcaggtgtccccggggctccccataaatcgctgtcctaacccctgccctccctcctgccagctccctgtctggcctgggcagcgtctgagttgaggacttgggaacaggacaagttacggagccacgttgctttgctgggtctgagccggggtgtgacgtagtccctgcagctgccaacggttgccagggcaacggttgccaggggctgctgtcacctgcgccccttctcccgcgctggcggctggggcttctcagcctctattccctggctgtcccctttgtttgaagctccagtgagggagcagtggctggggtggcccagcttcaaagtctctgtcctcttgaaaaaaggtggtcgggggacattgacccaccagccccgcaggctactgcctgcaaacaagaacccctcatctgccacgcacgttcttaatgtatctatagtctgcctgatgccacaaaggagtccaggtacgattctcccgcctcctctcccctcctccccgtccctttcactcctgctccctctccctgctccccgcttctcccctgtcttcctccttcactccccttcccctccagctcgcctccttcctccccatcccttcccctttatctttttcctctcccgtgcattccccttctccccagcattgatggtgtagccagtgggtgggggtgtggtggcactagggaccctgggggggtcagatggtactccaagggacttgggcagtttaagacagcagcctcaactacaaggaaatagttgggggtgagagctccacacccgtccctgcagcccagcccttgctgaagattcttttgggtccctgggctgcacccccggtgtcagaaacaagcctctgacaagtccagggcgtgaggggactggaagtgcaggaaagagccaccagtggggctgggatccaaggtcacctgggtgagttctgatgggctccctgatttgggcccttgggaggatggcgtccagctgaacccatggaaacacattgttggaagctttctttactgtgacttttcaagagatgtgctttctaagagtcaggtaagttcaggagggaaataggcttgcagatggacagcgtgtgtcctggagccagccctgggttcgcatccaatcttcattacttgctagctgtgtgacctcgggcaggtaacttgacctccctgggcctcgctggccttatttgttgagtgggtgtgatggtacttgtctcaagggttttgaggaagcttaaatgcgtgaacatgtgtaaaaagctcacaatcctgtcttgcattttcgaagagcttaatgaacatagttgtgtcactggaggtggtgagcaccccgcctgcggggtgtgcaacctctgatggtcagtgatgctgtgctgtgtgctcaggagtggggatggaactcagtgcttctacttcccttccctggacggggcccaggcacagtcaggctcgggcccccagccttggtaggggagaactttgttcttctcagcctacttagtaggggagggtgctctcggcccctcagccagtgatccaggacctcgaggagggggaggaaaaaagaaagggagggttggtggccagcctgggaatgctaagtgtcctgcgctccaaagatgggagtttgccagacctggggtagttgaactgctaagcaaggagggaggtgactgggctgaccttgcgggcctggccttgggcaacgtgggaacacagatagggaaggggaacctcagccagacaactgaggtccggctgtggtttgagagggaagacagtctagaggggtcaggggagacggttcagcatcctctttgtcccttgctaccagcttggaggtaagctctgttcttacctgtaggcatcctgaagcctgcgggagcctggagggccctggctgcagagaaggcagtcaggggacaaacatcagagttgcccacttgacagaggagaaaataaggcccagagaagggacaggctggcctcaagattccagttggctgcagagcttgtctgaaccttatgcccctaactcctgccacccctgctctaggcatgtacattccctgggcaggtactgactggtgtgtgccctggcgcccaggaggctggcctcagctgctccttggagatggccaggtggagacttggccatgaacctctacgtggctgcagaccaccccaggagcataagctgaacaggcctggcaccagagtcttcggactgctggctctttggctctttgaggtcccttcaagacaggctggtgtccccagtgccttcctaatccctgtttctcctttaggttctaagtctcttcaatcaattctaaaagtccttttttttttttttttttgagacagggtctcgctctgtcacacaggctggagtgcagtggtgtgatcttggctcatcgtaacctccacctcccgggttcaagtgattctcatgcctcagcctcccgagtagctgggattacaggtgtgtgccactatgcccagtaattttgtttgtttgtttagagatagggtttcactgtgttggccagactggtctcgaattcctggcctcaaatgatctgcccaccttggcttcccaaagtgctgggattacaggcgtgagtcgccgtgcctggcctccaaaattcttcttttcttttttttgttaatttgtatttagagacaaggtctcactctgtcacccaggcttgagtactgcggcatgatcatagctcactgcagcctcaaactcctgggctcaagcaattctcttgcctcagcctcccaagtagctggtactacaggcaagcactactacccctggcttcaattccaaaattctaagagactttgattctcatctcctaaaactcttgcatcttcatattctttctctctcttttccaacatcctgagtgtcttagctgcttgagatgaagtcacaggcccagctggccacggccaactttaatggaatggcacacctgggacaggcctggcagtgcccttttccccacgagctggtgctgccggccgaagggaggtgggataggcctgaatataccccaggctcaccagggacctctttcctggaagtgtcagggatgatgatgagtggccctggggaatgcctaagtgtctcctctagctcatctcatgctagctaatgacctttgggacagctcaaaggggaagggaggggagggggctggaggtgctggcaggcttctgtgtggcgtcaagatttctgagagcttttttccatgtggataacaggtgtccgtgcaaaaaaggctctaccttcacgttgggttgggaaactgcccaaccaagctttatgggtttctttcctgcaggacttatcagagcctttgatatgctaatatacaacagaaagtatggcccacaagcatttctctaatctggggactagtgctccctgaaagtgctttggcaagttacctcatggtaaagatggggagactgagtcccagagaagagaaagaactcagaagaccacaatggctaaaagtttgggcttggaggttaggcggacctgagtttgagtcccggcttttctgcttatttgctgtgtgatcttgggcattacttaacctctttgggcttcagtttcctaaagtggggacactgatagcatttgcttcaccaagttgctgcgaggattgcatgattcatgggctctgctcatagggttactgtgaggattgaacaattaattttttgccaagtgctttgcaggatgccagcggctaattgagcacttggtgagtggaagctgtgatcctccctctcctcttagaatctccctggattccagggcccttttcactgcaccagataagacccctgtttagtcccactcatcatctggtgtcctgccaggcatggggactgggaggatgtgggggcctgaggccaggacactgggactctcacagacgtgtcacaaggttgtcatcacagggaggaggaccagtgtgtgcaaaggcttggaggtgggagcatccaaggccaggcttcttcctggctggatgactatatgttggcttctctgaggcctcttaagcaaatgcccagttccgcatatgggaggcagcagggcagccggctttggacaactgactctctgggaggacttggagtcccttcctatgagtgggtccttccctctcaggctggcagggagtgccccaacttctcccctttgtcactcttcccacagggtgtgtctgggcaggcagagggtgttgtggctcaagcacttggttggaccagaagccacggggacagtgaggcctgagctggcggtatggggggtggggggtgtccagcaggtctggtgtaagagtgtgaggctcaccctgggcagtgagtgggccaggcctgggcacctgccagcctccgaggcaggcagcttgcttcattttattctcctttattgtaggaaaattcctgaaaactgaagtcactctgcttctgccagtgatcctggaatacccctcttggggagctctctgtggtcacctagcttggacttccgtcactcacttggggagtgggaatgggggaggggagtgggaataggggaggagagtgcttctgcctttgcaagctgttatcccaggacccatgggtgcggctgaggggtggggggactgggctgggggtggggcgtagccctgagtgccacctgggtctgacaggggtgtctactttgagctgttgggtacatgctatttccaagtaagatttacttttattaaaaaagtttggaaaccgttggagggagggtcctctcagacgccacgccacccaccatggaggaaacacctgcaagagccctgctctttgcactgtgccccgccctccctgtccccttcccagctttgaagtctgttcctctgaggagctccccgccttctcttgctttctcctcctggccccatgcatccctgtgtatgcacgggcacacgcactcatgcacacacactcatgcacacacatgcacagtcatgcacgggcacacacactcatcacacactcatgctcaggcacacactcatgcacacaaggacattcatgcatgggcacacacactgatcacacactcatgcacgggcacacagccatgtgcacacagacatatgcacactaatgcatgggcacacacactcgtcacacactcctcacacattcatgcacatgcacacactcatgcacgggcacacacacccatgcacacacatatgcacactcatgcatgggcacacacactcatcacacacatgcgcaggcacacacatgcacacacggacacttatgcacaagcacacacactgatcacacactcatgcaagggcacacacccatgcgcacacacatgcacactcatgcatgggcacgcacactcatcacacactcctcacacactcatgcacaagcacacacatgcacgggcacacactgatcacacgcactggcacacactgatcacacgtatgcacgggcacacacccatgcacacacacatatgcacactcatgcatgggcacacactcatcactcctcacacacatgcacacactgatcacactcatgcagggcacacacacccatgcacacacacatgtacactcatgcatgggcacacacactcatcacttcataactcatgcacacacacactcatgcacgggcacccactgatcacacactcatgcatgggcacacacccccatgcacacacacatgcacactcatgcatgggcgcacacactcatcacacactcatgcacatacacacactcatgcacacgcacacacacccacatgcctgtgtaactcgcaggagttcatcctcaccctgccgcccgaccccctgggccaaatccttgcttccaaaggctcagcagctcagtgtcgtgccccagcagcccacaggagagcagctgcggacgggaggggagctagggcagtggaagttgagctgggggggtcttcccctctgcctctcccagcgagggcccatttaaggggaaggcctccaggtgggcaagactaggctggaacctggagattgcctccggggctccctcgttcctccctccttggctcccttcccaccccaccaccccccaacctgatgcctgcccttctcctgatgtctttcaggaagccccttccagggccccgctaaatgctgggggagccacagaggagcctgatgggtctgcgtcacagggcagggaagagagtgctggaacgcaggctgccctggccccgagtccaggccctaccatctagcagctgagggatgcggggccagtccctcccctctctgaccatctctaaaccagggctgctggtgcctttccctggttcataagcccgtggttcccaagcctgcagtatgtccatcaacgggatgcttgttaaagccaagctcccaagcccaccccatcagaccctctttgggccgggactgtgaatctgcatttcagctcactcccagaggaaggtctgacccaccggcaggcttgggagcctctgatgtgagcgcctgtggcaatggggggcgtgttgtgttgagggtgggttgtgggccagcaggaacatgcgttaattttggcaaggaatggacgggtaggtgaggcttcatggggaggacttgtcttagctcgtctcaaagatgagcggaatgtcacggggctaagtgctatccaaggcaaagggacaccaaggggcaaaggtctgtgggtgggatgcctgtgctcgggggcgggcagtggtcactgtgtgtaaagggaagaaggaagcagtggatggccaggttcgtgggtcttcccggcaggagacagcagagaggcgcctgcccgggaagggttaatcccagagccgtccaggtcctgtccactcaacttccacctccatcctctgaggaaatgggttttccaggagcttggcctgggcagcggtgactcgtggctccacacggaagtgactcaggtcccccgggagaaagcgagccgtgggtccccactgcccaccgtgcagaggggcagggctgagccaggtctggagctggagccctgggggtggggcgggggatgggctggtggtggggtgggggtctcagctcagacaaaccctggccaccttccactctgctggatccttggggaaccccatgatgtggcccccattgtgtcagactggactggcctgttctgtcctgtgtgtgtttacggaaggtctgaggtcaagggcggctgctctggaagctgggggttgtgggggcttccttgggcctcagccccagcaccctctatcccaggctggattctctgctactctccattctcctctccttccctttgtggggattctaaagccggggagttgggaaggatgtgcatctctggggcctttatcaatgccagctctacaaggagggggagacttggcaccacgctcgtgtgatctcagaacacacagccttccccagcctcagtgtccgcatctgtaaaatggtagcagtgagacccgtatcacagggtggttctgagggtttggtgtgataacgtggatgtcaccactaacattatcattgcgggggtgttgctagaatgccccctgctcagccactccctctggctctgtgtgagcagaggcagggcccttgcctgtggggccgtggttggtactgagcgcctgatggctgaggccctgtagcgctggggatctgcggctccagaggcagagacaggtcaggtcccaggggtctgtgcggagactcatgctacatccctggcgcctgggtgggtgggtgggcaggtggcaggtgtgtgtgcgtggggcagacctggaggggtggcataggcagggatgaaggaggggcgctaagtggacaagcgtgacagtgtccccctgcccaatctgtgtggcaactttcttgtccccagcccagctctcctgtcccaacgggcttctggaggagggaagttttctgggtggggtttaaccttccattgcactctcccggaaaggaagcttcatgctctaagaatttcccctcaaggtgctctggtgggtgagctggttgctgggggccgtacgggaagagggggaaacagggaggaggggcctgtgacaggcccagggggctgagttaggggcaggcatgagctgtttagaaagtacagagatacttagctgagactgatggcacctgcctctaagccgtttacaggtatcaattcatttaattctcacaatgacctttgagtgaggttgacttctttattcttctttactagtgaggaaagcgaggcccagagaaggtgagtaactagcccaaggacacacagctagtgagggagtcaggatttgaacccaggcagtctggctctagagtctaccccatgggttaaaggaagccagccagcccctcccctcaagcctcaagcatgttaatggagccagggctgtccaccttggagtagttgttcaaacagctgaggtggagtggggatgactcaggaagtggcagggacagttggtcccttgtgtgtgtctggatttcttccgtggaaccccatgttgtcgcttcacttgtttccttccaatgatggggagctctctacctgtactcccctcctttactctcaagggccaatccaggagggctgaagtgacgcggtggttctgctttgtccttcagccatgcctactgacagtgaaggctcactttgaaggtcagtaagccagggagatgcatggattctggccagttccttccttgcttgctatgtgacctcaggaggtcactggccctctttgggccttggatccaaattctccaaatgatttgtcagcttcgagtttacaggtagggagtggtggtagcagtgaggggctgcttggaggaagtggcatttgaactgacaatcagagggggacagcaacagagactgacaggaaacagaaggaaagagggggtccggaagggacatgtccctgtccccggatgttgggtttccttccagtggtcagaggtggcaggaggcagtttcaaaaggaatcaaaatgcttacaaatcacaacctgggaaatggtgcccttccctaaaacactttcacatccttcttctcaaagggctctgtgatgccaccagggcaagatgatgtgcctatttgacctacgactgaactgacaaggcctgagaaattggggttccattccacatggtgggacgcagggaactggctctcagtcgaaggggccaggtttatttgagggaggactggcccaggaaggagacattgagctcctgcctgggacaccccttcttttaatgctgctctcaatgatttggttcaaaagccacctcttcctgaaagtcctccttggtttctcttaaactcagactccacgtgtgttctccggcttgtggccgatgactgcctctgtcactgtggccagctgccgcgccacgcaggatgaggttctgtctgtgtctgtgagcacccagctctgccacagggccggctggccatagggagggccaagccttctggcaagtctacaagtgccagggccacaggttccctgccaggcactatagtcctgaccaggcagggaaagcccctggcctcgggagcatttttgggcaagtcatttaactccatgggcctcaggttctccatctgtgcaatgggtcaacagcagtgcccacttcagagggttggagtgggaatcaatgcagatgcaggggtgggacgggtcaacacagaggctggcagatagtagccgctcagctaatagagagcttagggggtcagatttgctccatccttgccagggcggggcaataccgagtccttgtccccagcagaaaccgtggtccctttgctgttccagatgctctggaccctgggtactggctccccctggcggtcatgataggaagcgcccttcccctctggctcctgtagagggcgtcgcggatgcattgatcctttagttccttcactgtccatccccacagcctttatccagcaacctctgtacagccagggcctgcccacagagatggatcaggtgctccctggctgaccaaggaggagggaatgcacgtctcccactacctggaggaggctactgggggtggggaggggctttggccagtggtgtgaaccaaaggaggctgggactgactctggagggagttgaggagggcttcctggaggaggtgtcctctgagctaggtctcaggaatgatgatagggaggtagctggggagaactctgggagcccccttttttctgtgttccctccgggcctggaggggcaaggtggtgacggttccaggtagaaccctcatgccagattctagataagataatcccgtcactctgggttcaggagggaggtactacgattagcccgattttgagtgacttacacaaggtcctgcagcgggcaaaaggtggaactgagactggaactcagctggactctggacagccactcccccgcctttttttttttaaagcagggtctcactctgtcacccaggctggagtgcagtggcgcagttatagctcactgcagcctcgacctcctgggctcaagtgatccttccacctcagcctccctagtagctgggaccacaggcatacaccgccatgcctggctaattttgtttatttattgtagagatagggtctcactgtgttgcccaggctggtctgaattcctgtgctcaagcgatcctcctttctcagcctcccaaagcgctgggattacagacataagtcaccacgcctggcctcactgcctcttggggagcggcctctggccgctctggggaggtccatgggctttttccacacttgcttccccacctcacctcccacatccatgccacactggcctcctcttctgcagggccagcccaaccaccacacagtccacactcccagctaacactcctggtctcttccaggtggtgacttccaagagtgactccgtcggaggaaaatgactccccagtcgctgctgcagacgacactgttcctgctgagtctgctcttcctggtccaaggcaggtcttcccaggggtgccctgggctgttggaacttacgttaaaatgcccctgtgcctagggtggctgccagcacacatgctaactcctttaggcagttacagctcggctagtggagggtaccttggagaaaagcaaaagacactccttccttctggcaggtgcagccctgcagtgcacagcttagggtatggaatatggatggggtactggccccactcacctctgcagccagagcattcttgtgcagtgtaccacctgcacaaccgtctatgtcagccatggcctcattaaatacttcattgctgttaaaaatatgttttccccttgaaattactattcgttttcagtttcctctttttttttttttttttgagacggagtcttgctctgtcgcccaggctggagtgcagtggcgggatctcggctcactgcaagctccgcctcccgggttcacgccattctcctgcctcagcctcccaagtagctgggactacaggcgcccgccactatgcccggctaattttttgtatttttagtagagacggggtttcaccgttttagccgggatggtctcgatctcctgacctcgtgatccgcccgcctcagcctcccaaagtgctgggattacaggcgtgagccaccgcgcccggcctcagtttcctctttttatagtttgatgctgataagttttgagtgggaaagactaacacatttttgtagacccttggaatgtgtgtgaatctcaggctccaggttcacatgtactcagcctaggtcctgtccccttccatgcctctggtcagcccctgccacggggtcccatctgcagcctctgcctcctcaggtgcccacggcaggggccacagggaagactttcgcttctgcagccagcggaaccagacacacaggagcagcctccactacaaacccacaccagacctgcgcatctccatcgagaactccgaagaggccctcacagtccatgcccctttccctgcagcccaccctgcttcccgatccttccctgaccccaggggcctctaccacttctgcctctactggaaccgacatgctgggagattacatcttctctatggcaagcgtgacttcttgctgagtgacaaagcctctagcctcctctgcttccagcaccaggaggagagcctggctcagggccccccgctgttagccacttctgtcacctcctggtggagccctcagaacatcagcctgcccagtgccgccagcttcaccttctccttccacagtaaggcaacttccaggcggagggaacaactgggcagtggtctagaggcagggaaggcaaaatgcaaagtggactgggctcacaatatcagatcatgaagactgggctttgctcacaggcactggggagccagtgaaggtgtctgaggaggggaggagtgtaatccaagtgctaggattacaggcatgaaccactgcgctcggccccactgtcccttgatggttactttgtgggcaggcaggggtgaggatggaagggcaagggcccgtcctgaggctgcagagaaggtcttggtgaaggaggatgaggtctgaatagggtgagagagcagagactggaaagggactgaagatcaagagccccaggaagaattcttcctcagcatcagtgtagactgtttatttcctttcacagaggaggaaactggggcacagagaggatgcccaaagctgcacagctagccaatgggagagccaggatttgaacccagcagctgattggagtggggtaggggtgaggggcggagtatgagaggtcaaaggtcaggaaagcagtggggttgactctgaggtccagaagctgcatcttcccccttgagtgtgacaggtacatgtggccactgccattcagcaccattaaatgctgaatggtggccaggaagggaggagcatcagaaggagcttgaaggtttactggggggttttcatgtctttccagcacctcaagtttgaggcagggctttcaggggtggggggcacagcactttgattgtgtcagtgtaacaggctaatgattatgtccagtgcaacaggcaggcccaggcccgtcagtggtggggggttccccacaccccaggctgggattctgccccgcaacctgggaggatttagggcaaagttgatcctagttgcaaattggcattctgaagaccagactgaacttggtcttgtttggcctgtagagggtttttaaaaaacatggaccagggatttcaaatcacctaaaacccaggctttctcggttatgcattcaaaagatggagctacccagggcctgccttcctcagtggcacagaaagtataccctccaacccccactgtttgtcttcctcatctgagtcccagctaatccctggagacaccttagtcggccgccttagtaggccgcccacgctacctgggcagaggggcccgagcctggagtcagggaggctggtgggtgtggagtcccaggaaccaccaccaagccccgcacatccctcctaaggaggcctggctgggccctctctgctccgtgtgtgtagccgaaggtgtctgcggagggtgctgagcaaggcacatcccaccccatcccgctggggctggcattgctggcgggttctgtaagacacaacccccacgggttggcctcatctgagtggccttggcagagtccactctgcttcttgaagcctcagtttcccctttgtaaagtaaagatcgaggcattcagagtcatgtcagggtggtagggggcagaatgggagggtcctgggacctgaatcggcagcctcggcgggggcctgtccacccctcccccaggtcctccccacacggccgctcacaatgcctcggtggacatgtgcgagctcaaaagggacctccagctgctcagccagttcctgaagcatccccagaaggcctcaaggaggccctcggctgcccccgccagccagtaagtttggcacctggggctgtgaggggaggcaggaaggcatcagagatctggacctgggcagggtgggacctggagtaggggctactgcgaggccttccctgggactggaatgcttctttgatttctctttctgccttctgggagtcaacacatgccccccaggctgagccctctcctgtctgagtcagtaaccaacatcacatccaccatcccaagccctcctccccctcataaagaaaggatgggtggtccacagtacagcccagcagaccaaggctcagagacggcagagccgctccaaggccacagagtaggttggcacaggcggagctgggcccaaacccatggtgctgagtcccaggacagcccccaccacaccattgctctcctttcccttggctcccaggtcctggcctcctctgtctgaccctaccccagctcattctttctctcccacacgcagatgcctgcttttctcttttgtctgctctccactctctcttgcccaccccacccctctctctgcctctgcctctgcctctgcctcttccctgtgtctctgtctgagtctctcgtcctcctgcctcagtctccctggtggcccggccccctccccaccatcaccaccgctttctcctccctgccaggcagttgcagagcctggagtcgaaactgacctctgtgagattcatgggggacatggtgtccttcgaggaggaccggatcaacgccacggtgtggaagctccagcccacagccggcctccaggacctgcacatccactcccggcaggaggtcaggggcaggcctgggcaggaagcagatgcgggttgggccggggccagatggaggtgggggctgtgagcactccctgaagctcagtgccgtcgcagcctctccctggggcctcccgagaaggttccaggcccgaggatagccatcctaagtcagtagttcaaccgtgggattgaggaccctgtgtgggcacagtggcagggtctgcttcctataccagtctcctggggccacccgtgtgaacagaagaccagcccctaaacgcctgtccacgcaccaccccccccgtttttttttttttcgagacagggtcttgctttgtcacccagactggagtacagtggggtaatcatgtctcactgcagcctcaaactcctggtctcaagcgattctcccacttcagcctgtgagcagctgggactgcaggcttgctaccacacctggctttaaaaaattctttgcaaggctaggtgcagtggctcacatctgtaatcccagcattttgggaggccgaggcaggcagatcacttgaggtcaggagttcgagaccagcctggccaacatggtgaaaccctgtctctactaaaaatataaaaattagccgggcatggtagtacatgcctgtaattccagctactcgggaggttgaggcaggagaatcgcttgaacccgggaggcggaggttgcagtgagctgagattgtgccactacactccagcctgggcaacagagcgagactctgtctcaaaaaacatttttttatttttgtaaagacaaggtcttgctacgttgtccaggttggtcttgacctccggggttcaagcagtcctctcgccctggcctctcaaagtgctgggattacaggcgtgagccactgcacccagccacacaccccatcttgagactgccccctgagtggctctggttagctgggaaccacccacactgcccacatggccacccccaagttggctgctgtaggcagagctggcatctgaagccccagacaacagaacatcatgtggttctcccagggctatttgccctggagtcctggattctaaccacaagactccccagccagagctggtagcagggaagggagggatgaggagggctgtcatgagtcaggcttgacttcctgaagaaatgggcttagaagtggcagcgtccaggaacggatgggtgtgtgtgtgtgtgtgctagggtggggggcacggatctaggggtccgcatttggctgagccctaaagggacctctgcaggaggagcagagcgagatcatggagtactcggtgctgctgcctcgaacactcttccagaggacgaaaggccggagcggggaggctgagaagagactcctcctggtggacttcagcagccaagccctgttccaggtatggggtcctcaccctcatgcctcccaggagaaagcagtttttttctgacagaggtggaaagaaggcacgcagatgagctccttcctctgggagtcaaagcctttccttgtaaagttacaaattgcactgcaatgtgcaaatctccctgtgagagggctaagcaatgttcttcttactatagtgtaaatgactacatgggcaaaagtggttccagagggagacgcagcatctcaaggcaatgtgctgggagagggttatctagagagggtaaggggcttctgggcccttcttctcagtcctgaactccctccctactctcttcctccaaccccatgtatctaggacaagaattccagccaagtcctgggtgagaaggtcttggggattgtggtacagaacaccaaagtagccaacctcacggagcccgtggtgctcactttccagcaccagctacagccggtgagtgggggccagccatcaagagaacaagcgcccctcggccatgtcaccctttcctctccctccctccagactcatttgtctttataatgaaacgattgcctgatcgagcagtcaggtccaaatggggcgggtggtggcttgactgtgttctagacttcctctgcctggcctgtaaagttggaggggtggggggctgtcacagaaaccactctcctttcttgtccctacagaagaatgtgactctgcaatgtgtgttctgggttgaagaccccacatgtgagtatgcaggggtctctgggctggacaagtatctggaagagaaatagagtcctggggggtgggggaggtggggttaatcaccgagggcttcctggagaaaggaggactttgaagagagagcgatggcaggctatgagtaggccgggtggaagaatgacacagtcgtgcttttgggggtggacacagtggggtcctggaggactggacttgattggagccccgtgctgtcccctcctcagtgagcagcccggggcattggagcagtgctgggtgtgagaccgtcaggagagaaacccaaacatcctgcttctgcaaccacttgacctactttgcagtgctgatggtgagggtccctgctcccacctcgcagccacaccccaggccgtgtgcttgttctgtgcaagcacttttcatatattcagtcatttattcctcataacagctctccaaggtagcttctattgttgtcccattttatagatgaggaaatggaggctcagagaggttaagcaatttacccgtggccacacagctagtcagtgaaagagctggtttgtagagcccctgctctttattcccaaattttggtgtgtacgaaaatgcagattcctggccctcacctagggttctgatttggcagtgatggggccaagagtgtttctaatgaggcccctgaggtggcctccagtgcccccaagacctcagaattcatgctcccaggactgtaggattctgcctgtgggtatccacctggggcttgaacacccctgggtgtgggaatctcattccctcacaggaaacctattcccatgttaaatgttatagaagaataatcaatgccaggacagaataggggttctctcatgaagggttcttggcctctgtgggtcaggaagccgcttgagaatgtggtcaaatctaaagatgcccccactccagaaaaatgcacttatgggaccacattctgctcagttgggagagggggttcttaggcttccgaggcccaccagggaccccaggttagcccctcacgcagggcaagcctccaggttgtgtgggggacacagaggccagctctctcctgtctcctggggccaggtctcctcggtggaggtggacgccgtgcacaagcactacctgagcctcctctcctacgtgggctgtgtcgtctctgccctggcctgccttgtcaccattgccgcctacctctgctccaggtgaggcctgaaaggggtgggacaggggaggggaccctccattgcacacacctccaccagggcgccgcacacatctccggtcatggcccgcccgcatgacctggaactgtgtgtgtggttaggggagctgtttggggtaagctgacccttgggggccacgtctcctcctcagatcagtggtgtttggataacatagtatttacaaattttagctgtcgacattgtatttatttatttttatttttattttattattattatttttttgagacagagccttgcctctgtcgcccaggctggagtgtagtagcatgatctcggctcactgcaacctctgcctcccgggttcaagtgattcttgtgcctcagcctcctgagtagttgggactactggcgcctgccaccacacctggctaatctgtatatttttagtagagacggggtttcaccatgttgctcaggctggtctcgaactcctgacctcaagtgatccacccacctcagccccccgaagcgctgggattacaggcatgagtcactgtgccaggctaattgtcaacatttaaaattgagagagtccacctaagaatctgtttctttcctagagtaagacaggaaagcaaaataaaaaacttaaaaaaggaaagatttttcatttctgcctttgaataagcagatttgtgagagcactgggtggacacaataatatcacagcggtaatgatcatacttaacgtgtgtcaaacttcccgtgtgccatgcactgttctaagtgttttacatgtgtgaactcaattcatcctcacaacagccctatgaaggaacactcagagagggtaagtgacttgcttgaggtcacacagcaaggaagtggcagaggtcagattgtcagtgcttggcttggcctaaattggggtccacttgccctcagcgctgaacccatttgggtagaggagaggcaccctcggttctcactgtccccagccacgaggaaggagaggaaagtgaagctgtatttatgcgtgtgcacaagcacgtgtgtgcctatatgactgtcctgtgtgtgcacagctgtgtacctggggagctaagtaggtgatggtgatgaggaaggacagctgggtgatgagatgggctcggcggaaggctgggggtggaggcagaagtcctcaacacccagttgctcacaaacatgcccaaggacacagcacaggaacccttaggaactgagcaccttatctgtgtcagatgctttgtgtcagtgtaactctcaccccaaccctatgagggtaccatcctcccacttcacagataggcaaactgagagtctcaaggggaggggaccagctgaagatggtgccatgagttaggggcagggcagggtgggactccaggatggtgacactggggcctgcatgttctgctgcaccctctagggccatgtagaatcctggagtgggggtggggtggggtgtgcacacattgacttgcaaacctcagacagaccgatgcgggcagcccacactcagactcacaggtgcacagttgtgcagacagacgggaagacacagaatgtggatggcatggattctccaacatggtgaaaatgccaaagtgtttccgctctgactttgagagtatctggtttattactgtggttgtcttcctcgctctgcctggctgaggcttctgttaaacgtgcacgtggtgcctgagtctgtgggtgctgggcacacagtaggtgcacagggggatgtggggaacagtttggctgcagccacaggaataggataggggccatgtatgactgcatgtgtgtgtcggggtggggggcagtctgggaaggcttcctggaggagatgtgggcacactcccctctctaccttcccacactggcccaccagggtgcccctgccgtgcaggaggaaacctcgggactacaccatcaaggtgcacatgaacctgctgctggccgtcttcctgctggacacgagcttcctgctcagcgagccggtggccctgacaggctctgaggctggctgccgagccagtgccatcttcctgcacttctccctgctcacctgcctttcctggatgggcctcgaggggtacaacctctaccgactcgtggtggaggtctttggcacctatgtccctggctacctactcaagctgagcgccatgggctggggtaagtggttgggcggggggtgcctcagacctgcctctcccacttggctctggcaaaacccaggcacctggttctgcctctccacctatctctctgacttccctcctggcctccttcactcatcctcaggtgtccttcaccttggctgaatcaaggtcccctttaggaagaagcagtgagccctgtccccaagaaacacttccaaattctccacatcactcactccattgcaaaggggatttacgagcagggccaccgtgtgtgaatgtgcaggttgtgcactgctcaaaggcacccagttcagagatcagaggggctgaaatccagtcccgctccagtcatttaattcactcgggctggcagtggccctgcctcaggatccccctggaccttgggtaacagattccctgtggcttggcattttgttcttggccaatgactgttcaattcacctgtggccagccctcttatgtcagacctacagcccaggggctcatgatgccacaagtctgtttggacattgcacagacccctcaacctccgcatgcccctgactccagcttgctgctcttcgcgggtttgtcattgggccccttctttgtccattcccccatttgcatgaaattcctttggaggtgtctctgtgtcaggactttgtgtttggaggtgggcagccccctctagggagcttctaatctccaccgaacgggcgaggtcaaggcccagtgcagacgtcccctgatggcagaactcttgccgtccctcctaaactgtctgcccctcccatctcccctgtgacatccagccctgcagcagagacccacaggcctttctcccaggggcccccagggtgacgaagggcagggctaaggttggaggagatggcatccccttataggaaacccatactggaatggggagggggagggtccaaacttgggggaacttccccaccagatggggctgggtgggcttcaggagcccaaacttcagaggggcccttgccctccagactccctgaggccagcagggaatgggcaggcctcagagagcgggaagtagagcaacatgcattgccaccctcaggcttccccatctttctggtgacgctggtggccctggtggatgtggacaactatggccccatcatcttggctgtgcataggactccagagggcgtcatctacccttccatgtgagtggctgtgtgcaatgggggcaagaaggtgggtctctgggcacagaggccagagtgcagcccgggcccaggtcatgctggccaggggacacctgggttccagtctcctcgaggaattggcctggcagtggctgaagcactggtctaagagtcatggagggtgagaaaaggcctggatctaccactcactcaccaggtgaccttgcacaggccccggcccttctctgagcctcggtttcctcatgcatgaatgggggtatgggttggagcagatgagcctcaccacattcctcagcagcacctctctgtctccccatgcagatgggaagacagaggctcagggagggaagagatccgctcttggccacactgagggctggtgtgctgttcggaggcagaggatgagtggggttgaagtccagtccttctccactcacctgattcacccaggctggcagcggccctgcctgtggatcccctgaacccaaaccggaagccagggttcctgagctccagcctgggaaggaatccttcccattggctcagtggttttgaaattttcagctctttatgttgtgacccagtgatttctgcctcacttttgtactatctatattattacttacttaacattttcctttaaacaatctgacttgttaactcaaatgtatttttaaaattacatcaacactgtaaatagaaaacaagcgcacttgctgtaaacagtggataatcctgaaaacaaacatgacaaccacagcccaggaaatgctgcccgtgctggccacacgctgagccctcctgcctttgcccgcaggtgctggatccgggactccctggtcagctacatcaccaacctgggcctcttcagcctggtgtttctgttcaacatggccatgctagccaccatggtggtgcagatcctgcggctgcgcccccacacccaaaagtggtcacatgtgctgacactgctgggcctcagcctggtccttggcctgccctgggccttgatcttcttctcctttgcttctggcaccttccagcttgtcgtcctctaccttttcagcatcatcacctccttccaaggtaaggagaagacccgtcccttggcccaggcagggtgtctacacatggagcaagggcagggaagagatcacccagggaacctgaagacttcccttctctgggcctcagtcatcccattcataaaatggggacatccaggccacagtcaacaagtcttgattgagcacctactatgtgcaggccctgtgttaagccacagggcttatggctgagctggttgggtgtgggccttgttcttttggaactcagctctactggggaagactgcgcatgagcaggcaagcatatagccatcaaaggtggtcccagatagtagggacatcgtcgtgagcacgtgctgcacagggcctcggctggggtgggggacaccctaagaagggtggccagggaggcctctctggatatgagacgtgtgaagacaagagaaggatccccccatggagagatgggggggcctccctactccaggcgcggtccacagaccagcagcagcagcgttgttaggagctttttggaaacgcagcctctgggccacccgggccctgccacatcagaatctgcattttcacaaatgcccaaggggtcacgtgcacatgataggatcaggagccctggtctaggggaaggaagctccaggcagagggagaggcaagaacaaagatcctgaggttggaaccggttgtgtgtaggaaggacagtgagggagagcgtggccagatggcggcgggtcggggcggaggggtgggatcccagggcagggtcatgatggctctggcttgatgccaacagggtccctttctgtgcatgtacctgtgtgtgtacattgaggtgcacacacaggcatgcacacccctctgttcctggccgtgcagaatggaagggggttgtatggccaggcccaggggctctcatggggttcaaggccagcctcccatacagggtcaccctagaatgggagctgggagttggtggtggggagatgttaccacatttcggttatttaacattcaagccttcattcctgcctgtgagatgaggggactcaggattgtaagtgaggcccatacattcacacagacatttactaagctgtggatacatcatagtgctattaatttgaggggtgcaaaatctcacagtgcttaagtgggtggacttcagagcctgttcaccacagtttgagccctggctcagccacgtccctttacctgagcctcctgggcctcagtttccttgtttacaaaagagaatagtaatgaataggatgggcctaggaagtttgtgacagtgagaggccacacggggacgcagcacagtgcccggctcataggaggtgctcgctgggtctcatgggtgcctgacagcacgtgcttggcaaacactatggagaggtggggcagacccgagtcacaatggctggggagggaggaggagggatggggtggggctcccccacctgctgaccccgtgccctcactgcccgcaggcttcctcatcttcatctggtactggtccatgcggctgcaggcccggggtggcccctcccctctgaagagcaactcagacagcgccaggctccccatcagctcgggcagcacctcgtccagccgcatctaggcctccagcccacctgcccatgtgatgaagcagagatgcggcctcgtcgcacactgcctgtggcccccgagccaggcccagccccaggccagtcagccgcagactttggaaagcccaacgaccatggagagatgggccgttgccatggtggacggactcccgggctgggcttttgaattggccttggggactactcggctctcactcagctcccacgggactcagaagtgcgccgccatgctgcctagggtactgtccccacatctgtcccaacccagctggaggcctggtctctccttacaacccctgggcccagccctcattgctgggggccaggccttggatcttgagggtctggcacatccttaatcctgtgcccctgcctgggacagaaatgtggctccagttgctctgtctctcgtggtcaccctgagggcactctgcatcctctgtcattttaacctcaggtggcacccagggcgaatggggcccagggcagaccttcagggccagagccctggcggaggagaggccctttgccaggagcacagcagcagctcgcctacctctgagcccaggccccctccctccctcagccccccagtcctccctccatcttccctggggttctcctcctctcccagggcctccttgctccttcgttcacagctgggggtccccgattccaatgctgttttttggggagtggtttccaggagctgcctggtgtctgctgtaaatgtttgtctactgcacaagcctcggcctgcccctgagccaggctcggtaccgatgcgtgggctgggctaggtccctctgtccatctgggcctttgtatgagctgcattgcccttgctcaccctgaccaagcacacgcctcagaggggccctcagcctctcctgaagccctcttgtggcaagaactgtggaccatgccagtcccgtctggtttccatcccaccactccaaggactgagactgacctcctctggtgacactggcctagagcctgacactctcctaagaggttctctccaagcccccaaatagctccaggcgccctcggccgcccatcatggttaattctgtccaacaaacacacacgggtagattgctggcctgttgtaggtggtagggacacagatgaccgacctggtcactcctcctgccaacattcagtctggtatgtgaggcgtgcgtgaagcaagaactcctggagctacagggacagggagccatcattcctgcctgggaatcctggaagacttcctgcaggagtcagcgttcaatcttgaccttgaagatgggaaggatgttctttttacgtaccaattcttttgtcttttgatattaaaaagaagtacatgttcattgtagagaatttggaaactgtagaagagaatcaagaagaaaaataaaaatcagctgttgtaatcgcctagcaaactggcgtaagcattttgggtcatttccttctgagctttttcctgtgcttctattgaaagagtcactgatactgatacaaataccttggggccaatcaggaaacatgaaagagagaagagggctgtgtgtgaagaaaaaaaaaaaatcgactgctggaaacctcatcaaccagggcacaggggaagataaatggcaacttggtgtctgtgctggggaggcaatggggagtggtggggcctgtggcgaactggagactcccaaccccatgctgagagcgtggctgctcatcagctccagctggtcactaccttgcagggatgagggcccatgtagccagaccacctgccttttatgagaaatgggaaatccagactgtggtttgacatcccctgattttaaaattttggcgaatccaaaacattttctggccaaagagattacagtcaaaagctgcctggtcctgggatttatgcaaccagtttactgatcactctgcagcaggtgggctgcaagaattaaatcactggacttctctcccatccctgcctttaaccttgttccaccaaatcaatctctcctcccgctcctaaggcccaggtgaggcagatcacgcaggttcccatcttccctgtgatgagggcagtcacaacggatcattgctactgtgttcaggtaagaggtcccagtgcagccaaagtcctccccaaggcccacagtccactctctcccttctgcaggctcctccctcctcccctggccactctagggggatgcccagcaggggaagaggctcagagtcttggattggacaaggtgggtgtgaggcagctgggtctagactggcagtgccctctgaggggcgtgaatgtgggatcttgggacctgcagggaccaagaacccctgtgccctgctgctctcccagccctccctccaccccctccactccctccactgacctctgtccccacctttctgcaggtggggggctcctcttatgcccccagctccaaaggacagaggccaaaccttcccaagcctcccctaccccagtgtccggattgggcagccccgggggatcagagccagcttccctccttacaggcttctaggtctccgtgaggggggtctctcagagccccatggctgggctaggtcctgggatgggggttgaggcaactccccccatcttccagaatgggggggaaatgacccagccccgttcctccgcaattctcctgcttctcaaacattttgtttctgcatctgaggctggctcaggtagtggggaggggtcttgggttgggtctcaccttctcaggtaggccctgcacagggcaccaacagttccatgctgatccttttaccccgatggttattatcatgcactttcccaggctgtggggctttggacagtgggatcgccctttctgccagcatgtggccaggcgtgcatctggaaacatccctttagcttgggaaatggattggagcagctgagggctgaatgctggctgggtctcgctggagaacttgaggccctgcccactggagccattgggagaagctggggcaggaggcggcaggaagggacactactgttttgttggccctggggttggggggggtctcagggttctgtgagtggctccaggctagtccctggtccccagggggcgtttcagggaaggggccttaggaaaaggtggccctccttccagccctgcctgaccttcccctgcacctgccctctgcccacttcccaggtgggctggctgctcggaatctcagtctgctcacccccaggcgcttcttcacacactggtacctgcgagcctctctgagggcccaggtgccaggatggggcttcagcgatgggcccagcacatccaagtccactgccccacctcaccctcacctgcagctgggagggaggtctgcagatcttccaggagaaggctggccaggtgtggagcagtggcaggcccagccattcatctgccttcgcagccctccctgcagaggaagtttctggggctcaggaagccctgggctctgacctgctgctccatgctgaattcccacctgctcccacaccatgagtgaccctgacatcccctccctaccccttcccagacccagagggctcagcaggagacactgagtgggaggaggaggaaatggaggccagcaggggctgagcggctccccagttcaatcccaaggctgagtagggctagtgccagccccgtgggccagagggggatgccagcaaccacacaccttggtgggatgcccttcaccttccaattgccaagtggccatggcctcatgcacagtgcatccgtggggcctccagagttggcccgagtggctggcgccctaattcctttaggctgaagcccaggagtgtttgccacccccacctcccacctgatcagtgaccatttggggtgtaaagacaacaatttcacagctctgatgatcagaaatgatgtaatggccacaggcggctccgcctgcgtcatccatgatttcatcacacacctcgggaggctcagggtgacagacagtgcatgcaaggtcacccggccaggaagtggccaggatggatgttagctcaggcctgaccagcccccggggccgcactgctgtcttcccgctaccctgcctctgggtccgtcctgttatccaggctggtgggggaagctcaggctgcagggccagctcctgctctcctcccacaccctccagcctggttcaagccataggcaccatctgggtcttcgtcctcatgcccagagccaggctctgtgcccagcttgttgcaggtctcatcaaaccctgacacagccttaggaggcagccccattgccatcttcactttacagaggaggaaactgaggctcagagaggctcccagcttgtgagaggaggggtctgagtaggtgcgcctgactccaaagcctgtgctcaccacagttcccagggatccgctctgagccaggcccctgtggccacccagcccctagccccgtagatcccaccccagtggggccccgggggcacatacctgggtgggctcagcagctccctctgcaggtggacccagggtgcggtgagactgggagcactgcccagttccccacactcacctttcacaacccaaccaatggcgccatcgagcaggaagggtgagaaagaggacacaggaagccagagtggtggggctgcagggtgggggcaggccagctcagcagagcctggggccagagggccagacagccacagagctcctggcgtgggcaaggctggccaaggatggcgacgcccaggggcctgggggccctgctcctgctcctcctgctcccgacctcaggtgagtggctggcacctcatcccctcctgccacgctgggccgaccctgccctgccgagggagggatccagggacagacgcagggactggagaaggtgaggagttggggtgtctgggatgtgtcctccgataccccccgtggccgcctcagcacctcctctagccctgtccctttgggtcagtcctgtccttccactaaaccttgctcaggactggtctcaggttccctttgttgctccacagtgccctggagataggggaggtcggagggtgctccctgactccccaacctgggctgtgtctccctgacaggcctggctctgagacaggggttggccccgggcaggcaattctccagctggcttgtgagatcctggggacgggattcggacactctggaagctgaggccaggaaggtctgtcacctcgttcttctggacctctcctcccgcacatgtcaccccacaccggctccctctcccagtctcagccacaacctcttggtcctcagtggcctgagccaggatccacactcctccccgtcactctcccgtctcacacacaaacacatggtgcgtctccagaggccatggaagtgcccgggccttgcctttgctggcctctctcccaggaaagctgtccccctaccccttgcccacttagccagctccatttacccttcttggcctctgtggcgtcttagcaaccctctcggacagagggaggtgctcccccgttagtgctccctcctcagtgctcctgtctcagggccttgcgggccactctcgttttgctcctgactcggtgaggggcctgcatgtccatctccctgtgtgtccagcgtgtggtcgcgtgactttggccacatagatcaacttatttggtcttcaaataaccctcttcttttcaaacattggaagattcagtggagtgaatcagtccctggctcaaaaaagggtgggagatgacagcactgtcctcctagtggccccgggaggccctggtacagagcaggccaccaggcagcccttgatagatgaatgaacggagccaccgatggcagctgtgaccagggctcatgggcgtcctcaggtcccagctgtcatcgctggttgggccttcaagcctcctccaggtgatgctgtttcccccatggtgatgtgggtgctctggttggggcagagcagcagccatttgattgagcaaggagctctgagaggtctacacacaggaaggtctgcacacttcctgtgtggacagtgatgtgttagtctccattctccatttgcgcattcattcattcattcattcattcaggaagcatcgatggtgccctctgctcctgctggtaccacttggcccctgccctcaaaaggctcacagtctgcaggagtgacacagtgtggtgggggctcgcatgtgagacccagctgttagggctgagcaaggggtggatgcaatggagggcctggcatgaagggacacgtgacaaaggtgcgggcagggcacggggagcaaggagggtggtcactgggcaggctggcacctggggcagccttcagcaccgtgaggtctaaaggggccaggagggagtggccccctgggcttctacagccagactgtggctacaggagggaaatggcggtggtttgctcacggtgagccagcaggggctgaaggagccatgcggggtgggggcaaatgcccactctgccctcctcctgccctctgacctccagtccactttccacttgctgacccccaaatgaggcagtccatggaggccaggctctggagcatagagggtctggagaggaggggagtgctatcccacccacaggcctagcacagggtctccttgtctacatgaaatgcttgcagtgtcttcaaagaataaacacagaaaagatatttaatgatcctgtctgtgtagggtgcttgccaagagcttcacttacatgcctgcgctgaaattcatggcaatccgggagggaggcctgcacctggacccattcatgacagcagggccgggatggcagagaatggcacccgtcctcaagctgacaatgttatctcccctcctctcctgtcctcttccttcccctctcaacccctcctcccctctcctctcttccctctccctgtttctgtcttcttcctcctctccctcttctccccttttttaaaaagccaacatagatcatactatattcatgctcatctatcattttcatttcccattaaacaatgcatcataaatatctttataaactaacagaaatttacagttcctttataaactatctaaaacgaattatcacatatagagtccattattacaaaatcccctctaaaatgttatttttttaccctgctgttactctttattcagccattatttttatcatgtcttttttgtcttaatgattaaaaatgaacagttttttaaaaaatgtgacagtaatactggacatgatttttaaaaaatcaaataccagggagggaaataaaaaatggaaagcagatgagcccctgcccgcctcagcccccagcaccacccatcgcagagggagctctcctaacacttcctgggggtggcaatccgaaaagtgacaatgcagagccaagacccacttcccaccctcaaagggagaaggatacaacaaagcacttcagagtaaaagacataaaagtggccgcagatatacaggtagatgctcaaactccttaaatggaaataagattcaatgtcatccctcagactagcaaaaatccaaaagttcagtaagctatagaataataggcatgtggatagtcactcttatccactttgagtgagagtataaataggtacaccattttctggagggaaattcaataatacccggcagttttttaaagcacatacagaaagtcctagaataggagtttttttttttttttttttttttttcgagacagagtctctctttgtcttccaagctggagtgcagtggtgtgatcttggctcactgcaacctccgcctcccgggttgaagcaattctcctgcctcagccttctgagtagctgagattacaggcacccaccaccacgtccggctaatttttgtatgtttagtagggcttccccatgctggccaggctggtctcaaactcctgacctcaggtgatccacccatctcggcctcccaaagtgctgggattataggcgtgagtcaccgcactcagccttcctggcggtgttttaaagcacatacagttagatacagaaagtcctaagataggaatgttttctatgagttctcaacacaagctgaaaagatgcacactcaagaattcttatggcagattgtgaaaaacaatgtccaccaagaggggaccggttaaaaaagtgttgcaatgcccatggaatggaatagtttgcaactatataaagaatgaggtggaaaagttcttcaagatatattgctagtccaagcgtggtagctcatgcctataaatcgcagcactttggaaggccagggtgagcggatcgcttgagcccaggggtttgagatcagcctgggcaacacagcaaaaccctgtctctaaaaaaataaaaataaacaacataaaaaaaggaaaaactagccaggcatggtggcatgtgcctgtagtcccagctacttgggaggctgaggttggaggatcgattgagcctgggaggtctaggctgcagtgagctgtgatcatgctactgcactccagcctgggtgacagagcaagactctgtctcaaaagaaaaaaaaaagatatattgttaagtgatcttatttgtgtaaatttaaaaaacgatgtatcggcagggcttggtggctcacacctgtaatccagcaatttgggcagctgaggcaggaggatcgcttgaggacaggagttcgagaccagcctgggcaacatagtgagaaccccctcttcttaattaaaacattttttccttaaaaaaatgatgtacttataaatacttgcatatgcataccttctgcaaaatttccagaaggctgtgcaataaaccgttaaagatggtaaactctttgaacacctacaatgagctatgtatgtcctttatctctaatccttcccaaaacttgcaaggaatgtattattagctccattttgctggcaaaagattgagcctcaggttgtttaagtaacttgcctcaggacatacagttagtagatgacccaaagcttccattttgtgccctgtattaggtgaaagggaaccgaactaaaagtcacaaaagctggtctttagtcctggagcagcctccaactagctagtaacctttctcaagtcattttgctcgaggggccttggtttgctgtattttctacctgtcccaggaggtagctgtgatggttgtgtgtgcttcttagcacaggtgtgagccaccacgccctgccaatacatcattttttaaatttacacaaataagatagtgtgaatgtgggagaatgaggcaaaccaagacagaatacatccaagagtttaaccaggaggccacagttgcaagggctttggaaggtctgatgtggaataactgaaaagccaggcagactccctggaggaaggggtaaaggagtaatagcacaaacatatgaaaccttttatttacagagccatgtgccaagccttttgtacatgctttccccaaagcatcctaccagccctgggagatggggtatttgcttttaccttggaaacagccccagagagggtctgcatcctgctcaagtgcaccgttagtgtgatgcatggagctggaattctagcccaaccaccagactctggagccccagctcctttccctgctcctcatccttgctgcccatcttcgtccagcccattcacactctctgcattccttccttaggtcaggaaaagcccaccgaagggccaagaaacacctgcctggggagcaacaacatgtacgacatcttcaacttgaatgacaaggctttgtgcttcaccaagtgcaggcagtcgggcagcgactcctgcaatgtggaaaacttgcagaggtgagggggccccctgagctggagggggaatctgaagctgctgggaggaggactatcaggaagggatggggccatcttcccccatggccccagaaaatgttgctcccatctgactcttccaccttgtttgacaccacagtccccctgacccaacatccccattctagcagttggggtacctactgatctagggtattcagagatgaatccactcctatcctggcccttgggagttgtggaatgacagacacagacccaaataatgatgactccagagtgtatacagaatggcagacaaggtgccaggttagcccagaggagggaagttggccaaggcttcacagaggaggaaacctggaaagggctttgagggtgcacaggagttttccagctggatctaaacaatggtgaggatacaggcaacagaacttgaaagtaatgggggataactgcaatgctttgaactgtaacaatgtaaaccgcgtggggatggaagagacaatgggcagatgcgatgggtgggagataggactggaaatataagcagagactaaggtgtgaagggttgtgtaagttataccaatgggtgagggcggcagggcaatgacatattttaagcgcagggagagtatagtcaactctgcgttttggaatgattgctcaggcttcagggaccggtgatgcaggaagacatgacccagtaggatgcatcacaggggtctgggtgggagtgagggccaagtcagcaccactagcagcaattggcattgcgtgcttggaaaggagagatggattggggagatgatacgatgtagactccgtaagacaagagactggttagatgtgggggtgagggaaatgaaggggtttagaatacaacatctttaggagccatctccaaaaatatctctgcctctctttccttttcccactcctaatcaaagttgcccataactcttctgggatgcctagaaaagcacgtggcttacattagtacttaataaatatgtgttaaaggaatgagttaaagccctgcgctctcaggcttggtgttaggacagccatctcattggatcatgttatttcagtggcctgaaaaggcttccattcccacctgcaggtgatccaggagcttcttagcaccccagagctgttcagaggctcctctttgtgctgcccaggtatatgcccaaaagaatttaaaacaagtctccaaacaaaagcttatacatgggccaggcacggcggctcacacaagtaatcctagcactttgggaggccgaggtgggcagatcacttgaggtcgggagtttgagaccagcctggccaacatggtgaaaccctgtctctactgaaaatacaaaaaaaaaaaaaaaaaattgccaggcttggtgacaggcgcctgtaatcccagctactcgggaggctgaggtgggagaattgcttgaacccaggaggtaaaggttgcagtgacctgagatcactccactgcactccagcctgggcgacagagtgagactccatctcaaaaaaaaaaaaaaaaaagcagcagcagca

SEQ ID NO: 1055 - DNA, 3747 bp, Homo sapiens
ggaggaggtggaaggggaggagcaggccacacaggcacaggccggtgagggacctgcccagacctggagggtctcgctctgtcacacaggctggagtgcagtggtgtgatcttggctcatcgtaacctccacctcccgggttcaagtgattctcatgcctcagcctcccgagtagctgggattacaggtggtgacttccaagagtgactccgtcggaggaaaatgactccccagtcgctgctgcagacgacactgttcctgctgagtctgctcttcctggtccaaggtgcccacggcaggggccacagggaagactttcgcttctgcagccagcggaaccagacacacaggagcagcctccactacaaacccacaccagacctgcgcatctccatcgagaactccgaagaggccctcacagtccatgcccctttccctgcagcccaccctgcttcccgatccttccctgaccccaggggcctctaccacttctgcctctactggaaccgacatgctgggagattacatcttctctatggcaagcgtgacttcttgctgagtgacaaagcctctagcctcctctgcttccagcaccaggaggagagcctggctcagggccccccgctgttagccacttctgtcacctcctggtggagccctcagaacatcagcctgcccagtgccgccagcttcaccttctccttccacagtcctccccacacggccgctcacaatgcctcggtggacatgtgcgagctcaaaagggacctccagctgctcagccagttcctgaagcatccccagaaggcctcaaggaggccctcggctgcccccgccagccagcagttgcagagcctggagtcgaaactgacctctgtgagattcatgggggacatggtgtccttcgaggaggaccggatcaacgccacggtgtggaagctccagcccacagccggcctccaggacctgcacatccactcccggcaggaggaggagcagagcgagatcatggagtactcggtgctgctgcctcgaacactcttccagaggacgaaaggccggagcggggaggctgagaagagactcctcctggtggacttcagcagccaagccctgttccaggacaagaattccagccaagtcctgggtgagaaggtcttggggattgtggtacagaacaccaaagtagccaacctcacggagcccgtggtgctcactttccagcaccagctacagccgaagaatgtgactctgcaatgtgtgttctgggttgaagaccccacattgagcagcccggggcattggagcagtgctgggtgtgagaccgtcaggagagaaacccaaacatcctgcttctgcaaccacttgacctactttgcagtgctgatggtctcctcggtggaggtggacgccgtgcacaagcactacctgagcctcctctcctacgtgggctgtgtcgtctctgccctggcctgccttgtcaccattgccgcctacctctgctccagggtgcccctgccgtgcaggaggaaacctcgggactacaccatcaaggtgcacatgaacctgctgctggccgtcttcctgctggacacgagcttcctgctcagcgagccggtggccctgacaggctctgaggctggctgccgagccagtgccatcttcctgcacttctccctgctcacctgcctttcctggatgggcctcgaggggtacaacctctaccgactcgtggtggaggtctttggcacctatgtccctggctacctactcaagctgagcgccatgggctggggcttccccatctttctggtgacgctggtggccctggtggatgtggacaactatggccccatcatcttggctgtgcataggactccagagggcgtcatctacccttccatgtgctggatccgggactccctggtcagctacatcaccaacctgggcctcttcagcctggtgtttctgttcaacatggccatgctagccaccatggtggtgcagatcctgcggctgcgcccccacacccaaaagtggtcacatgtgctgacactgctgggcctcagcctggtccttggcctgccctgggccttgatcttcttctcctttgcttctggcaccttccagcttgtcgtcctctaccttttcagcatcatcacctccttccaaggcttcctcatcttcatctggtactggtccatgcggctgcaggcccggggtggcccctcccctctgaagagcaactcagacagcgccaggctccccatcagctcgggcagcacctcgtccagccgcatctaggcctccagcccacctgcccatgtgatgaagcagagatgcggcctcgtcgcacactgcctgtggcccccgagccaggcccagccccaggccagtcagccgcagactttggaaagcccaacgaccatggagagatgggccgttgccatggtggacggactcccgggctgggcttttgaattggccttggggactactcggctctcactcagctcccacgggactcagaagtgcgccgccatgctgcctagggtactgtccccacatctgtcccaacccagctggaggcctggtctctccttacaacccctgggcccagccctcattgctgggggccaggccttggatcttgagggtctggcacatccttaatcctgtgcccctgcctgggacagaaatgtggctccagttgctctgtctctcgtggtcaccctgagggcactctgcatcctctgtcattttaacctcaggtggcacccagggcgaatggggcccagggcagaccttcagggccagagccctggcggaggagaggccctttgccaggagcacagcagcagctcgcctacctctgagcccaggccccctccctccctcagccccccagtcctccctccatcttccctggggttctcctcctctcccagggcctccttgctccttcgttcacagctgggggtccccgattccaatgctgttttttggggagtggtttccaggagctgcctggtgtctgctgtaaatgtttgtctactgcacaagcctcggcctgcccctgagccaggctcggtaccgatgcgtgggctgggctaggtccctctgtccatctgggcctttgtatgagctgcattgcccttgctcaccctgaccaagcacacgcctcagaggggccctcagcctctcctgaagccctcttgtggcaagaactgtggaccatgccagtcccgtctggtttccatcccaccactccaaggactgagactgacctcctctggtgacactggcctagagcctgacactctcctaagaggttctctccaagcccccaaatagctccaggcgccctcggccgcccatcatggttaattctgtccaacaaacacacacgggtagattgctggcctgttgtaggtggtagggacacagatgaccgacctggtcactcctcctgccaacattcagtctggtatgtgaggcgtgcgtgaagcaagaactcctggagctacagggacagggagccatcattcctgcctgggaatcctggaagacttcctgcaggagtcagcgttcaatcttgaccttgaagatgggaaggatgttctttttacgtaccaattcttttgtcttttgatattaaaaagaagtacatgttcattgtagagaatttggaaactgtagaagagaatcaagaagaaaaataaaaatcagctgttgtaatcgcctagc

SEQ ID NO: 1056 - protein, 681 aa, Homo sapiens
MTPQSLLQTTLFLLSLLFLVQGAHGRGHREDFRFCSQRNQTSSLHYKPTPDLRISIENSEEALTVHAPFPAAHPASRSFPDPRGHFCLYWNRHAGRLHLLYGKRDFLLSDKASSLLCFQHQEESLAQGPPLLATSVTSWWSPQNISLPSAASFTFSFHSPPHTAAHNASVDMCELKRDLQLLSQFLKHPQKASRRPSAAPASQQLQSLESKLTSVRFMGDMVSFEEDRINATVWKLQPTAGLQDLHIHSRQEEEQSEIMEYSVLLPRTLFQRTKGRSGEAEKRLLLVDFSSQALFQDKNSSQVLGEKVLGIVVQNTKVANLTEPVVLTFQHQLQPKNVTLQCVFWVEDPTLSSPGHWSSAGCETVRRETQTSCFCNHLTYFAVLMVSSVEVDAVHKHYLSLLSYVGCVVSACLVTIAAYLCSRVPLPCRRKPRDYTIKVHMNLLLAVFLLDTSFLLSEPVTGSEAGCRASAIFLHFSLLTCLSWMGLEGYNLYRLVVEVFGTYVPGYLLKLSAMGWGFPIFLVTLVVDVDNYGPIILAVHRTPEGVIYPSMCWIRDSLVSYITNLGLFSLVFLFNMAMLATMVVQILRLRPHTQKWSHVLTLLGLSLVLGLPWALIFFSFASGTFQLVVLYLFSIITSFQGFLIFIWYWSMRLQRGPSPLKSNSDSARLPISSGSTSSSRI

SEQ ID NO: 1057 - DNA, 3975 bp, Homo sapiens
ccaagggccctgttgccgtggcaaccccggcctctctgtgggaactttggggagactggccctgggaggcgacagatggaggctgaggaagcagagtgatccccggccccttcctgtccctgaacactgtctgcctggatgagggctgtctgccctgccctgccgtaggagatgggctgggagcctcccacgctctccagctcactcggcaggcagcggggaccagggctggcaggttaagcctctgggggtggatcctgaaaggtggtccagccgcctggccctgcgtgggaccctccacctggcagcagggtctcgctctgtcacacaggctggagtgcagtggtgtgatcttggctcatcgtaacctccacctcccgggttcaagtgattctcatgcctcagcctcccgagtagctgggattacaggtggtgacttccaagagtgactccgtcggaggaaaatgactccccagtcgctgctgcagacgacactgttcctgctgagtctgctcttcctggtccaaggcaggtgcccacggcaggggccacagggaagactttcgcttctgcagccagcggaaccagacacacaggagcagcctccactacaaacccacaccagacctgcgcatctccatcgagaactccgaagaggccctcacagtccatgcccctttccctgcagcccaccctgcttcccgatccttccctgaccccaggggcctctaccacttctgcctctactggaaccgacatgctgggagattacatcttctctatggcaagcgtgacttcttgctgagtgacaaagcctctagcctcctctgcttccagcaccaggaggagagcctggctcagggccccccgctgttagccacttctgtcacctcctggtggagccctcagaacatcagcctgcccagtgccgccagcttcaccttctccttccacagtcctccccacacggccgctcacaatgcctcggtggacatgtgcgagctcaaaagggacctccagctgctcagccagttcctgaagcatccccagaaggcctcaaggaggccctcggctgcccccgccagccagcagttgcagagcctggagtcgaaactgacctctgtgagattcatgggggacatggtgtccttcgaggaggaccggatcaacgccacggtgtggaagctccagcccacagccggcctccaggacctgcacatccactcccggcaggaggaggagcagagcgagatcatggagtactcggtgctgctgcctcgaacactcttccagaggacgaaaggccggagcggggaggctgagaagagactcctcctggtggacttcagcagccaagccctgttccaggacaagaattccagccaagtcctgggtgagaaggtcttggggattgtggtacagaacaccaaagtagccaacctcacggagcccgtggtgctcactttccagcaccagctacagccgaagaatgtgactctgcaatgtgtgttctgggttgaagaccccacattgagcagcccggggcattggagcagtgctgggtgtgagaccgtcaggagagaaacccaaacatcctgcttctgcaaccacttgacctactttgcagtgctgatggtctcctcggtggaggtggacgccgtgcacaagcactacctgagcctcctctcctacgtgggctgtgtcgtctctgccctggcctgccttgtcaccattgccgcctacctctgctccaggaggaaacctcgggactacaccatcaaggtgcacatgaacctgctgctggccgtcttcctgctggacacgagcttcctgctcagcgagccggtggccctgacaggctctgaggctggctgccgagccagtgccatcttcctgcacttctccctgctcacctgcctttcctggatgggcctcgaggggtacaacctctaccgactcgtggtggaggtctttggcacctatgtccctggctacctactcaagctgagcgccatgggctggggcttccccatctttctggtgacgctggtggccctggtggatgtggacaactatggccccatcatcttggctgtgcataggactccagagggcgtcatctacccttccatgtgctggatccgggactccctggtcagctacatcaccaacctgggcctcttcagcctggtgtttctgttcaacatggccatgctagccaccatggtggtgcagatcctgcggctgcgcccccacacccaaaagtggtcacatgtgctgacactgctgggcctcagcctggtccttggcctgccctgggccttgatcttcttctcctttgcttctggcaccttccagcttgtcgtcctctaccttttcagcatcatcacctccttccaaggcttcctcatcttcatctggtactggtccatgcggctgcaggcccggggtggcccctcccctctgaagagcaactcagacagcgccaggctccccatcagctcgggcagcacctcgtccagccgcatctaggcctccagcccacctgcccatgtgatgaagcagagatgcggcctcgtcgcacactgcctgtggcccccgagccaggcccagccccaggccagtcagccgcagactttggaaagcccaacgaccatggagagatgggccgttgccatggtggacggactcccgggctgggcttttgaattggccttggggactactcggctctcactcagctcccacgggactcagaagtgcgccgccatgctgcctagggtactgtccccacatctgtcccaacccagctggaggcctggtctctccttacaacccctgggcccagccctcattgctgggggccaggccttggatcttgagggtctggcacatccttaatcctgtgcccctgcctgggacagaaatgtggctccagttgctctgtctctcgtggtcaccctgagggcactctgcatcctctgtcattttaacctcaggtggcacccagggcgaatggggcccagggcagaccttcagggccagagccctggcggaggagaggccctttgccaggagcacagcagcagctcgcctacctctgagcccaggccccctccctccctcagccccccagtcctccctccatcttccctggggttctcctcctctcccagggcctccttgctccttcgttcacagctgggggtccccgattccaatgctgttttttggggagtggtttccaggagctgcctggtgtctgctgtaaatgtttgtctactgcacaagcctcggcctgcccctgagccaggctcggtaccgatgcgtgggctgggctaggtccctctgtccatctgggcctttgtatgagctgcattgcccttgctcaccctgaccaagcacacgcctcagaggggccctcagcctctcctgaagccctcttgtggcaagaactgtggaccatgccagtcccgtctggtttccatcccaccactccaaggactgagactgacctcctctggtgacactggcctagagcctgacactctcctaagaggttctctccaagcccccaaatagctccaggcgccctcggccgcccatcatggttaattctgtccaacaaacacacacgggtagattgctggcctgttgtaggtggtagggacacagatgaccgacctggtcactcctcctgccaacattcagtctggtatgtgaggcgtgcgtgaagcaagaactcctggagctacagggacagggagccatcattcctgcctgggaatcctggaagacttcctgcaggagtcagcgttcaatcttgaccttgaagatgggaaggatgttctttttacgtaccaattcttttgtcttttgatattaaaaagaagtacatgttcattgtagagaatttggaaactgtagaagagaatcaagaagaaaaataaaaatcagctgttgtaatcgcctagc

SEQ ID NO: 1058 - protein, 504 aa, Homo sapiens
MCELKRDLQLLSQFLKHPQKASRRPSAAPASQQLQSLESKLTSVRFMGDMVSFEEDRINATVWKLQPTAGLQDLHIHSRQEEEQSEIMEYSVLLPRTLFQRTKGRSGEAEKRLLLVDFSSQALFQDKNSSQVLGEKVLGIVVQNTKVANLTEPVVLTFQHQLQPKNVTLQCVFWVEDPTLSSPGHWSSAGCETVRRETQTSCFCNHLTYFAVLMVSSVEVDAVHKHYLSLLSYVGCVVSACLVTIAAYLCSRRKPRDYTIKVHMNLLLAVFLLDTSFLLSEPVTGSEAGCRASAIFLHFSLLTCLSWMGLEGYNLYRLVVEVFGTYVPGYLLKLSAMGWGFPIFLVTLVVDVDNYGPIILAVHRTPEGVIYPSMCWIRDSLVSYITNLGLFSLVFLFNMAMLATMVVQILRLRPHTQKWSHVLTLLGLSLVLGLPWALIFFSFASGTFQLVVLYLFSIITSFQGFLIFIWYWSMRLQRGPSPLKSNSDSARLPISSGSTSSSRI

SEQ ID NO: 1059 - DNA, 3993 bp, Homo sapiens
ccaagggccctgttgccgtggcaaccccggcctctctgtgggaactttggggagactggccctgggaggcgacagatggaggctgaggaagcagagtgatccccggccccttcctgtccctgaacactgtctgcctggatgagggctgtctgccctgccctgccgtaggagatgggctgggagcctcccacgctctccagctcactcggcaggcagcggggaccagggctggcaggttaagcctctgggggtggatcctgaaaggtggtccagccgcctggccctgcgtgggaccctccacctggcagcagggtctcgctctgtcacacaggctggagtgcagtggtgtgatcttggctcatcgtaacctccacctcccgggttcaagtgattctcatgcctcagcctcccgagtagctgggattacaggtggtgacttccaagagtgactccgtcggaggaaaatgactccccagtcgctgctgcagacgacactgttcctgctgagtctgctcttcctggtccaaggcaggtgcccacggcaggggccacagggaagactttcgcttctgcagccagcggaaccagacacacaggagcagcctccactacaaacccacaccagacctgcgcatctccatcgagaactccgaagaggccctcacagtccatgcccctttccctgcagcccaccctgcttcccgatccttccctgaccccaggggcctctaccacttctgcctctactggaaccgacatgctgggagattacatcttctctatggcaagcgtgacttcttgctgagtgacaaagcctctagcctcctctgcttccagcaccaggaggagagcctggctcagggccccccgctgttagccacttctgtcacctcctggtggagccctcagaacatcagcctgcccagtgccgccagcttcaccttctccttccacagtcctccccacacggccgctcacaatgcctcggtggacatgtgcgagctcaaaagggacctccagctgctcagccagttcctgaagcatccccagaaggcctcaaggaggccctcggctgcccccgccagccagcagttgcagagcctggagtcgaaactgacctctgtgagattcatgggggacatggtgtccttcgaggaggaccggatcaacgccacggtgtggaagctccagcccacagccggcctccaggacctgcacatccactcccggcaggaggaggagcagagcgagatcatggagtactcggtgctgctgcctcgaacactcttccagaggacgaaaggccggagcggggaggctgagaagagactcctcctggtggacttcagcagccaagccctgttccaggacaagaattccagccaagtcctgggtgagaaggtcttggggattgtggtacagaacaccaaagtagccaacctcacggagcccgtggtgctcactttccagcaccagctacagccgaagaatgtgactctgcaatgtgtgttctgggttgaagaccccacattgagcagcccggggcattggagcagtgctgggtgtgagaccgtcaggagagaaacccaaacatcctgcttctgcaaccacttgacctactttgcagtgctgatggtctcctcggtggaggtggacgccgtgcacaagcactacctgagcctcctctcctacgtgggctgtgtcgtctctgccctggcctgccttgtcaccattgccgcctacctctgctccagggtgcccctgccgtgcaggaggaaacctcgggactacaccatcaaggtgcacatgaacctgctgctggccgtcttcctgctggacacgagcttcctgctcagcgagccggtggccctgacaggctctgaggctggctgccgagccagtgccatcttcctgcacttctccctgctcacctgcctttcctggatgggcctcgaggggtacaacctctaccgactcgtggtggaggtctttggcacctatgtccctggctacctactcaagctgagcgccatgggctggggcttccccatctttctggtgacgctggtggccctggtggatgtggacaactatggccccatcatcttggctgtgcataggactccagagggcgtcatctacccttccatgtgctggatccgggactccctggtcagctacatcaccaacctgggcctcttcagcctggtgtttctgttcaacatggccatgctagccaccatggtggtgcagatcctgcggctgcgcccccacacccaaaagtggtcacatgtgctgacactgctgggcctcagcctggtccttggcctgccctgggccttgatcttcttctcctttgcttctggcaccttccagcttgtcgtcctctaccttttcagcatcatcacctccttccaaggcttcctcatcttcatctggtactggtccatgcggctgcaggcccggggtggcccctcccctctgaagagcaactcagacagcgccaggctccccatcagctcgggcagcacctcgtccagccgcatctaggcctccagcccacctgcccatgtgatgaagcagagatgcggcctcgtcgcacactgcctgtggcccccgagccaggcccagccccaggccagtcagccgcagactttggaaagcccaacgaccatggagagatgggccgttgccatggtggacggactcccgggctgggcttttgaattggccttggggactactcggctctcactcagctcccacgggactcagaagtgcgccgccatgctgcctagggtactgtccccacatctgtcccaacccagctggaggcctggtctctccttacaacccctgggcccagccctcattgctgggggccaggccttggatcttgagggtctggcacatccttaatcctgtgcccctgcctgggacagaaatgtggctccagttgctctgtctctcgtggtcaccctgagggcactctgcatcctctgtcattttaacctcaggtggcacccagggcgaatggggcccagggcagaccttcagggccagagccctggcggaggagaggccctttgccaggagcacagcagcagctcgcctacctctgagcccaggccccctccctccctcagccccccagtcctccctccatcttccctggggttctcctcctctcccagggcctccttgctccttcgttcacagctgggggtccccgattccaatgctgttttttggggagtggtttccaggagctgcctggtgtctgctgtaaatgtttgtctactgcacaagcctcggcctgcccctgagccaggctcggtaccgatgcgtgggctgggctaggtccctctgtccatctgggcctttgtatgagctgcattgcccttgctcaccctgaccaagcacacgcctcagaggggccctcagcctctcctgaagccctcttgtggcaagaactgtggaccatgccagtcccgtctggtttccatcccaccactccaaggactgagactgacctcctctggtgacactggcctagagcctgacactctcctaagaggttctctccaagcccccaaatagctccaggcgccctcggccgcccatcatggttaattctgtccaacaaacacacacgggtagattgctggcctgttgtaggtggtagggacacagatgaccgacctggtcactcctcctgccaacattcagtctggtatgtgaggcgtgcgtgaagcaagaactcctggagctacagggacagggagccatcattcctgcctgggaatcctggaagacttcctgcaggagtcagcgttcaatcttgaccttgaagatgggaaggatgttctttttacgtaccaattcttttgtcttttgatattaaaaagaagtacatgttcattgtagagaatttggaaactgtagaagagaatcaagaagaaaaataaaaatcagctgttgtaatcgcctagc

SEQ ID NO: 1060 - protein, 510 aa, Homo sapiens
MCELKRDLQLLSQFLKHPQKASRRPSAAPASQQLQSLESKLTSVRFMGDMVSFEEDRINATVWKLQPTAGLQDLHIHSRQEEEQSEIMEYSVLLPRTLFQRTKGRSGEAEKRLLLVDFSSQALFQDKNSSQVLGEKVLGIVVQNTKVANLTEPVVLTFQHQLQPKNVTLQCVFWVEDPTLSSPGHWSSAGCETVRRETQTSCFCNHLTYFAVLMVSSVEVDAVHKHYLSLLSYVGCVVSACLVTIAAYLCSRVPLPCRRKPRDYTIKVHMNLLLAVFLLDTSFLLSEPVTGSEAGCRASAIFLHFSLLTCLSWMGLEGYNLYRLVVEVFGTYVPGYLLKLSAMGWGFPIFLVTLVVDVDNYGPIILAVHRTPEGVIYPSMCWIRDSLVSYITNLGLFSLVFLFNMAMLATMVVQILRLRPHTQKWSHVLTLLGLSLVLGLPWALIFFSFASGTFQLVVLYLFSIITSFQGFLIFIWYWSMRLQRGPSPLKSNSDSARLPISSGSTSSSRI

SEQ ID NO: 1061 - DNA, 3678 bp, Homo sapiens
ggtctcgctctgtcacacaggctggagtgcagtggtgtgatcttggctcatcgtaacctccacctcccgggttcaagtgattctcatgcctcagcctcccgagtagctgggattacaggtggtgacttccaagagtgactccgtcggaggaaaatgactccccagtcgctgctgcagacgacactgttcctgctgagtctgctcttcctggtccaaggtgcccacggcaggggccacagggaagactttcgcttctgcagccagcggaaccagacacacaggagcagcctccactacaaacccacaccagacctgcgcatctccatcgagaactccgaagaggccctcacagtccatgcccctttccctgcagcccaccctgcttcccgatccttccctgaccccaggggcctctaccacttctgcctctactggaaccgacatgctgggagattacatcttctctatggcaagcgtgacttcttgctgagtgacaaagcctctagcctcctctgcttccagcaccaggaggagagcctggctcagggccccccgctgttagccacttctgtcacctcctggtggagccctcagaacatcagcctgcccagtgccgccagcttcaccttctccttccacagtcctccccacacggccgctcacaatgcctcggtggacatgtgcgagctcaaaagggacctccagctgctcagccagttcctgaagcatccccagaaggcctcaaggaggccctcggctgcccccgccagccagcagttgcagagcctggagtcgaaactgacctctgtgagattcatgggggacatggtgtccttcgaggaggaccggatcaacgccacggtgtggaagctccagcccacagccggcctccaggacctgcacatccactcccggcaggaggaggagcagagcgagatcatggagtactcggtgctgctgcctcgaacactcttccagaggacgaaaggccggagcggggaggctgagaagagactcctcctggtggacttcagcagccaagccctgttccaggacaagaattccagccaagtcctgggtgagaaggtcttggggattgtggtacagaacaccaaagtagccaacctcacggagcccgtggtgctcactttccagcaccagctacagccgaagaatgtgactctgcaatgtgtgttctgggttgaagaccccacattgagcagcccggggcattggagcagtgctgggtgtgagaccgtcaggagagaaacccaaacatcctgcttctgcaaccacttgacctactttgcagtgctgatggtctcctcggtggaggtggacgccgtgcacaagcactacctgagcctcctctcctacgtgggctgtgtcgtctctgccctggcctgccttgtcaccattgccgcctacctctgctccagggtgcccctgccgtgcaggaggaaacctcgggactacaccatcaaggtgcacatgaacctgctgctggccgtcttcctgctggacacgagcttcctgctcagcgagccggtggccctgacaggctctgaggctggctgccgagccagtgccatcttcctgcacttctccctgctcacctgcctttcctggatgggcctcgaggggtacaacctctaccgactcgtggtggaggtctttggcacctatgtccctggctacctactcaagctgagcgccatgggctggggcttccccatctttctggtgacgctggtggccctggtggatgtggacaactatggccccatcatcttggctgtgcataggactccagagggcgtcatctacccttccatgtgctggatccgggactccctggtcagctacatcaccaacctgggcctcttcagcctggtgtttctgttcaacatggccatgctagccaccatggtggtgcagatcctgcggctgcgcccccacacccaaaagtggtcacatgtgctgacactgctgggcctcagcctggtccttggcctgccctgggccttgatcttcttctcctttgcttctggcaccttccagcttgtcgtcctctaccttttcagcatcatcacctccttccaaggcttcctcatcttcatctggtactggtccatgcggctgcaggcccggggtggcccctcccctctgaagagcaactcagacagcgccaggctccccatcagctcgggcagcacctcgtccagccgcatctaggcctccagcccacctgcccatgtgatgaagcagagatgcggcctcgtcgcacactgcctgtggcccccgagccaggcccagccccaggccagtcagccgcagactttggaaagcccaacgaccatggagagatgggccgttgccatggtggacggactcccgggctgggcttttgaattggccttggggactactcggctctcactcagctcccacgggactcagaagtgcgccgccatgctgcctagggtactgtccccacatctgtcccaacccagctggaggcctggtctctccttacaacccctgggcccagccctcattgctgggggccaggccttggatcttgagggtctggcacatccttaatcctgtgcccctgcctgggacagaaatgtggctccagttgctctgtctctcgtggtcaccctgagggcactctgcatcctctgtcattttaacctcaggtggcacccagggcgaatggggcccagggcagaccttcagggccagagccctggcggaggagaggccctttgccaggagcacagcagcagctcgcctacctctgagcccaggccccctccctccctcagccccccagtcctccctccatcttccctggggttctcctcctctcccagggcctccttgctccttcgttcacagctgggggtccccgattccaatgctgttttttggggagtggtttccaggagctgcctggtgtctgctgtaaatgtttgtctactgcacaagcctcggcctgcccctgagccaggctcggtaccgatgcgtgggctgggctaggtccctctgtccatctgggcctttgtatgagctgcattgcccttgctcaccctgaccaagcacacgcctcagaggggccctcagcctctcctgaagccctcttgtggcaagaactgtggaccatgccagtcccgtctggtttccatcccaccactccaaggactgagactgacctcctctggtgacactggcctagagcctgacactctcctaagaggttctctccaagcccccaaatagctccaggcgccctcggccgcccatcatggttaattctgtccaacaaacacacacgggtagattgctggcctgttgtaggtggtagggacacagatgaccgacctggtcactcctcctgccaacattcagtctggtatgtgaggcgtgcgtgaagcaagaactcctggagctacagggacagggagccatcattcctgcctgggaatcctggaagacttcctgcaggagtcagcgttcaatcttgaccttgaagatgggaaggatgttctttttacgtaccaattcttttgtcttttgatattaaaaagaagtacatgttcattgtagagaatttggaaactgtagaagagaatcaagaagaaaaataaaaatcagctgttgtaatcgcctagc

SEQ ID NO: 1062 - protein, 681 aa, Homo sapiens; identical to SEQ ID NO: 1056

SEQ ID NO: 1063 - DNA, 4121 bp, Homo sapiens
aggaggagggaatgcacgtctcccactacctggaggaggctactgggggtggggaggggctttggccagtggtgtgaaccaaaggaggctgggactgactctggagggagttgaggagggcttcctggaggaggtgtcctctgagctaggtctcaggaatgatgatagggaggtagctggggagaactctgggagcccccttttttctgtgttccctccgggcctggaggggcaaggtggtgacggttccaggtagaaccctcatgccagattctagataagataatcccgtcactctgggttcaggagggaggtactacgattagcccgattttgagtgacttacacaaggtcctgcagcgggcaaaaggtggaactgagactggaactcagctggactctggacagccactcccccgcctttttttttttaaagcagggtctcactctgtcacccaggctggagtgcagtggcgcagttatagctcactgcagcctcgacctcctgggctcaagtgatccttccacctcagcctccctagtagctgggaccacaggtggtgacttccaagagtgactccgtcggaggaaaatgactccccagtcgctgctgcagacgacactgttcctgctgagtctgctcttcctggtccaaggcaggtgcccacggcaggggccacagggaagactttcgcttctgcagccagcggaaccagacacacaggagcagcctccactacaaacccacaccagacctgcgcatctccatcgagaactccgaagaggccctcacagtccatgcccctttccctgcagcccaccctgcttcccgatccttccctgaccccaggggcctctaccacttctgcctctactggaaccgacatgctgggagattacatcttctctatggcaagcgtgacttcttgctgagtgacaaagcctctagcctcctctgcttccagcaccaggaggagagcctggctcagggccccccgctgttagccacttctgtcacctcctggtggagccctcagaacatcagcctgcccagtgccgccagcttcaccttctccttccacagtcctccccacacggccgctcacaatgcctcggtggacatgtgcgagctcaaaagggacctccagctgctcagccagttcctgaagcatccccagaaggcctcaaggaggccctcggctgcccccgccagccagcagttgcagagcctggagtcgaaactgacctctgtgagattcatgggggacatggtgtccttcgaggaggaccggatcaacgccacggtgtggaagctccagcccacagccggcctccaggacctgcacatccactcccggcaggaggaggagcagagcgagatcatggagtactcggtgctgctgcctcgaacactcttccagaggacgaaaggccggagcggggaggctgagaagagactcctcctggtggacttcagcagccaagccctgttccaggacaagaattccagccaagtcctgggtgagaaggtcttggggattgtggtacagaacaccaaagtagccaacctcacggagcccgtggtgctcactttccagcaccagctacagccgaagaatgtgactctgcaatgtgtgttctgggttgaagaccccacattgagcagcccggggcattggagcagtgctgggtgtgagaccgtcaggagagaaacccaaacatcctgcttctgcaaccacttgacctactttgcagtgctgatggtctcctcggtggaggtggacgccgtgcacaagcactacctgagcctcctctcctacgtgggctgtgtcgtctctgccctggcctgccttgtcaccattgccgcctacctctgctccagggtgcccctgccgtgcaggaggaaacctcgggactacaccatcaaggtgcacatgaacctgctgctggccgtcttcctgctggacacgagcttcctgctcagcgagccggtggccctgacaggctctgaggctggctgccgagccagtgccatcttcctgcacttctccctgctcacctgcctttcctggatgggcctcgaggggtacaacctctaccgactcgtggtggaggtctttggcacctatgtccctggctacctactcaagctgagcgccatgggctggggcttccccatctttctggtgacgctggtggccctggtggatgtggacaactatggccccatcatcttggctgtgcataggactccagagggcgtcatctacccttccatgtgctggatccgggactccctggtcagctacatcaccaacctgggcctcttcagcctggtgtttctgttcaacatggccatgctagccaccatggtggtgcagatcctgcggctgcgcccccacacccaaaagtggtcacatgtgctgacactgctgggcctcagcctggtccttggcctgccctgggccttgatcttcttctcctttgcttctggcaccttccagcttgtcgtcctctaccttttcagcatcatcacctccttccaaggcttcctcatcttcatctggtactggtccatgcggctgcaggcccggggtggcccctcccctctgaagagcaactcagacagcgccaggctccccatcagctcgggcagcacctcgtccagccgcatctaggcctccagcccacctgcccatgtgatgaagcagagatgcggcctcgtcgcacactgcctgtggcccccgagccaggcccagccccaggccagtcagccgcagactttggaaagcccaacgaccatggagagatgggccgttgccatggtggacggactcccgggctgggcttttgaattggccttggggactactcggctctcactcagctcccacgggactcagaagtgcgccgccatgctgcctagggtactgtccccacatctgtcccaacccagctggaggcctggtctctccttacaacccctgggcccagccctcattgctgggggccaggccttggatcttgagggtctggcacatccttaatcctgtgcccctgcctgggacagaaatgtggctccagttgctctgtctctcgtggtcaccctgagggcactctgcatcctctgtcattttaacctcaggtggcacccagggcgaatggggcccagggcagaccttcagggccagagccctggcggaggagaggccctttgccaggagcacagcagcagctcgcctacctctgagcccaggccccctccctccctcagccccccagtcctccctccatcttccctggggttctcctcctctcccagggcctccttgctccttcgttcacagctgggggtccccgattccaatgctgttttttggggagtggtttccaggagctgcctggtgtctgctgtaaatgtttgtctactgcacaagcctcggcctgcccctgagccaggctcggtaccgatgcgtgggctgggctaggtccctctgtccatctgggcctttgtatgagctgcattgcccttgctcaccctgaccaagcacacgcctcagaggggccctcagcctctcctgaagccctcttgtggcaagaactgtggaccatgccagtcccgtctggtttccatcccaccactccaaggactgagactgacctcctctggtgacactggcctagagcctgacactctcctaagaggttctctccaagcccccaaatagctccaggcgccctcggccgcccatcatggttaattctgtccaacaaacacacacgggtagattgctggcctgttgtaggtggtagggacacagatgaccgacctggtcactcctcctgccaacattcagtctggtatgtgaggcgtgcgtgaagcaagaactcctggagctacagggacagggagccatcattcctgcctgggaatcctggaagacttcctgcaggagtcagcgttcaatcttgaccttgaagatgggaaggatgttctttttacgtaccaattcttttgtcttttgatattaaaaagaagtacatgttcattgtagagaatttggaaactgtagaagagaatcaagaagaaaaataaaaatcagctgttgtaatcgcctagc

SEQ ID NO: 1064 - protein, 510 aa, Homo sapiens; identical to SEQ ID NO: 1060

SEQ ID NO: 1065 - DNA, 21261 bp, Mus musculus
ttgtatgggcaggtgagcagctgccagtctcaagaatgagacccacaggatgcttccttagaagagttgtgggcaggccgtgaagccaggaggcataaacgtgggaagagaaggaaggtggcggggctcgtgaccgttagtatcatgaacttttccaagatttctagactgtcacatttctcagaaacaagaaaaaacacacagaaaaagctgtgtcatgtggtggttgccacccctctgcaggtgcccagtcagcaactgtaggccggcccttggtgctgctccacagaaacagaaacagtcagctgtgtccttcctttctcacattcctgtccacaaagtcctcaagtaactccagccagggggagtgtcctgctcagcagctgaggggtcgccgcctttactccaaggcactaggcttctcctggatatcctttgtctcccatgagctctgagaaaggtccgcttcaacccttgcttttcacagccagcctcccgccttgggccagctggtgagtctgtacctggggaggtcacactttctttggaaagaacccgccattatgagctggctagaggaaaatgtccatgaggttctgcaagcggtggatgctggagaccctgctgtggaggcctgtgagaacaggtgagctgagcctggcaggtccactagaacctagctcagggaggaaccctgctggcctgagtcccttccgtgtgccctcctgggtctttatcgcagacactgggcctcaggtttcagtttagcttttgaaggagccaccagtggtcctgggcatggttgttgctgtgaagtgtgtgggtgttgtgaacttgctgtctgtacagatgtgaggtgagtgggctggtagcacagcttcaacccaagagtgacaagggaagctttcccagaagtcagacaagccagtgcataccggggctctgcagactggctatgggtgacttggcactttgcaccgtgggcgccagtttatctgctgttgtctactctggcctcaggcggaaagtgttgtaccagcgtgcgcccagaaacatccaccgccacgtgatactgtctgagatcaaggaggctgttgctgccctaccctcggtaagaggggtgtggaatgtgtgccggtcatagaatacagctacccactggtcggcctgtgtgccgtatgggttggaactggtgcagaacgtctgcccccatggccagtttctctgggtcttcctcaccatgtgactacctcggtgagctattccagcatggtgtcacactgtctgtgacagagacctaggtcttcctcacagaaccctgcagtagtccctgtaacacacgcccctgcagcagaacctcggctctgccctcacagatccctgtgtttggcctctaaggtgtggccaagggtggatcatttggtgaaccagcagctcagcgggaccctggctcccatccctagaccgtggtctgcagtcagcacagtccatcattggcaacatgagtacagatagtgccacctgtgtaacgtgccctttgccctatgtccactgactggggcaaaatgtcacatgttcccccagactattctctaggagagactgttccacccagacctaaagtttcttggagcagaaacggccacttctgccaggtgttgtcactgcctcccggcagataggtcagctctgaggtgagagcagctgaagctttggaatgcaaaggtggccagcactgctccagaatctgttttgtgtcctctcctaaggatgtgaccacacagtctgtgatggggttcgaccctctgcctcccctggacaccatctactcttacgtcagaccagagaggtaccgcccctgctttgtcctcacgcccacacaacccactttggtactttggggctcgctggggctgcccttacagactagaaggaaaatggcaaacatgggctggacaggccagtccactggggagtagggaaacagtgtgacacggagctcctcgagtccccagaggtctgagcacttccctgtgggttctgtagcaagttgagaagtgcagaataagaagccacctctggcctggtgcactgcagcagacagcagacaccacgcctagaaccaaagatgggcagcagtcacatttgtgtggaacctgtggggaaaacgtctaagaagcacgtgccacactgggaagtgacagtcacctgctttgtagaaaggtgtgccccaaccaaagggtgacaactagccctctgctatgtgcaagctgtctcccaagagcacagtgtaaggtctagtgagtgctgaaggaaggtcgtgtggctttgggggtgggggggtaagcgctgacgtgggcatgcctgttgtgtgcatggggcagcgttagaatctgggtcatgaaagagctctcttcccttccctcctagccttcacggctgccctgcctgggtccattgctcccatgtctgtctcaggcaagagccacaggccttctagaccctgacaggaggtagtgagtagagacttccgttaaagttttagattaatatgagaattttcagtgtgctcagaaacatcctaccaggctgtcatagcccagccattctagtcttctaccatgctcatggggtccccagacataagtgtgaccacactgtgctatagagctgtgcttggcccctgcaggggcctcccagggttgcccttacctttcctgtcatcttttgtgactgacccgtcttccccagcatcatatactgtagtcaccttgtagtctctccatgtgacccagcagatgaggtccctaaagagccagcatctggggctccctccccacttcccttgttgccctcgggcaggctagtagtcagcagtgctgaccccagatcctgatgtgcagtttagggcccagagcctgagttccactcaaaggctgcctgtccccagcagttaagagagtgggtagggacagctgacccgggctggaaccccacagtgtctgttaactttaattttctgacccctttccctcctccctccctccttccctccctctctcccctttcctttcccttgcttcctttctctctctctctctctctctctttctttcttttaattttcaggctgagtccagtcagccacggaaacacaatcgccctcttcttccggtccttgttgccaaattacaccacagaggtatgttgattaagcacgctggtctttcccctcccaagttaacatgggcaagtcctgctcagggtggaggcagaaacgggtgagactgtaccctgcctgtggtgccatgcttataagtggggacttggcctgctggagttgcgtggctattctaaggtgagtggtgtgggctgagaggcggctcagcatcatggtaggttggctttggctaagtgagcgcatctggctttctagagcagctgcttcttcttctgggcagggactttgggaggggacaggctcaatcttggggcctaagttgcctcagccgttgaacccaggatctcaagtctacccagactcaagtctatccccacttagctgtgtctcattgttcagggggagaggctggaggaaggagtggccgggggtccgaaccgcaatcaaggcttgaacaggctgatgttggccgtacgtgacatgatggccaacttccacttcaacgacctggaggtgcctcgggaggacaatcctgagggcgagggggactgggactgaactgtccagatgctgtgcccagagccgtgcagtcacgttcccgaattcatttctggttggagttaaccagttccgagtagaaatgctgaccatgccatcacccgtgtcttttgttttccctctgaagggagtgggttatactctgggtgagcttcctccagtgtcctcagaaacagtcccagaagcagtgcgccccacactgggtgcaccctatcatgtgcctcacacttcagcatttgtaacatggtgcatagaagggttgtcccagggtctgcagtaccaggaccctatctgctccttgctagaggcccctgaaccttccacacatgctacacccagcatgtttgcaacactgaggtcaaacccagggcctggcacatggtctgctgctgactgacagtctcagcctgggaaccttagaggaaactggaagggctggaagtgtcgcagctgggcagctgctcccttagtatgcactgcaaaagccagcggtgctggtgttcgtgtgtaatctcagcattcaagcagagagggggacaagagggttagaagttcaggatcaccctctgctacataattaagttcaaagccagtctgagttatatgagatcccatctcaaaagagatgcatgaggggcctagaattcaaagagacgttaaaaaaaaaagaaattgtcctaagcaggtaaggaatactttacagagattaaagggtatttgatctagggatgagtggggaaccctgaccaagaacccgagtccagtggcaggaacaaagaccatagccaggcaaggccggaggtctgtgtctcataagctgtttgtggaaagctccaggctgctgaggtgttacagctgtgtcaggtgtctcccaggcagcactgacggtttgcatcccacaaagcctagcggaggctctagtctgtggagcagagtcttagctgtgcaatgacagcgagggccccctaaatcttggtccattgatgccttcctgggagtctacgtgtttcagactggatgattgggtttggagtacacataaaacacgctttaggactgagccattctgatgtaacggtactggctggcaggcccgatggcctgaattcagtccccaggactcatgtgctgcacagtgagagctcgctcctgtagcttgtcctctgacctccacacaatacactgccaggtgcacacctacagaattacacccaggaaatggaaaagggacagtttggggttaaagcactgtgcagaggcccaggctgtgaacttaaagcacacatggagggtgactcacaactacccatgattccagctccagtgtacacttaaggaggtctcttaataggtgctctggggcaaggggccctggatgtgactgagcaggggcccagagcactgccccttcagcagaatattgagggctgacttgtttccatctatcagcctaatgtcatagcccattcctaagggggccatttacaggagggactccgtgttcaacgtacatgcctggtaagaggtcacaggtcacatgaattggtgctgaatgtctttttttctccagcatgaattggcaaggccatgaagtctggatacaggctctacaacttctgctcgtgggtcagcaggggcctgggagggcaggcctgaggggcctggggagggcaggcctaagggcatggctcccaccagttgcctcacctatccctgggtttggtgggatgatctacacccagtcctggggagggttactgctgagatgggcctcattcaatgtgagtttccaagttggaatggcctgtggtgagtttcagccaaggggaggaaggactgcctaggaatggatgtatgttgtggaaatgacaagcaagcgcggaaaacctggcatcctgcctcttcctttcagcagctgtaagtccatccggatgaggatgtgacatctggagctgcagcagctattctgcaaccacgtgacaacgaattccaaaatgaagagccatgctctaggaacagtgaagcagaggataccccaggccttcaggaacgtcccacctgcaggcctgtttcctgagaggccatcagatgatcggcttcagaagtgttgctcagccttgcaactgaattcatttctaatggtgaaaaataaaaccagtccttcacaccacctgtggatcatcatcgggaaaagtaactttctgagacagagtctcactgtgtagcccgtagtggcctggagcttgctatgtagaccaggccgccctttactctgtagaccaggctggcctcggagatccgcctgcctctgtctcccaaatgttaggattaaaagagtgcaccaccacacctaacctgcatgtcatctcaacagctttaaagtctggcctgtcacccaggtaggggtgacagtgtgtcccgctcctcccgtacctccctggcccctttcccaagaggcgcctgcctatgtgttctgtgcagaattgttggtcatttgtgcattttcatgtagtcagggagaaaacctgtttgctgcctctcagagaaagttcacaagaaatgaaagactttgaaacaaaaacatggtgatatggcctttttaactttgttttttttttgtgtgtgtgtgggtgttttgcctgagtatgtgtctgtgcactgtgtacgtgcccacagaaaccagaaaaggacatacaaagaggctgttggatcccttggaactggagtcaatatccctttttcctttctatttctttttgttgtttatctatttgcttatttttcgagacagggtttctctgtgtagctttggctgtcctgtcctcctatcctggaacttgcattttatgtgaggctggcctggaactcacagaggtccgcctcctctgcctcctaagtgcttggattaaaggcatgcgctaccatggctcagcaatcacatttcttagtcagcttgtgaatggtgaaaagcaaacctgtgtcctctggaagagcagccagtgctgttcactactgagccagagccatctctttagccccaggcatgggcttcctgggaacctgtgctgtcctgtgtgaccagagccagaagggacatgctcacattgcctgagggctttccagatctaaagacagggctgagcctctccccattgggatgccggctgctctttgcctcacagagagatgcccccttagccagtctgcaggcagtcccccctgctaagtaggtacatgctcctgtgtgccgtgtgtcacgtatgtctcccagggccactgagaagtcagccttgaagcatgagcttgaggctattcggccccatcacagcatagccaaagctggttctcccggctctgctccgctgctcccttccctggaggttctagcagttgtaccatcaacgtccaaacgagtcctgcggcgtgcatagtccccctcctctcaacactcagcagcaggggcttgcagggaggatgtggctgcctctgccagagactctttggttctgcctccctttgaagttagattgtctggagggtaaactgtagttgtctcaaagagttcattctgaagccagaaataccaacgtctctgaaaggctatggcacaggaagttagggcagggggggacacttggtctttcatgtcccagaagtgaaaagtggcctgcagtcccaggatgcctagttatcatgtggcttcagaggctaggcccgcatgcctccacagccacggctctgaccatcccattggacctaagacctccactagaagcagaataaggcacaagttgcaggcggcagacagctgggtgaatgtgacagtgtcagccctgcctctacaggcttccgtggaggcttgggacactcaggccacccagagtcactatatcctcctctgtccctgtgacacaggacacctgagggtgtgaacagtttgtaaatcaggtccaccatccaccagtgtgcagggtggtttggctagatctgctaaagctgaagagtacctgtgtcatgtctgcagggttgtactggtcggggtcatacacataagcacatgtgtgtgtctgccagacggtatacaggacctaccaacagctagtcatgatgaggctggccacaggctgccaaatgtccagcatgggccatcgacatggcggacgctgcacaacctgaatgttttaatcacctaactaacaaggtgccttagtgtgaacaaagtataagcctgaggattcttttctctatgaggttctgagacagacagtggatagtcctgaggcccagggaggcccaacacaactctgctgtaagttgtatcttatcaagcgatccgggaaaatagacctgaccacgtttgacttagagggtgtcacttctatttgtcatttattgcaggagtaaagaccaacgtctgttaatgtatgctttaagtgttgctctgtggcttgggaaccaccttgtgagcagacgttgccagagttggcaaagaaggaactgactcctagttgaacgtggtcgagcacacatttgatgccagcactctggcagcagagggaggcaggtctatttcaggttacatagtgagaccctgtctcaagacaacagaaatgactcttaaggggactgttacagacactgaaagtgccctccagcgaagccctgcctcactcccctgctgcctttcttttctttttttttctttttccaaaacagggtttctctgtgtagccctggctgtcctggaactcactctgtagaccaggctggcctcgaacttagaaatccgcctgcctctgcctcccgagtgctgggattaaaggcgtgtgccaccaccacagcccagcttctgctgcctttcttaagttactctcctcacctgtatgcagaaggggccatccagtgctactgagacagcattggataccatggagagagtccagcagcaaccaagggtgggttgctaccaccactgcgtgctatcctgaccactatgaatagtcacatgcccagctgctggcccacagaggctggagacagatctgccctgatgtggttcctggctccagggctagcatgtgctccacagcggaaatgagactcctcaagggaaggggtggggggtgagactaagaagatgggatgtgactgaccaaagcttgctggccaatagcctcggggccccctctagtcagtcagcttcctaccacacccagaactgtagttaagggaggcttcagcaagcttgggcccatgagggacttaagcatcagctctgccagagctcatctgagccccttggcatagggctctttcctgccttggccctgcctctacttgttgattctcaaagttcttggaccagcccctaaagctaccttgaagtcagtagctgagttgctgctatatgaacacatcttcagcttcaggtggaaatgccactgccattggcacacttctaatggagagtgggaatgaaggtgggaggtaggggtgcctcattcacacccagtggctgcctgaggcagcgcagcctgagagagagagaaaggaggtttcagacaacccaggaaagtgatttttgaagtgggcttggagctttaggtagggccactcagggcaggttctagtgaggttgaatgcctgaaagagattggtaagtcacaggggctttgaacacaaaagggagaggcaagaccctgtgttggagtccaaagctagttttccggtttctcggtgctgcctctgccccctagaggcagcctggggcactacacatccctggcacatgcccatcatgtggccaccctcaggaggaggggctccagggatgagttaaaagattaagagaaaagctcccttcttctccagagtcccgtctaccctggcttggcgagggaaaggaaccagacatatatcagaggcaagtaaccaagaagtctggaggtgttgagtttaggcatgtctctacctgagccacttgggaagagacagggagaacagcagaaggctaagctacttcacactggcagtgagagtccatgagcagagctcagggtcctcagcaggaagtgtctatgccatgccgaggctggcctgtccagccagaaagaacacaagtgtaaaggaaaatcggagcgtgcctgtatggaaagaggccggtctgagggatgtcagagacccccgacaacaacatgaagtgaatcagaagctgggggctgataccacctggagctgcagcctccacagaccgcttcctacttcctgacaagactatgtccactcaggagccccagaagagtcttctgggttctctcaactccaatgccacctctcaccttggactggccaccaaccagtcagagccttggtgcctgtatgtgtccatcccagatggcctcttcctcagcctagggctggtgagtctggtggagaatgtgctggttgtgatagccatcaccaaaaaccgcaacctgcactcgcccatgtattacttcatctgctgcctggccctgtctgacctgatggtaagtgtcagcatcgtgctggagactactatcatcctgctgctggaggcgggcatcctggtggccagagtggctttggtgcagcagctggacaacctcattgacgtgctcatctgtggctccatggtgtccagtctctgcttcctgggcatcattgctatagaccgctacatctccatcttctatgcgctgcgttatcacagcatcgtgacgctgcccagagcacgacgggctgtcgtgggcatctggatggtcagcatcgtctccagcaccctctttatcacctactacaagcacacagccgttctgctctgcctcgtcactttctttctagccatgctggcactcatggcgattctgtatgcccacatgttcacgagagcgtgccagcacgctcagggcattgcccagctccacaaaaggcggcggtccatccgccaaggcttctgcctcaagggtgctgccacccttactatccttctggggattttcttcctgtgctggggccccttcttcctgcatctcttgctcatcgtcctctgccctcagcaccccacctgcagctgcatcttcaagaacttcaacctcttcctcctcctcatcgtcctcagctccactgttgaccccctcatctatgctttccgcagccaggagctccgcatgacactcaaggaggtgctgctgtgctcctggtgatcagagggcgctgggcagagggtgacagtgatatccagtggcctgcatcctgtgagaccacaggtactcatcccttcctgatctccatttgtctaagggtcgacaggatgagctttaaaatagaaacccagagtgcctggggccaggagaaagggtaactgtgactgcagggctcacccagggcagctacgggaagtggaggagacagggatgggaactctagccctgagcaagggtcagaccacaggctcctgaagagcttcacctctccccacctacaaggcaactcctgctcagcccttcagctcattcagcctgggctctcctgctgggacagacatgaagtctctaagttaaaagaatgacagacaagccgggcggtggtggcgcatgcctttaattccagcacttgggaggcagaggcaggtggatttctgagttcgaggccagcctggtcttcagagtgagttccagtgacggccagggctatacagagaaaccctgtctcaaaaaaaaaaaaaaaaaaaaaaaaaaaaaaaaaaaaatgacaaacaagagctaagggggagcaactactcttggtggaagcttctgataagaggatttgtggccatgaaaacccagccatagccatgcagtaggcagcttaaggaagtgagacccttcctcagcacatggagcagaattgtagaatgtgcatcttgcaggaggggcctacccatttgcacaagcggtgtgggactgacctaaaaatggctcctgggaatcccaagaggtgggcacccaactgctcacaccagcaggctactctgtcaagtgcctcctccaccagctgcaggggaggctgttggcttatcactgaccacagcctgtgtggctctgagccaggaagcagttgaaatgctaaggtcagagggagggagcctccttgccatcttccctagctctctccagaagctgagtgaagtttgggtgagaggacagggagagtggtcacattagggagatgggagtctcagaagccacagctagctgcctgcctgatttaggaaaccacggtcccgtcttggcttcctctatgactacaaacttcagatcagagcaagcagcggcagaaaaagtttcctcgtgcctctatggtgacaagaatccctttgttcaggctccttctggttcatccatacactgtagcaggaccgtagcatctcagcccctgatatgacacatccgtaaccttggccagagcctgtccctttcctgcccccaccccaccccccatgtgtaggactttcaacctactttgagctctcctgagaagcccaggggtggagagtccctgaggcacacgtagggtggaccaggaccaggggctgaggtctgtttctatgggacactgcccttctgggaggaggtggggtggtctcagtgctctgtcagatttgggaattagacaagacctttcaggcgtatctgagtcccaggagagtagcacctggggtgaactaagaagcttgcacatccctgagcctttctgctgctacaacctgggattcctgcagcagagtctatcttgagtccccactggtactgaacacttctttgtcctcctccttggggtggcctctcagtctggagtgagatgccctcaaccatcaagtcaggaaatggcaccaggccaggacctagccacactatcagctccagccctgctggactgagattggaagctggttcccggcagggccagcctttgctggaagacaggaccatgagtcagcctttagcctgacaccatagctccctggggacacagagagctctggcctgatgtcatctgtcagagaagcatcccaggcctctggatgcttctaagcatcttctctgtccagacaaggagacagagacagatgctcacccaatacttcttgagccaggccagctggaaccacagaaagccacatcatggacacattgtgggggaggggcatctcttgagaacaaaagacccatttctaaactcggctaacttggatgcttaccctcagagaaagttgtatgcgcagccgctctatccagcgtgcacccgtgcgtgcaaactggacgaaggcatctgcaggtgtttttaagctttttagcggctcttgtgaaatgaatgtttgtggaccattgaagtgtggtactattgtctcagattcttcccgaagaattttctgtcactgaaatatcaaatagtcctcataaggtgtcactggtcctagatgaatattaaatcagtgttgtctgtgaatttgcatgccctcctgattctgcttcccaatgggccccctccacacacagtctccttacctaggtagctccagctcacctcgtgccccctcttcaccctcacttgtaccagaagcacaagggtaccaatgacatcaggcatggctcagacaaaaaaagactgttcgacatgctccactgagtgggttgtatatccttagaatttttcacagagattttcatggagcaggggtacttgccagatactgtgtgtgcatcctcacaccccaggtacatttgcaccctcggcgcagccctttgtggagccgcggactggtagccctctcttctccagaaaatagtgacctcagagttcggagctataatccgccaccgtcctgactagcgtccccaggtctgcacagaggtctcaagaagggtttcgcttcccctgcctctcccacctcaagcgactcggcggactcagagaatatgggtcttgattcttaagcacttgagagaaagaaagaccctcttcacaaagctgcagggtggggatggggcagggacaaaatggggaggcagctactggggtggggcactaaggggcctgggttctattgtccccagagcggattgcccaccggtggcccctcctccgaaggcgcggccagacttgctccgcattgtgcgggcggatctcggtgccggtgctgatgctgcagagcctgccgcattgtgcggcgctccagcattggcccgcagcgcttacatcagccagcgagggcggggcagcctcttataagagggcgcggcggaggctgccgatcctccgcagcctgctgtccgcctgccttttcgtctctagccgcgtgaagtcagcatgagggagatcgtgcacatccaggccggccagtgcggcaaccagataggggccaaggtgaggctgagccgtccggcgtcctgcgtccccacaagcgccagccccagggcggtgggtggagggagagaaaggcgactctgggagccgctagcggaacaaagggaagagcccagccccttgccccgctcctgggaccccggggtccccaatcggttcccctcaatcacgccactctgcactgcgcccaggttgcaggagaaggctgggggtaacccttctgactcgcattcccatccattctgcgcacccacacacaccatcaggtacaggggatgtggttggggggcgccgactgggcgtggccttctttgaggttgccacttaagccttgagtaagatgggtgtgtcgggcaactttgggtggggctctcccctaaaaccataatgactgtacatgcctggatccccactggagaactagacagtcttcagggagcaaggccgccctcatatccccaaccttgttcagctcacccagtttccttgccccaccctgttcctttgttggaggagttcggcctgaactccaatgaccttgatccagaactggactctgaaaatctcccatctctaactgtgcgctcccaaggcctcccagtcgggattgagcacagaacaaagccgactgcaaggattgcctcaatttcccctctattgttagcccgcatccaggtgttgaagccaaggcaaaagaaaaagaaaaagaaaaagaaaaaaacggggggggggcgcggggttggtgcagtgactccgcaatcctactatcattagtgaggtagctgtcctgtttccaagtccttaggagactgttccttacccaaggtcacacagcaagtggcagacagaactacttgattcctgcagaagcccaacctccacttgggttgcatttgagtgggtggggtcagctacctcaatcttctcccttctgaacaacatgaaacgggagctttgtccagatgaatgctggacggggcttagggatgctagttcccaaaggaggaggttgggtagacaggtcctgggagggaggggacgaagcaaagagtacctctggaggctgttgccatagaaaccgggcaggaacaaaaaagctaattaccacgggctgggccagtcacgtggctgacatgtaaattacaagtttggctcttgggtggaggttcctctagttaaaggggaagggaagcggcaccacagagactccctaatcacaggggagacagctgcttctgccctacaagggaaatttgggcggggttgggggggtggcgggtaggggggcatacagaggaagcctaaggcaaggggcctcagatcaaatcaggactcctgggatgatcgctgacagctgccctggcctgaagggagggtgagggctcattaatgtggtcacaggtgccaggctttccctggacgaacatctgctcctgaaagggcctggggtgagtgggggagggaaggtttgccatcggaaggcctgtttggtgagcttgctgcatctgtgctgttctgtgctctcctctgggtctcctgttgagtaagggcctagaagtcaggtccaccacgcccaggctccgtgtgttgcgctatggccacagaacatttctgagtgctggacccagctgaggtctcttatgctcctcagcactgtggcccataggcttgcccattttttttaatatttagggtttttatatatatatataattacgagtgtttaaatttttaatgccaattctttttaacaatgcaaataatgagtaaattttcttccatttccaccggctcccttcttagtaatcagtacaaggcgtttttggcaggttccatccagccctctgccctggaagatctctgagaccagactgaaggcccaggccctgtgggacgttacctgcttagtgtctgccccagggaaaataaacttccttgaccagatttacttcctattttggtagctggcccttgggtcactgctgcgagctacaatggagaaagttctccctagccacctgcagcaactgagggagtgggcacaaagagctgcttttttgcttatcggtctttgggtggtccctgtcttagcacaaaggactgctggcttcagagaggtgactgggtagaagtatgggctgggtggggacagggagagaagtgtgaagccaggagaatttcggggaagcagcagaaggggggccttagcaattcataagtttctcacccgctgtgagcgtgttaaagcaccaggcccaggctggtgcactgttacaccttgtgaagtgtggcatgggtgtcaccctcccttaaggctgagaaagatgagggttatggaagctgagtcactcagcttcagatcacaccatggatttgggcaaggcaggaattttagtctaggtgtgtgcagatgtgtcaaggcaggcggtgacatgtgcccccaccagcagcagatgtgactggtctaccctttgtgtgctccctttgttagggcctgagctcctagatgcattctcctataaaggggtgccctagtaagtgtctttacggagcttttgtctatgactcctgtctgtgccccatcagctgccagaacacacccaccccagtagaagtctctgaagggtgtgacccattggagagccaatgggcccggtgagaagggtgctgagagttttaggggaattgaacatcttacagggcttttgctcctgtctttgggagccacacccaactctgcttctgttcatgtcccactaccctgctgtcgttggcgaccctcgccccaagtgggtcagcacctcggacagcaaccccgcggtttgcagactggagcctggagtttcaattgggttcactgcaccgggtggttttattttctgtagtgatgctacttcatttatataattgtattaatttacatattaaatagtctgcggtaatatgttcttataatgtcttttgtgtgctattctatgttagtgtcttaatgtgtagctcagactggccatgaactcatggtcctccagcctccaccttctaagtactggtattattacaattgtattctactggactgggaagattttatttttgaatcatgttttattatttgtaatttatatgttgatatgtttctcgtgttaaaatcaaaacaccggatagtggagatgtggctaaagcacgtgtttagcatgtaagaagccattaggtgcacactcatagttccagttactggagaggctgaggcaggaggattgacaagattgcttcttgattctaaaaaaaaaaataatgataataaaataaaaggaacactgcagataaggtatcctactatatattaattttaaaatgtatatatttaatttaaatagtgtgtgtgtgtgtgtgtgtgtgtgtgtgtgtgtgtgtgtgtgtgtacatgcctggctcaaatactgatcagaagaggctatcagacctctgaaacttacacacagttgtgagccaccatgtgggcagtgcttggaactgagcttgagtcttctataacaacagccatgtgtccagcccatggtgcacaccacatttgtgcacacacacatgcacatgcccatactcacccaaactcagacacactcacacataattgaaactaaaataaaaattttaaatttatttattttatgtatatgaggacactgtagctgtcttcagacacaccagaagagggcgtcagatcccattatagatggttgtaagccatcgtgtggttgctgggaattgaacttaggacctctggaagggcagtcagtgttcttaaccgctgagccatctctctaacccaaaataaaaatttaaaaatacacaaaagagatgaaatccaggggctggtgagatggctcagtgggtaagagcacccgactgctcttccgaaggtctagagttcaaatcccagcaaccacatggtggctcacaaccatctgtaacaagatctgactccctcttctggtgtgtctgaagacagctacagtgtacttacatataataataaataaatctttaaaaaaaaaaaaaagagagatgaaatccagacccctttgatgagggatggcttctgagataggtccctcagaaagatccctgtatgttctagagtgatgatgatctgtttggactatttttaggcttttaaagaattttatttttttgaaagataattctatgagtgtgggtgtcttgcctgtgtgaacatctatgcatactatgtatgtacaaggccagaacaggagttggatgccctgaccctggagtcacagatgatggcttgctgccttgggagattttgtgagatttgtgaaccaatcctggtcctcttcaagagcaagaagtggtttttttgttttgtctgcttgttttttattttaaattttatttaatgtctgagtgctctgctacatatacatctgcctgcctgaagagggcatcaaatccctctatagatggctgtgagccaccatgtggttgttgctgggaattgaactcaggacctctggaagagtagtcagtgctcttaagcctgcaacaagtgttttggggttttgtttgtttgtttgtttgtttgcttggtttttttttgttttttttttgttttttttttttttttttttgagacagggtttctctgtgtagccctggctgtcctggaactcactctgtagaccaggctggcctcgaactcagaaatctgcctgcctctacctcctgagtgctggaatcaaaggcgtgcgccacgacgcccggctcaacagtgttcttaactgatgagccatgtcaccagcccacttaaaagtattttttactaattaaaaatccaatggcaccaaaatgtagaaaaaaaatgtgaaaagtctttctgtcagcacaagccgatgccccaggactggcacttgctgactgttttctgtcctgctttcacctctgagctgtcttctccacaagactgccacagagaggccctttgtctctagacctttgtatcaacaacttatctgccagtcactcccctgcctgaccagtgatgagggatctcagagcccaaggaggcagcccccctccccccccctccccgcaggcaggctgggtagtctgcatgtcctgataaaatgtcttcctgtgtgcagccctttcatcccctccctccctggcccccagaacagaaggctgtgttctcacaagagcctgttgtcatgcagtcagcccattgtacagagtgggaacaccaaaactaaggccctatggggcaactatgcaccctgcatctccgtactgtcttgcccctctgaaatgatggcagccccacgtgaggagcattgcgttcttgtgcaaggggctgagtgtagcagccagtgagccaaccatcctgggtgttgccaggctcctggatacggtggcatgtgacctccgacaagccattctgctgctggaaactgtggtccttcacagatccacctgtgggtcacactgcctgaggctaatgagctatcaagatggactctgtcagaggccatgacttgcccaggctctgagggtcacatgtaacagctagagccccatgctggacctgatctctctgcttcctgtgcttccagctgctctgggcagctttctaccttgtgtgtgcctcgagctgtgtagaacccacctgtgtcttgagtcctagtccattctagggacctggttgttagtaccaagacactcctagccccgcctaactatgtgacccttgagctgcattgccaggccaatgcccctcaatcccacaatccacttggctcaattcccaccctcactggtgtgacgtcattttccctataaattaggagatcaccccctcctctctctctctttttctctctctttcttctctcccccctctttctctctttttcctcttctctgcccttctacctgcttcgccacccctctgcctctgcacaataaacctctcccacgtggaaacaccttagcctggtctgctgtttggtttatctgctcaaaatatatatgtattaatattgcttgatattaattaattcataaaactggtaatgtcctccagatagtgcagagaacaggtatgcatatttactcttttctaaagccttatgttagatctagaaagatctcagagttttttaattttacactgagagctttaagacttcagaagaagccgggcagtggtggcgcacgcctttaatcccagcactcaggaggcagaggtgggcggatttctgagttcgaggccagcctggtctacagagtgagtcccaggacaaccagggctacacagagaaaccctgtctcggaaacccagacctcatgagagcacaggttcggtagagcgtcgatgtgtgatgagctctttctttccttctgtcctcagttctgggaggtcatcagcgatgagcacggcatagaccccagcggcaactatgtaggggactcagacctgcagctggagcgcatcagcgtatactacaatgaggcctcctgtgagtaccgctccacacccaccctgaccccggcaaagagggctcccatgtgaatagagtcctagcgtccatatccccacctttcttgatttaccaagaggctggcgggtatgactggaaacgaggcatccaaattgacaggataaagagtggttaccgggctggagagatggctcagtgcttaagagtggttactatggtgtgagatgaaaatatatttaatggtggtgatgaccttatgtagtctagggacaggcaggagactcaatgatacatccttagcaggggtcactgggggcttgattgaggctacttgataattgatacagtcttttaattttaattagatattttctttatttacatttcaaatgtcatcccctttcctggtttcccctccaaacaccccgtacatcccccctcctccccctgctcaccaacccacccactcccgattcctggccctggcattcccctacactggggcagagagccttcacggaccaagggcctctcctcccattgatgattgactaggccgtcctaattggtctt

SEQ ID NO: 1066 - DNA, 1261 bp, Mus musculus
ttcctgacaagactatgtccactcaggagccccagaagagtcttctgggttctctcaactccaatgccacctctcaccttggactggccaccaaccagtcagagccttggtgcctgtatgtgtccatcccagatggcctcttcctcagcctagggctggtgagtctggtggagaatgtgctggttgtgatagccatcaccaaaaaccgcaacctgcactcgcccatgtattacttcatctgctgcctggccctgtctgacctgatggtaagtgtcagcatcgtgctggagactactatcatcctgctgctggaggcgggcatcctggtggccagagtggctttggtgcagcagctggacaacctcattgacgtgctcatctgtggctccatggtgtccagtctctgcttcctgggcatcattgctatagaccgctacatctccatcttctatgcgctgcgttatcacagcatcgtgacgctgcccagagcacgacgggctgtcgtgggcatctggatggtcagcatcgtctccagcaccctctttatcacctactacaagcacacagccgttctgctctgcctcgtcactttctttctagccatgctggcactcatggcgattctgtatgcccacatgttcacgagagcgtgccagcacgctcagggcattgcccagctccacaaaaggcggcggtccatccgccaaggcttctgcctcaagggtgctgccacccttactatccttctggggattttcttcctgtgctggggccccttcttcctgcatctcttgctcatcgtcctctgccctcagcaccccacctgcagctgcatcttcaagaacttcaacctcttcctcctcctcatcgtcctcagctccactgttgaccccctcatctatgctttccgcagccaggagctccgcatgacactcaaggaggtgctgctgtgctcctggtgatcagagggcgctgggcagagggtgacagtgatatccagtggcctgcatcctgtgagaccacaggtactcatcccttcctgatctccatttgtctaagggtcgacaggatgagctttaaaatagaaacccagagtgcctggggccaggagaaagggtaactgtgactgcagggctcacccagggcagctacgggaagtggaggagacagggatgggaactctagccctgagcaagggtcagaccacaggctcctgaagagcttcacctctccccacctacaaggcaactcctgctcagcc

SEQ ID NO: 1067 - protein, 313 aa, Mus musculus
MSTQEPQKSLLGSLNSNATSHLGLATNQSEPWCLYVSIPDGLFLSLGLVSLVENVLVVIAITKNRNLHSPMYYFICCLALSDLMVSVSIVLETTIILLLEAGILVARVVQQLDNLIDVLICGSMVSSLCFLGIIAIDRYISIFYALRYHSIVTLPRARRAVVGIWMVSIVSSTLFITYYKHTAVLLCLVTFFLAMLALMAILYAHMFTRACQHAQGIAQLHKRRRSIRQGFCLKGAATLTILLGIFFLCWGPFFLHLLLIVLCPQHPTCSCIFKNFNLFLLLIVLSSTVDPLIYAFRSQELRMTLKEVLLCSW

SEQ ID NO: 1068 - DNA, 38636 bp, Homo sapiens
  misc_feature (1)...(38636): n = A,T,C or G
gggagggacgacggcgagagggagaacggagaaaggagacaacggcgcggcgcagagcgaggaagaagagggagggagaggagaaggagaggggagggagagagaagccacgggaagggagggggggggggagcggggggggagagggggggggagcgcgggggggagggggggaggaggggggggaggccgggggggggggggggagggggcgcgggcgtcgggggggagaggagggggagggggcgagggggtaggggagggggggggggaggggacggggggggggtaaaaaagagagactaacagaagcagcgatagagagagaacgacaaaacaggggagaggaacaggagaaacgacaaggggcaaaaagaacgaggggagagaaaaagagaggaggagagaggagacggcggtggcgagaaagacgagcgaggaaggagcaagagagcgaggaagaaaaggggaccgcgaggagagaacgggaggggaagagcaagagggaggaaggagagggaagcggagagaggggggggggcgggggcagacagacgaggaataggaaggagaggagaaagacacggggaagaggacgacagaaaagcggagagagagggacagaaagagggaacgaggggggagaagagagaggcgtgggagaggaaggacaaggaaggaggaggnnnnnnnnnnnnnnnnnnnnnnnnnnnnnnnnnnnnnnnnnnnnnnnnnnnnnnnnnnnnnnnnnnnnnnnnnnnnnnnnnnnnnnnnnnnnnnnnnnnnnnnnnnnnnnnnnnnnnnnnnnnnnnnnnnnnnnnnnnnnnnnnnnnnnnnnnnnnnnnnnnnnnnnnnnnnnnnnnnnnnnnnnnnnnnnnnnnnnnnnnnnnnnnnnnnnnnnnnnnnnnnnnnnnnnnnnnnnnnnnnnnnnnnnnnnnnnnnnnnnnnnnnnnnnnnnnnnnnnnnnnnnnnnnnnnnnnnnnnnnnnnnnnnnnnnnnnnnnnnnnnnnnnnnnnnnnnnnnnnnnnnnnnnnnnnnnnnnnnnnnnnnnnnnnnnnnnnnnnnnnnnnnnnnnnnnnnnnnnnnnnnnnnnnnnnnnnnnnnnnnnnnnnnnnnnnnnnnnnnnnnnnnnnnnnnnnnnnnnnnnnnnnnnnnnnnnnnnnnnnnnnnnnnnnnnnnnnnnnnnnnnnnnnnnnnnnnnnnnnnnnnnnnnnnnnnnnnnnnnnnnnnnnnnnnnnnnnnnnnnnnnnnnnnnnnnnnnnnnnnnnnnnnnnnnnnnnnnnnnnnnnnnnnnnnnnnnnnnnnnnnnnnnnnnnnnnnnnnnnnnnnnnnnnnnnnnnnnnnnnnnnnnnnnnnnnnnnnnnnnnnnnnnnnnnnnnnnnnnnnnnnnnnnnnnnnnnnnnnnnnnnnnnnnnnnnnnnnnnnnnnnnnnnnnnnnnnnnnnnnnnnnnnnnnnnnnnnnnnnnnnnnnnnnnnnnnnnnnnnnnnnnnnnnnnnnnnnnnnnnnnnnnnnnnnnnnnnnnnnnnnnnnnnnnnnnnnnnnnnnnnnnnnnnnnnnnnnnnnnnnnnnnnnnnnnnnnnnnnnnnnnnnnnnnnnnnnnnnnnnnnnnnnnnnnnnnnnnnnnnnnnnnnnnnnnnnnnnnnnnnnnnnnnnnnnnnnnnnnnnnnnnnnnnnnnnnnnnnnnnnnnnnnnnnnnnnnnnnnnnnnnnnnnncaccagcctggccaacatggcaaaccccgtctcaactaaaaatacaaaacttagccagctgggtgcagtgactcacgcctgtaattccagcagtttgagaggccaaggtgggcaaatcacaaggtcaagagattgagaccagcctggccaacgtgctgaaaacccgtctctactaaaatacaaaaaaattagctgggcgtggtgccgcacacctgtagtcccagctacttgggaggctgaggcaggaaaattgtttgaacccgggaggcacaggttgcagtgagtggagatcgtgccactgcactccatcctggcgacagaggaagactccgtctcaaaaaaaaaaaaaaaaaaaaaaattgggcgtggtgggttgtgcctgtagtcccagctactcaggaggctgaggcaggagaatcccttgaacccggaaggagggggttgccgtgagctgagatcacgccactgcactccagcctgggtgacagagtgactccatctcaaaaaaaaaaaaaaaaaaaatcctccagtaaggtgtttggaggaaggatggtggctgtgctgagacggagaggatgaatgtgccctcaccaggctcaggggagagggtccttgtgttccccagcagagtcacgatgtgccgaggccctgtgccaggagcagagcacacggcacattgagagaacaaaagccccatggccagaccgggagagcagggctgcggcgcaagagggccaactgccaggcggccggtgtgtctggctttcagaatccgggtcattgaaaggctttttaccttttccttctgggctggaaagtacttgccttacccaggccccgtcacccgcacagcggtcgtcgtgattatccctgccggcagggtgttgcagcattgaggaatcgcggttctttgctgcctccctccgctgtggagcccaggctttcgccctccctagagctcctgaggcctggccgctcagcgtcctgtagagccgggccggtagcccttcgcaccgtgagggtctccgcttaacgcaggccctggaagcttctgcctttgcgtaaggagtgggtgctgaaggagacgttgaaactgcagcttttctgaaaagcaaggcacctgtgcagtggccgaggatggctgtgggagcctcgctccggacgccacgcctgcctcagctgagttggtctccctcatcctgttcccgctgtccacagccccaccctaagctgatgaggaagcctcacgggccacccggggaatccagggcctgtgctcagctgctgctgctctgccccctggcggcccctccgtgtccctgcgagggaggcagctggcaggcagccccgtgagccgggttgggtcccacgagtctcagttcagtgtcgtttctgacttttcttgactttctttcaggctaagtcctatcagccatggaaacaccattgctctcttcttccggtcactgttgccaaactataccatggaggtaggttgagctcgtcccagcccctgcctccccagtgggtgcgggcatatccattccagtgcgaatgcctggagcctccttgaaccaggactgtgccagccggcacagggagcagggaaggaccaaggctgcattgtgccagtggggtgcccattctgccggggaaactggggcctgcccagatggtagcagatgcagggccgtgagtcagccggcttgatcccactctgtgcctggcttggtctagacacggcatttggttttgagagcttcctcctcacagggacctggggagggttcagggtccggtgctggggcaagggccacctcgggctccacagtgcctcctgcttgggccccgggcccctagtcccagcacagacagcccccttctcagacatgtccccttgctgcagggggagaggcccgaggaaggagtggctgggggtctgaaccgcaaccagggcctgaacaggctgatgctggctgtgcgcgacatgatggccaacttccacctcaacgacctggaggcgccgcacgaggacgacgctgagggggagggggagtgggactgagcgtccgcagaggtgaccgaaaagccgtatgatgatgttcccgatttctctgttggtcggagtcggccagttgcctgaagtagggaagctgagtgtgtcgctccctggtccactgtttctcctataaatgtaaatgggtcacgctctgccgtccgcaccttctcctttcgcaggcactgagcgccgtcccatgccctcggattcgaatcacactcagtccattctcctcccagtggcttgtgggtgaggtggggcccagaccccatgcttcctgtgctcccaggatctgggcacgggtggagaaggggccccacggggtcttcagtgcaggtccctgctgaatgccaaggccctgggtgcacgtcctccttgaacttgctgtggagttcgtcaacagagctgcgtgccttgttggtagagggtctcagggcagggctggagcagagaggcccctatgtggcagccggccttcagtcttgttcctccaagcaagtggggtggagatgttggggtcctttggctggatgccactatctgttgaatctgacaaaataattttcttttttttttttgagacaagagtctcactgtgtcgcgcaggctggagtgcagtggcgcagtctcggctcactgcaagctccgcctcccgggttcacgccattctcctgcctcagcctcccgagtagctggggctacaggcacccgccaccacgcctggctaatgtttgtatttttagtagagacggggttccaccatgttggccaggatggtctcaatctcttgacctcatgatccgcccgccttggccccccacagtgctggggttacagctgtgagccaccgcgcctggctctgccaaaataattttattagagaacttgagggcagtgcccagaattgaaggcgaagccccagaagcatgttttgcagagaagtgcccagggaagctctgagggcccatgtagcaaagatcaggggatagtcggtctgagggtgaatgggccactcggaccaagaccccagtcttgggggagggcttagctggagcaggtcctggcacagttgactgatggtgcacagaacccgtgcatcccacggccccacggtgctgcagctgcaggaggggcggaggctgcagccagacagcatcagaagccagcgtggttctggaaggatcgagaacaccaaggtgttagggctgcagcaggggtcctgtcccctggcacccctcaccgccctaatcttttacccttaggaggcagcagacacgaggggctgcccgaggctctagggcggccagtgaggcaggaaacatgttccagccccagctaggtactggtccgtggacccacctcccagaaagcccatcactgtgtaatcgtctaacctggggctcgccgaggcctgtgagttcatccttttggcagttcctggtgtctccttactctgctcagcatttcctgggcgggagcttagggtgcaggaccctccccaggacgacgagggcccagtgtccatgacaagagttggcccgagggctgagccacgtgtgcccatctcagacgtgggcctgagggtgcagccctggccctgtgctggccatttctaggagcggtgccctgaggtcccagctgtgatagccccacgctctgcaggaagagatcatgggggcggggagttggtgctgcggcctcgttcctctctgcagtgagtgaacgatgtttgtggtcagcaggagcctgtggggagcacaggctggtcctcctggtgtcccacccacccctttttccatgggggatctgcactcatctccagggaagatggttgggagataaccccagtctgccctaggtccccaccctccacagccagggtggtccgtggtgagcttcagccatcgagatgcgggagtctgctagagtcttcagggtcttttctctgaaaatgacaggctagcaaggagacctgggtcccctgcctcttccattccagatgccttgagtccacccaaataggggatgtgatgtttggagctgcagcagccgccctacggttgggagtcagagaagagccggtgttccagggacaatgcagcagaggctgagcccaggcctgctgtcctgagaggtggctggatcactgacactttggcagtggtgctggggtttatgtcatgacctgcagctgagcctacttccaatgaccgtgagatctgaaagactgttttgagggcgtagcctctgccatgattgtggggaatgctgtcctgtttcctcccttggccctgctcagcccagcgagaggctgaggcacacgtggctccccgggtgcccacaggcagcgtggctcaccagccgggcccttttccactgagccagaaccccccaaagccttcaatgcaggcaccacggtgagcccacgagaaaccctgcttgccacctcccacacccccacccccaagttcaaaggaaatggtccctgaaccaagggctgagatcagctgtgggtccagctgtcctggggagctgtactggagcccaccacggtgggactgttggtccggcggtgacccccacctccatgtctgtggccgcagctggacaggccactccctgggccacagagatgttttacctctcgcagccctcgggcacacattgagcagatgtgtgtgtgtgtgcgtgtgtgggtgggtgcgcatttgtgtgtgcctgtgtgtgtgcgcatgtggtgtgggtgcacgtgtgtgcacgtgtgtgggtaaacattgtgtgtgcgcatacgtgtgtgggtaaacatttgtatgtgcacgcgtgtgtgggtaaacgtgtgtgcgcacgtatgtatgtgtgtacatttgtatgtgtgtacatttgtatgcatgtgtgcctgtgtgtgtgtgcctgtgtgtgtgggtgcacatttgtgtgtgtgtgtgtgcctgtgtgtgtgtgtgcacgtatgtatgtgtgcacacttgtatgcatgtgtgcctgtgtgtgtgggtgcacatttgtgtgtgtgtgcctgtgtgtgtgggtgcacatttgtgtgtgtgggtgcacatttgtgtgtgtgtgcgcctgtgtgggtgcacatttgtgtgtgtgtgtgcctgtgtgtgtgcctgtgtgtgtgggtgcctgtgtgtgtggggcacatttgtgtgtgtgtgtgcctgtgtgtgggtgcacatttgtgtgtgtgcctctgtgtgtgtgcctgtgtgtgggggtgcacatttgtgtgtgcgcctgtgtgtgggggtgcacatttgtgtgtgcgcctgtgtgtgtgggtgcacatttgtgtgtgtgtgcgcctgtgtgtgtgggtgcctgtgtgtgtgtggggcacatttgtgtgtgtgtgtgtgcctgtgtgtgggtgcacatttgtgtgtgtgcctgtgtgtgtgtgcctgtgtgtgggggtgcacatttgtgtgtgtgtgtgcctgtgtgtgggggtgcacatttgtgtgtgtgtgtgcctgtgtgtgtgggtgcacatttgtgtgtgtgtgtgcctgtgtgtgtgggtgcacatttgtgtgtgtgtgcctgtgtgtgtgggtgcacatttgtgtgtgtgtgtgcctgtgtgtgtgggtgcacatttgtgtgtgtgcctgtgtgtgggtgcacatttgtgtgtgtgtgcctgtgtgtgtgtgcctgtgtgtgtgggtgcacatttgtgtgtgtgtgtgcctgtgtgtgtgggtgcacatttgtgtgtgtgtgtgtgcctgtgtgtgtgttgcaggccctggatgccagccacagagataaacgcaggaagacgtctgtcttcattctcctcgtgggtcgctggtccagaaacacctggatggaaagtgctctgcaggaacggtgcctctgcctgtggcggggaccctggtgagcggatgggccagccccacgtgtcttccggccactcagcatgcagtgtttccaggggcactaagagaccaaaatcgagatatgattagctgtaggatgtcatctaatcacagatcatcccgaggctaatttatctcccccatgaccataacacatcaaaaagttgactttttgcagctcggctgtgcctcatcttcccacgaagccccgacaggcacatccagtgaggaaccacagtgggagtcctgtggcagggtcaccccacttccgatgccctccagctgcatcttggcacgaaaaaggctgcccagttctcatgccctttcaagtcccgggctggggggtagcagtggaggctggggttaaccgccgtccgtctcaaaggcctcattgtggagctgcaaacacgaacgtccttgaaatgtgaggggacagtgctctggggcaggggctgctcactggttcatggccagaggtgagcgggctctgggtctgggtctgtgaggtgctgtggacgtcgggggtgctcctggggcagggacacagccacggccctcacaccagtggagccgtcttccttcccgaggcagaggcttggccttctcacaccttgggacccttctctcccctgtgctcatgctggaagcacagcgtgagggggcaaaggtcatgggaggcaaaaggctgggctgaggccgaggctctgtggctgtggccggacaccaggtcctgtggtggtgtgggcagggcgcgctctctcctctgagcagcctggggctgcgtgtgtgaacagaaacaggcctgccgatttgaagatggtttgaccaagtctcccaaagctgaagagaggtccctgcccatgtcccccgggtggcaatccacagacgcacctgtgtccatcagacggtatcgttgatagggagtctgaagccacccagacgtggtctgttcacgccgtggacaccacggtctgaggcagacggttacagccaccggcataggcgaatctcagccagagagagtgaactgggacaccattcacgtgatgggccagatgggctggcagcggctcgctggagccgtccgggtgggaacgctgtgtctgttggtctggtgctgcttatgtggctggttcaggtctgtcatccgtcaacctgcatatttatcactggtgcattttcatgtatgttgtacctcaattaaaacattttagggccgggcgcggtggctcacgcctgtaatcccagcactgtgggaggcggaggcgggaggatcatgaggtcaggagatcaagaccgtcctggccaacatggtgaaaccccatctctactaaaaaaaatacaaaaatttgccgggtgtggcggcacgcgcctgtagttccagctactcaggaggctgaggtatgagaattacttgaacccagtaggcagaggctaccgtgagccaagatcatgccactgcactccagcctgggtgacagtgagacttcgtctcaaaaaaaaaaaaaaaaaattaaagcagatggggtgtgggggctcatccctgtaatctcagcattttgggaggctgaggcggaccgatcacctgaggtcaggagttcaagaccagcctggtcaacatggtgaaacctcatctctacaaaaaatacaaaaaatagccaggtgtggtagtgggtgccgtagtcccagctagttgggaggctgaggcataagtattgcttgaatccagaaggtggaggttgcagtgagccaagaatgcaccactacactccagcctgcgcgacagagtgaaactgtctcaaaataaataaatacataaaattatatgtatatatatatatatatatatttttttttttttgagactgtatctctgtttcccaggctggagtgcagtggtgtgatctcggctcactgcaacctccgcctcctgggttcaagcaattctgcctcagcctcccaagtagctgggattataggcgtgcgccaccacgcctggctgatttttgtatttttagtagagatggagtttcaccatattacccaagctggtcttgaactcctgacctcatgatccgcctgcctcagcctcccaaagtgctgagattataggggtgagccactgtgcccggcaataataatttttttttttttgagacagagttttgctcttgttgcccaggctggagtgcaatggtgcaatctcggctcacggcaacctccgcctctcatgttcaagctattatcctgactcagctgggattacaggcacccaccaccacacctggctgattttggtatttttagtagagacggggtttctccatgtcggccaggctggtctcgaactcctgacctcaggtgatccacccgccttgggctcccaaagtgctgggattacagccctgagccaccatggctgacaataataaaaaattttaaagcaaaactaaagatttataaattgtaaaatgcggttgtaacaagtatttactgtaccagtaaatatgaaaaatattaatgtcctcacacacatggaggtggcttgtgagtggtgtgagcatttcatggtcagagtttggcagttgggcgagagacaggatggattttaactcgaacatcgcagacacaaaactgaaaaccctgatgcggtgcctgcaccgttgcctcctttcctgcagctgtaaatgggacgagtaattccatccccctcccgcttccacccttcagcacagacgcagtcttcagcaaggaagtgctgggaacgccctggagtgaacccaggaagatgcctgcagtgggtgccagggcccctccccaccgtccctgctgggcttcggggccacgcccgactgctgtgaacggcctgcggagcaccacgtgcgacggctggaggcgagaggtctgcctttgatgtggctgttggtgcagggcctgtggtgccttccgcagcggaaatggcgcgccgcccggggagggcgggagcagcgtcccgggtgcccctgtgaggatgagcgacgagatgactggagggtccctgaagacctcaccagggtgcccccagccggtccgctcccaggaagcgacacccccacagccccagggctgcagctgagggggtcgccactctggctgggcgaggctgggcccttgggggcaggcgccagagtggcctcaggctctacgagatgcctgaaaacaccaacctctccagggctcactagcattggacgctttcacgctctgccctggccggaagccccctcaccccgcgcgatgtgcaaactcctgcagggctcactcagtttccagaactttaattattggaaagttctccctggtccagcccccaaatctgccgtgaacgttgacagctgagttgctgctccatgcgtgctttggctgagagcagaggggacccctgtcctccctgagctgctgacgaggggaggggtgaagggtggggcctctggagagggcaggtcccggggaagctccggactcctagaggggcggccaggtgggggccctggtgaccaggacagactgtggtgttttttaacgtaaaggagatccgcggtgtgagggaccccctgggtcctgcacgccgcctggtggcaggccgggccatggtgggtgctcacgcccccggcatgtggccgccctcagtgggaggggctctgagaacgactttttaaaacgcagagaaaagctccattcttcccaggacctcagcgcagccctggcccaggaaggcaggagacagaggccaggacggtccagaggtgtcgaaatgtcctggggacctgagcagcagccaccagggaagaggcagggagggagctgaggaccaggcttggttgtgagaatccctgagcccaggcggtagatgccaggaggtgtctggactggctgggccatgcctgggctgacctgtccagccagggagagggtgtgagggcagatctgggggtgcccagatggaaggaggcaggcatgggggacacccaaggccccctggcagcaccatgaactaagcaggacacctggaggggaagaactgtggggacctggaggcctccaacgactccttcctgcttcctggacaggactatggctgtgcagggatcccagagaagacttctgggctccctcaactccacccccacagccatcccccagctggggctggctgccaaccagacaggagcccggtgcctggaggtgtccatctctgacgggctcttcctcagcctggggctggtgagcttggtggagaacgcgctggtggtggccaccatcgccaagaaccggaacctgcactcacccatgtactgcttcatctgctgcctggccttgtcggacctgctggtgagcgggagcaacgtgctggagacggccgtcatcctcctgctggaggccggtgcactggtggcccgggctgcggtgctgcagcagctggacaatgtcattgacgtgatcacctgcagctccatgctgtccagcctctgcttcctgggcgccatcgccgtggaccgctacatctccatcttctacgcactgcgctaccacagcatcgtgaccctgccgcgggcgcggcgagccgttgcggccatctgggtggccagtgtcgtcttcagcacgctcttcatcgcctactacgaccacgtggccgtcctgctgtgcctcgtggtcttcttcctggctatgctggtgctcatggccgtgctgtacgtccacatgctggcccgggcctgccagcacgcccagggcatcgcccggctccacaagaggcagcgcccggtccaccagggctttggccttaaaggcgctgtcaccctcaccatcctgctgggcattttcttcctctgctggggccccttcttcctgcatctcacactcatcgtcctctgccccgagcaccccacgtgcggctgcatcttcaagaacttcaacctctttctcgccctcatcatctgcaatgccatcatcgaccccctcatctacgccttccacagccaggagctccgcaggacgctcaaggaggtgctgacatgctcctggtgagcgcggtgcacgcggctttaagtgtgctgggcagagggaggtggtgatattgtgtggtctggttcctgtgtgaccctgggcagttccttacctccctggtccccgtttgtcaaagaggatggactaaatgatctctgaaagtgttgaagcgcggacccttctgggtccagggaggggtccctgcaaaactccaggcaggacttctcaccagcagtcgtggggaacggaggaggacatggggaggttgtggggcctcaggctccgggcaccaggggccaacctcaggctcctaaagagacattttccgcccactcctgggacactccgtctgctccaatgactgagcagcatccaccccaccccatctttgctgccagctctcaggaccgtgccctcgtcagctgggatgtgaagtctctgggtggaagtgtgtgccaagagctactcccacagcagccccaggagaaggggctttgtgaccagaaagcttcatccacagccttgcagcggctcctgcaaaaggaggtgaaatccctgcctcaggccaagggaccaggtttgcaggagcccccctagtggtatggggctgagccctcctgagggccggttctaaggctcagactgggcactggggcctcagcctgctttcctgcagcagtcgcccaagcagacagccctggcaaatgcctgactcagtgaccagtgcctgtgagcatggggccaggaaagtctggtaataaatgtgactcagcatcacccaccttagccccttccagaaagtgcttgaagtttgcgggtggagggatgggggaggggaaggtgggcaggggtgagagtcgagagggaagaaaggagtcccggaaaacgtggctgcctccccaggtgaggaagccacagccccagaggccccaaatgcctggggagtgtggaggtcccaaccaggcttgcgctgaccctgcttctcggttttctctccgtgctgacaaaccccagcctagaggaaggacgagcaggtgcagcagggccccagtcccctccactcttgacgctgtcctagctgcagaagaggcgggttcccagccttccctgtgaccacatgtgacctcagccgggacacatccctttgctggccctggccctgagtccctccagccatgatgagccgtgaatgggaccatccctgtccactctgagatgcctggaagggggctcagtgcaggtgggctgggggctgggtctgctgtctgcccagcactgccattctgggagtaggcaggtggggaaggggtcgggggtggagggtctgtgttcagccagtcctgggaaatgcttgatgtgaggcttctgaagatggcagtgaggcagaggcccagccggcggagaagtccctgggagtgagtacctggggatgaactatgctgcctggtgctggggagcagtggcgcccctgggccatccctctgctgaaacctgggcgtctcgctgaagagaccacctccatttcctctgcagagactgagcactcagtcagcccccttcctgggacaggctcaatggaggctgcagggccatcagccgactcctacgcaggctcagtcagcagccccctggccagccccacccctgactgccggcctcagaactgggagctgcttcctggcagggcccgcctctgctgggagaccggacggtgagtcagccttaagcccggcaccagacccctctgaggatggagcaggagctggctgccctgaggctgcaaaacttcttccctcgtggagacagggaggcacctcagacactcaccccggactcccttgaacagggacagggaggaaccccaggcagctagaccccagcagcagccacacgagcacactgtggggcagggaggggcatctcttgagaacaaaagatccatttctcgactttccaaactggagagcttcttgagagaaaagagagagacaggtacaggtccacgccacccacacacagccctgtgcacacagaccggacacaggcgtccacaggcaagttcgcagctgctcattttgtgaagtgaatgctgatttgggggccgggtggggttcgtctgtacatcgtgcactgtcagacccttcctgaaggatttttgttactgaagtatcagaaggcccttgttctaaggtggtggcactgtaatatctggcccaggaggaggtcagtgccgtgccggcgagtcctttgctcccttccttctctgaccagtaaacgcatctccagtcgctcccccgaggcccccctgcacgcagtctccgacctcagagagtgagtcagatagaagccgctgcccaccctcccccaccctggccgggttcttgcctggcttgtgcgtccttgtgacaattcctgacacggatgcgcaccgggcagtggcacgtccaggtgctgtgcgcgcccgggcccacaaagctcctttggacgctcatggcagccccttggtggaggaggtcgggtgcccaccccctccccgcccactgcggaagccggcgacccacggagctcgctctcggccgccgccacccctctgtgttcgcgcccttccgagctctgatccgacgctttgtttcttctcagtgggttcagggcctgggccagcctttacctacctcccccacccaaaaccggcaaaagctcagagcaccttgtctgccaaaagacagggagctgggatggtgcgggttggtctctaaaccggcgtggggaaaaaagaccctccgtacaaagccgcagggtggggctgtcgcaagggcggaaccgagagggtagctgggggcggggttcccagggccaagaggggccattgtcctccctggagcccggcgcccccacagccagctcctctgggagacagcccctcctttcgaatgcgcggggccctcagaccgcgcccggcccagcgctgggggatccttggctgcgggaggggcgccgcattgcgcgcggcgggcggggacgcgcggtgcggagcctgcgggccgggcggggctctgcggcggcgcctcccgattggccacccgcggtgacatcagccgatgcgaagggcggggccgcggctataagagcgcgcggccgcggtccccgaccctcagcagccagcccggcccgcccgcgcccgtccgcagccgcccgccagacgcgcccagtatgagggagatcgtgcacatccaggccggccagtgcggcaaccagatcggggccaaggtgaggctgcgcgccccggcctgtcccgggccccggggcgggaggagggaggcgccgtgccccgcgggccgcacctccagctgcccccgcccctgcgaacctgcaacaaagggatgcgcccagcgccgcgccgggcggccgggacgcggggcccccgccctgggactctcgcctgcacctctctgcccctgcccaggtgacctcgggctgtcgaggcgcagctcacgtcagtcgcgaagcctcagccccctccacacctgcgccccctccacacctgcaccccctccaccgggcctccgcaggtgcagctgggagccctgtctgggcgtggccctcttttttggggccgcggcatagccttgagtgagacgggtggggtaggcaggtttgggtggggtggggggttctcctcacagccgtgatttcctcggcccgaaccccccactggagtagccgaacgtcccccgagaggctagagccgccccgatttccccagcctgctccgacacccctcggcgtcctagctccaccctgtccctttgttggaggggttgggcctggactcgagatgaccttggtccaggaccaggctctccatcggcgcagccgctcctgggcaacccccgcggggcttgaccgcgcccacccagggtctaccagtctggggattggatgtgggaacaaagccgggctgtggggtgtggaggctgcaccgtggcgcgcccctccctccattgttagcccacctcgcagatgttggggccacgcagaaaggggcgttggtgcagctgtgcagggacccctgcctaaatcattaaggggacgtcgtgtcccctggtcctgggaggctgtccctggcccaaggtcacacagcaggtgcgagagagctgggctggcccttggttctcatcccctgcaggagccaacctggggctcgggcggggcgggttgggggcgctgcttgccaaaggatctgccctccgaacagtgttggggaacaggggatcggggggggaggctggctttgtcaggaccaaggccagggacccagctcagggctggtgcagcgctgattctgggaaggagggggtgcaggagacggtcctggaggggaaggggccagagaaaggcagcctccggaggctgttgccatggaaaccaggcaggaacaaaaagctaattacaacagggccagccacgtggctgacatgtaaattgcaactttggctccgggtggaggcgcctctgagggtgggaggcccagtagtggggagactctaatcacccaaggagacagctgtgcctgccaaggagagcctgggggaggggagacctgggggacagtggcctcaaatcaaaccaggactcccggagcagcctctgacagctgccttggcctgatgggaggggctgagggctcattaatgtggtcactggggccaagcctcccctgagcatctgctcctgggagggtcaggggtcgctggggggagggagggcaggcagccctggggctcctgggagggtcaggggtctctggggagagggagggcaggcagccctggggcccacctggggtttctccttctatggctgggatgggcccagagctgtggtcccacaaggcacttgtcaggcaagagctgggatctagaagtcaggtgcacatgcagacatcccctgaggctccacgggtagcagagggagcccttgtcccctggaccgtgtccttggctgccttgtgctctgcttctgaacactggagctcttagtttgcccgctactttttattccttttgagttgtttgttttttcttaatatatttctttttaaaaattaatacctggccgggcacggtggatgaggaatctcatgtaatcccagcactttgggagactgaaactggaggatcactttagcgaaggagttcaagaccagccgggataacatggtgaaactccgtttcttaaaaaaaaaaaaaaaaaaattagcctggcgtggtgggccgcgcctgtagtcccagctacctgggaggctgagatgggagcattgcttcagcgtgggaggtcgaggctgcaatgaactatgaccgcaccactgtactccagactaggcgatagagtgagatcctgtctcacagtaataatagtatctgattctttttaacaatgaaagcaacagagaaggaaattttctcgggggcgggggcggcaagagcgtgttcctttgctctgctgcccttgtggaatcaatgggaagttccttggccgttctcggcctccactcccgcagctgatagggggtgcaacgcggctgcttccctgtctggggtcctcgggcggtgcctggctgggcaggaaggcccgtgcactctgggcagagggaagtcggggtgactcgaggccgggagcaaagccgggtcccgggcggtcacgcggcagcgcggacgactcaccgcggtcacccctgcgctgggagccgagcccccggcagctcgcggggatgcagtaagccgggcgcagcccgccgggaggatgagaaaacccgaagcccggaaagccgagcggccgcctgcagtcaccccggggggggcaggggcgggccgggctatgcagaaacaccggggcccgcgggacacaggacgctgccccactgccgcagagctgaatctggacccccgggctttgctttcctggggcctgtgctcctccctccccggggcggggttcgcctgcagcggcggaggggggagcctttgtcctccgcgcgggctgcggcaccgcctcctcgcggctgcggggcggggctgggggcggggcctggccgtctcagccaatgggaggcggagtccctggctcgccccgccctctcgcctgaaagacctgcggagccgcgggccgggcgggaaccgcattcgggtcctggaggggcttggaggccccagtctcgcagccccttcatcggggacccccgctcccacctgccttggccactgccctcaaagcccggccccgctttccccaggaccccaagcgctgcgcgaggtcagcaccaaggacagcgcccgggccgagcgcctggcctcgaacgccgggttctgctttgtgtttccaggtttttgtttttggttatgagaggaggcctggctctgtcgcccgggctggcgtccagaggcgcgatctcggctcactgcagcctcggcctcccgagtagctgggaccgcaggcgctcaccaccacgcctggccacaattttccttttttcttattttcttttagatggagtttggctcttgttgcccaggctggagtgcagtggcgcgatctcggctcattgcaacctccacttcctgggttcaagctattctcctgcctcagcctcctgagtagctgggattacaggcgcccgccaccacacctggcttattttgtacttttactagagatggggtttctccatcttggtcaggctggtctcaaactcctgacctcaggtgattcacctgcctcagcctcccaaagtgctgggattgcaggcatgagccaccacgccgggccgatttccttttctgtagtgatgttaacaatttagtttataaaattatattttattgtttattaaatatgtaacataggccaggtgcggtggctcacacctgtaatcccagcactttgggaggccgaggtgggtggatcacctgaggtcagcacttcagggccagcctgggcaacatggcaagactccgtgcctacaaaaaataaaaaacaaaaaaaattagctggacatggaggcacgccggcctgtggtcccagctacttgggagacagaggtgggaggatcacctgggggaggtgggcagaggttaaagtgagctgaggtcatgcccctgcattctagcctgggcaatagagcaagaccctatctaaaaaaaaaaaaggaacaatatattttattactttatctcaaattataattttattaattttaactacaaaagcaattaatatattctcctggttaaaaaaaaccttaaatattgcagataaacctggtgcccatctagccacctctctctatccaagtgggaacaaatttctttttctatccttctggtccattttttttaagtgacctgtgcatatggttttaaaactttaaatagtatctaaaacatttgaacaaaatgaagccaacatgtgctgaatgttttcatgtcaagctttgtgctaaggcctggatgtgggcaccattcacacgttcatctcacagatgagaaaacaggtcctgcgaggcacgcgcctggcccacagctgtgctcgtgctgggtcttgaatccactctgctccattgctcctgctgccctgtgcctcgctctgcagaggacttcccatagatgtgttactctctccacccctcctttacaggggctggtggttgtgggttccctggaaccataaatttggggtgtcccagtgctttggggagcaaggtccccgactcaagtggactgccagcaactaaattaatgggggatcctcaaagagagtgttagggaggcaagcagtaggtgggaagcttggacaagccccaaatgcctcagggacctttctgtattttttttttgagacaggctcttactctgtcgcctggactggcatgatctaggctcactgcaacctccacccccctggctcaagtgatcctcccacctcagcctcctgagtagctggggctataggcatgcgtcaccatgcccaactaatttttttgttttttggtagagacagggtttcaccatgttgcccaggctggtcttgaactcctggactcaagtgatccacctctcttggcctcccaaactgctgggattataaatatgagccaccatggccagctgatttttttgtttgtttgtttgagatggagtctcactctgtcactcaggctggagtgcagtggagtgatctcggctcactgcaacctccacctcctgggttcaagcaattctcctgccttagcctcctgagtagctgggattacaggcacccgtcaccacactggctaattttttttttttttttttgaggcggagtctctatctgttgcccaggctggagcacggtggcacaatctcggttcactgcaagctccgcctcccaggttcacgccattctcctgagtcagcctcccaagtagctgggactacaggtgcccgccaccgcgcctggctaattttttgtatttttagtagagacagggtttcactgtgccagccaggatggtctcgatctcctgacctcatgatccgcccacctcggcctcccaaagtgctaggaccacagacaggcgtgagccactgcgtctggcctaatttttgtatttttagtagagatggggtttcaccatgttggtcaggctggtctcgaactactgacctcgtgatccacccgccttggcctcccaaagtgctgggattgcaggcgtgagccaccgcgcccggccttttttttttttttttttaagatagggtttcactcttgtcccacaggctggtgtgcagtggcttgatctcagctcactgcaacctctgccccctgggttcaagcgattctcgtgtctcagactctgaaacaactgaaattacaggtgcgcgctaccacgcccggctaatttttgtatttttagtagggacagggttttgccctgttgtccaggttggtcctgaactcctgacttcaagtgatctgcctgcctcagcctcccaaagtgctgggattataggcatgagccaccacacccagcctgaatcatttttgtaatttaaaaatttaacgcaaaaagaataaaacttagcaataacaaaaatgcacaaaagatggaaagaaatccacccctgacctttgtggagagatgacctctgataacagtctcagggtgaacgggcacctctgataacagtctcagggtgaacgggcatcccgagacactgttagcagaggtggtccatgtccatgctgtccgcgttacaataattacactatgtttattcttaaggttttaaaaacatttatttttaacaaattttctttgaaaagctaccgtgtgcacgtgagaaaatctcaacaagaccacagggcacccgtgagaagaagctcctcccagtctggggcccctccccaggcacagccttccacacatctaccagaggcacccacgcatagagaagcacccacaagcagttttctttctttcttttatttgagacggtgtttccttctgttgcccaggcttgagtgcagtggcatgacataagctcactgcaacctccacctcccgagttcgtgtgattctccgcctcagcctcccaagcagctgggattacaggtgctcgccaccacgcctggctaatttttgtatttttagtagagacagggttttgccatgttggccaggctggtcttgaactcctgacctcagatgatccactgcctcagcctcccaaagtactgggattacaggcgtgagccaccgtgcctggcacaagcagttttctccccttccttccttccttccttccttccttccttccttccttccttcctctctctctctctttcctttctttcttccttcattccttccttccttccttccttcctttctttctgacagtctcgcactattgcccaggctggagtgcagtggcgcgatctcgactcaccacaacctctgcctcctgggttcaagcaattctcctgcctcagcctctcgagtagctgggagtacaggtgcgcgccaccatgcctggctaatttttgtatttttgggagagatggagtttcactatgttggccaggctggtctcgaactcctgacctcgtgacccacccgcctctgcctcccaaagtgcagggattatgggggtgagccaccgtgcccagctatgagtggttttgtttctatttatttattattattctatgagacagagtctcactctgtcgcccacgctggagtacagtggtgcaatcttggcttactgcaacctccgtctcctgggttcaagcaattcttctgcctcagcttccggagtagctggaacgtgtgagccaccacccctggctaatttttgtatttttagtagagacaggctggtctcgaactcctgacttccggtgatctgcccacctcagcctcccaaattgttggtattacaggcgtgagccaccgcacctggcctctatttatttatttattttgagatggggtcttgatatgaattcctagactcatgcttctcatgcttgctaccacccagtcctgcctcctgcacagcagtttccactaaagtcacccctttacgagaggcatcttttttttttttttgagatggtgtctcactctgtcgcccaggctggagtgcaatggcatgatctcagctcactgcaagctccacctcctgggttcaagtgattctcctgcttcagcctcccgagtagctgggactacaggcacccgccaccattcccggctaattttttgtatctttagtagagacggggtttcaccatgttagccaggatggtctcgatctcctgacttcgtgatccacccgcctcggcctcccaaagtgttgggattacaggcatgagccactgtacctggcctactagaggcatcttaaaacacatctcctgtgtctccattccaaagcgcatctttgtctacactcctggggtcctcccacgtcagcctcccaaagtgctgggattacagtcatgagccactgtgcccggccccaccaaattgttttctaacctgcttttttcttgaggaatcttctgcagcacatgactcacatgtagagccccttgtttcttgaggccttcatacccgtcagctcatctaaaagtcactcctgaggagtaagggcaaggggcattgggagaggtcaggcagccctgggaagcctcccagcgtgtgtcccaggaggcctgctgcctgcagacactgctcccagacgcagcggcctcggccatcagagcgtgtcccacgatgaggtggcaacttccctgaagggcttgctctcacccaggggtgtggttctccgtgtgcacacagatagatagttctacgtttgccatataccatttatatgcctcacacagattaacccactttcatttcaaaaagacctcctgtcatcgtgcccattgtacagatgaggacactgagacacggaatcctagtgacctgtgcaaggtcacacagctgggaagggtgagggaagcgtctgtgaacccagcaggcccagcccctgagtctaggctccgctcggcagctgtcatgggagcagagtccgagaagcactgcaggcacctgctctagggggagagaggtggaggtggcaggtagagagaggacgacccctgggagctgagacgatgccagcctcacacggacaggctgggtgacctcaggcaagtcgcttcccatttgggaccccaaggacccttctgcagacccagctgggggtccccgatgagactggctctcagagtccctgtgagtcccgtcagctgaggccagtaatgtcctggcaccatcactggacatggtttgctctcccatggaggggcaggtgtagcagccaaaagcgatcctgagctctgggcctctgaaccctgctctgccagctactgtgggtgtctctacccgctctgtgtctcagttccctttcctgaaaagaggggatagtaaaaactaaccctcaaggtgtttattaccaatgcccttcatggaggaatccgctgctccaggcccttgccagcagctgcacagctgggcctggggacctgggtgtgggtctgttgaaccttggcccaccctggggctgtggtcggcctggacgtgtaggtgtggaggtgcatatttattatggcaattttctgacaggtaacagagtgtggggctctcttctgaatggggctcgtggaggccgtgggtcaaaagccctaattttgtagtgagggctaaaaggcttcacaagggaaagggcctggctggggctatgggccggtgccgaccccccctctcccactttgtttgcagttctgggaagtcatcagtgatgagcatggcatcgaccccagcggcaactacgtgggcgactcggacttgcagctggagcggatcagcgtctactacaacgaggcctcttgtgagtgcctgccccagcctccctatcccagccctggactgaccaggtctcagcgtctgactgaccaggtctcagcacctggactcaccagctctcagcatctctgtcctcccatgggttaggttggctgagatgccagcaggcgtaactggatgtcaggcatccagacgcacagaacagacaataaatcacagtcacaaaagtgagagccaaacatattagtgccatgagggcctgtgcgtgtccaggggcacagacagggatggggcaggccagagactttggaggccataagagggcctagagaaggggtcacctggagggcttagtcaggggctctttagcaactggtgtgaagtgatttccatatcaaagtggtgatacacccacctgcccacatggacatgtgatttaaaattttatttaatttaatagagacagtctcgatatgttgcccaggctggtctcgaactcctggactcaagcgatccacctgccttggcctcccaaagtgttgggagtgcagacacgagcccctgcatctggtggacgtctgactgaatcctgcctgtcctgctccgtcctgtcctgctccgtccttaaacacagtgaggcttaagggtgaagaaagttgctgaagcttgcctttggtccaggactctgacttcagagtacaggctcttaggatgtgagcaggaggatggcaggcgggcacagaattcagaaagaatgagggagaggctctggccctctgtgacccgaatcaccgagcccctctctcccctcagctcacaagtacgtgcctcgagccattctggtggacctggaacccggaaccatggacagtgtccgctcaggggcctttggacatctcttcaggcctgacaatttcatctttggtaagttccccctgctccaagctctgatggcagaccccatcacaggcaagcccaggtcggtggacggggacggctgtgagaaacaaggaatggtcagctcctcacatgatcctgaatggtgggaactcatctctccattttacagctgggcattggaggcccagagaaagggttctgtggggagaacagaaaccactcatgcatttcaagtggaatgaagtgtaaagcagacagaagcttacagaattgctagagagctggtgagacagaacggggcctccagaggactccggggtccaggagcacgaggccttgctgcggtcaagagatcaggacgttcccatgcctgtgtcctggggttgggccgtggatgccacgttcccacgtctgtgtcctggggcggggccgtggatgccacgttcccacgtctgtgtcctggggcggggccgtggatgccacgttcccacgtctgtgtcctggggcggggccgtggatgccacgttcccacgcctgtgtcctggggcggggccgtggatgccacgttcccacgcctgtgtcctggggcggggccgtggatgccacgttcccatgcctgtgtcctggggcggggccgtggatgccacgttcccatgcctgtgtcctggggcggggccgtggatgccacgttcccatgtctgtgtcctggggcggggccgtggacgcgccacagaaacaggagggcctcgcttcacttctgccttcccgaccgcagcacatccagctggtagatgccaactcgcatccagcccccagctgccagggattctggggtggctgtttgggctcctggcactgccagtcggaaggaaggtatgctggagcaggagggctgatccattcacccaggatcccctcaggaggcagagcctcgctctgctgtgaccccaagttctcaagaccctgtccagagccctcgtcctgagcactcagcagcatcggctcagggaagccacggcgggtatgagaaggggtgctcagtggggcctactttacagaagacagaacaggcatggggctgccacggctgcccttgggatgttcaggcaggggctggaggtctggactgcagagtccctggcccctgtctcttacccctcttctccctgtacaggtcagagtggggccggcaacaactgggccaagggtcactacacggagggggcggagctggtggattcggtcctggatgtggtgcggaaggagtgtgaaaactgcgactgcctgcagggcttccagctgacccactcgctggggggcggcacgggctccggcatgggcacgttgctcatcagcaaggtgcgtgaggagtatcccgaccgcatcatgaacaccttcagcgtcgtgccctcacccaaggtgtcagacacggtggtggagccctacaacgccacgctgtccatccaccagctggtggagaacacggatgagacctactgcatcgacaacgaggcgctctacgacatctgcttccgcaccctcaagctggccacgcccacctacggggacctcaaccacctggtatcggccaccatgagcggagtcaccacctccttgcgcttcccgggccagctcaacgctgacctgcgcaagctggccgtcaacatggtgcccttcccgcgcctgcacttcttcatgcccggcttcgcccccctcacagcccggggcagccagcagtaccgggccctgaccgtgcccgagctcacccagcagatgttcgatgccaagaacatgatggccgcctgcgacccgcgccacggccgctacctgacggtggccaccgtgttccggggccgcatgtccatgaaggaggtggacgagcagatgctggccatccagagcaagaacagcagctacttcgtggagtggatccccaacaacgtgaaggtggccgtgtgtgacatcccgccccgcggcctcaagatgtcctccaccttcatcgggaacagcacggccatccaggagctgttcaagcgcatctccgagcagttcacggccatgttccggcgcaaggccttcctgcactggtacacgggcgagggcatggacgagatggagttcaccgaggccgagagcaacatgaacgacctggtgtccgagtaccagcagtaccaggacgccacggccgaggaagagggcgagatgtacgaagacgacgaggaggagtcggaggcccagggccccaagtgaagctgctcgcagctggagtgagaggcaggtggcggccggggccgaagccagcagtgtctaaacccccggagccatcttgctgccgacaccctgctttcccctcgccctagggctcccttgccgccctcctgcagtatttatggcctcgtcctccccacctaggccacgtgtgagctgctcctgtctctgtcttattgcagctccaggcctgacgttttacggttttgttttttactggtttgtgtttatattttcggggatacttaataaatctattgctgtcagatacccttgcttggtgccagagatgtccttttattctggaaagttgtgtccagtaggtggaggggctgacagggaggcccgggtggacaggcaagaagagctcatcctctcccaggctggcggctgagagaggcctgcgctgggggccggaatgtgtctcaaggcacagcccgtggggagaccccggaaacgggaagcccgggagaaggaacgggaagtacctcattccagacctcaagatgcagccctcccgacttggaaataaccccacactcgttccctggcctcccacagagcggcttgcaccccagacttttctcccacctgtctgtaggctgaaagttggggcaggtggtccctcctgcggtggaaactgccatcagacctgaagcctcgggtcacaaccagggaggtagggaagggggccccgagtgctccctgaaaaagacggtgtgtttagtgtctcggggctgggccctgggaggggctgctgaggtcagggagatgcggccacaggacgcaggcctgggctgccgggagggacgtatcagtcctcccgcccccggcagccccttcctggggtgcatgatacttggtgtccagccacacagggcatggcctgaggagccgctcacctggttccccacatcctcctacagggacagagcctggagcccagagaggccgactgcccagccctccacagtcgcctccctgccaccccgccccttggagctgaggggcatcagcagcctcagtctcccaggttctgcccagtggtaccctgagagcggccccttcttcttgaatcacccttcaacctggcaatgggcgcagaagaagacaggccgtgtgcactgcgggccccagcttcagatgcgagggctgcaggccccagaggccgccatctcgagttctggccctgacacccccaacatggatggggccggggatgtgtctcctccgccggctgctgctgtgtaacaaatcaccccaaatctacctgaaacagcacgggatcctttctctagacacagcgtgttagctggatccttctgctcctcacaatgttgggaggggccagctgcaagctctgacatctcactcttggggttgtcctccgcacggctgcctggccgacccctcgcatggtggggcggaggctggaaccacgtcttacatggcaccggttctttttttctttgtgacagagtctcgctctgtcgcctaggctggagtgcagtggcgcaatctcagctcactgcaagctccgcctcccgggttcacgccattctcctgcctcagcctcctgagtagcagggactacgggcgcccgccaccatgcccggctaattttttgtatttttagtagagatggggtttcaccatgttagccaggatggtctccatctcctgacctcaggatccgcccaccttggcctcccaaagtgctgggattacaggcgtgagccaccgtcactgattcttaagtgtgccagacccatgtcaatcacaggcctggcatcactgtcccatattcagtgggttcaagcaagaccagagccagtgcagatgcaggcagggagggaaaagccctgtggtgcggactctggggtgtggttcctgggaggctgcctgaacacagcctggcttgcacctgcaactccacacatgcggagctgagctcctgacccccagccctgcttctccacatccctcaggttggtgatgccaaccacgacaccccaggtgctcagggcaaacagccggggtcaccaggtatagggtccagccccatagggtcggtgggtctctccctgtgtgcggcgatgacagagtgtagaaataaagacacaagacaaagagataaaagaaaaggcagctgggcccgggggaccaccaccagcaagacgcggagaccggtagtggccccgaatgtctggctgcgctgttatttactggatacagagcaaaaggggcagggtaaagagtgtgagtcatctccaatgacaggtgaggtcacgtgggtcacgtgtccactggacagggggcccttccctgcctggcagccaaggcagagagagagagggagagagagagacagcttacaccattatttctgcatatcaagagacttttatactttcactaatttgctactgctatctggaaggcagagccaggtgtacaggatggaacatgaaggtggactaggagcgtgaccactgaagcacagcatcacagggagatggtaaggcctccggataactaatgattaatgatattcatatataatcatgtctatgatctatatctagtataactcctgttgttttatatattttattatactggaacagctcgtgccctcggtctcttgcctcggcacctggatggcttgccgcccacaaccaggggcttttcttcccctcaggtccacatctgctttgacagcaaatctggccagctgcaccttcagaacacgcccacagcccagcacccctcatgtctgctgctgcctcgggtcttcctcgtcccgtccgtgcgattgtctcctcactgggctcccacagctgcctggccgctcctcacatgcaatttggcatctgctcccgtgccacgctgtccttcatatcctcttgttatatatgccccgtccacaccacgtccctaatgttctagaacattggggcccggggaatgccctccacttgagtgtcctccctgcagatatccgacggcatcaccctaggggacccttcctggccccccgtgctctgaactctcctcccagagctgctttctgtgcagcactcagcacccacttcaggagactgtgccttcaggggaggggtcaacaaagagggtcgaatggcaggaatgggcctaattaaggggtcctggagcactgaaggtgaaggggtgggagggctggaccctggtgagaactggagctacaggagaggccaccccggctgagctgaggtctctgaagggtaagaaccccatcagagcagagggagccccggagccaacaccctgacctctctctcctccgtcccccggcctccaggcaccctgacttctctctcctccgccctccagcctcttgctgagctcagctggaagtcaggggacgtccaggtcagcctccaggcagagaggagggccaggaggcgtgagaggtgggtctggggccagtggaaggtgagaacctggcccaggtctaatgtgtcatttagtccccaagtgtctcctccacggggtcagctccacaagggacttctgtgttgttcccgttggaccccttaacctagaagaatgcctgactcatggtaggtaaagatttccggaaaaaatggcttgaattgtggtctttcatgtaacaacagactggacatggagcagttccagggtggggctgtgtgttggtctcatccttactgggtgagccccttcgtccgagaaaacggcccctgctccagttgttagaaaaccgcctttacaggccaggtgtggtggctcacacctgtaatcccagcacttcaggaggccaaggcagacaggtcatgaggtcaggaaatggagaccatcctggctaacaaggtgaaaccccgtaactactaaaaatacaaaaaaattagctgggcgtggtggcgggcgcctttagtcccaactactcgggaggctgaggcagaagaatcacttgaacccaggaggtggaggttgcagtgagctgagatcccgccactgcactacagcccgggtgacagagtaagactctgtctcaaaaaaaaaaaaaatgtgattgctatgtaaaatgattgtgtgccacagagatgaccaggtttcttgtggatttcatcttaactgtggctgtcctaagacttttgtcatccacagataactgttgtcttgtttcaccatttttttttttgttttgagacgaagtttcgctctgttgcccaggctggagtgcagtggcgcgatctcggctcactgcaatctccgttccctgggttcaagcgattctcctgcctcagcctcctgagtagctggggttacaggcatgcgccaccacacccagctaatttttttgtatttttagtagagacgggagttcaccatgttggtcaggctggtctcaaactcctgacctcgtgatctgcctgcctcggcctcccaaagtgctgggattgcaggtgtgagccactgtgcctggccacattactgattctttttgttttgtttttcagagtcaagaaaaccttttttcttttgagctatttacagcttttagcagttgagtaaagtacacccctgtgaccaaaacttggtgcatttttctttctctacctgagttctccagattttggaaactgtctgtgagtattcttttttatttatttatttatttttaaaatttcagtaggttttagctggtgtttggttacatgaatgagttctttagtggtgttttctgagattttggtccatccattacctgagcagtatacactgtatccaatatgtagcctttatccctaaccctctcccaccctttcccctgagttcccaaactccttcatatcattattattattgttattattattattgaaacagtgtctccctctgtcacccaggctggagtgcagtggcacgatctcacctcattgcaacctccacctcctgagttcaagcagttctcctgcctcagtctcctgggtagctgggattacaggcacacaccaccacacctggctaatttttgtgtttcttagtagagatggagtttcaccttgttggccaggctggtcttgaattcctgatctcaagtgatctgcccgctggcttccaaaatgctggaattacaggtgtgagccaccatacctggcctattggatcattcttaagcctttgcatcctcatagcttagctcccatttatgattgagaatataggatgtttgctttaccattaacgtattcttttcttctctttttttttttttttttttttttgagatggagttttgctcttgttgcccaggctggagtgcaatggcgtggtcctggtccactgcaacctccacctcccgtgttcaagcgattctcctgcctcagcctcctaagtagctggaattacaggcacctgccaccacacccggctagtttttgtatttgtatttttatttaatttaatttatttatttattttgagacgagtctcgctctgtctcccaggctggagtgcagtggtgcgatctcggctcactgcaagctccgcctcccgggttcacgccattctcctgcctcagcctcctgagtagctgggactacaggcgcccaccaccgtgcccggctaattttctgtatttttagtagagacggggtttcaccgtgttagccaggatggtctcaatctcctgaccttgtgatccgcccgcctcggcctcccaaagtgctgggattacaggcctgagccaccccgccgggcccacactaatactttcaaatttgtcttttgtttttctgacctggactcaatgaaattgctactaactttttcccgaggcccagaaagttgaggttattctttgtaacacaggtgagaacattgtgtcagactgccaggggcttcctgctctgtaactaaagatgctttgagtctaacatctggatagatcgtgtccaacaataaacttcgtttttcttctgttttcatagaaatacctcttattaaaaatctgttcaccttcctcatatacataagtttagcccatctgcaacctcctgttatgggaaatagctgtttaacggaactgatcttgtctcaggaccaggaaatcactacaaagatatgtgacagtgtatctaaatttgttctttcctgtctatcccaatgtgtcttttttttttttttttttgagacagagtcttgctgttgtctcccaggctgaagtgcagcgatctcagctcactgcaacctccgcctcccgtgttgaagcgattctcctgcctcagcctcctgagtagctgggattacaggcatgctccaccacacccagataatttttgtatttttagtagagatgaggtttcaccatgttggtcagggtggtctcgaactcctgccctcgtgatccgcccacttcggccccccaaagtgtgggattacaggtgtgagccactgcgcccggcccagagggatcttttgaaaacaaaattataccacttctctgctcacaatccttcaatggagagaccgaccacaccaagtgctggtgtggacactgaggtaccgccggagcactcacacctcccagcaggaacatggaaaggcacaaccgccatgggagaaagcttcatgcgtcctagggagtaaaaacactgcacgtaacccagccgttcggttgctaaatattgtcccggagaatgaaagcattatctccacacagtgatgcacacgcaaatgtttatagtagctttattcataatagcaaacactggaaacagcccagacgttcatcaacaggtggatggatagacagtgtggtcatccatgcatactcaggaataagaggggtaacccacagacatgtgctgccacatagatatgtctcagaataagtatttttagtgaaaaaagctatagatgaaaaaggcctacatacgatgtgattccacctgtatacaattagagaaatgcaccttattgacagaaagcagctcggtggtgtctggggacagagctgggttgcagcaggttgcaaagggcacaggaaatatttgaggataatggatagctttttattcttttttacgaattgtgatttatttattctttttcacttttgtggatacatttatggagtacatgagatattttgatacaggcatgcagtgtgtaataatcacatctggttaaatgaggtatccatcacctcaaacatttagcctttctttgtattacggtccagttatacttctttagttatttaaaaatatataataaactattgtagactatagtcactctgttgtactaccaactattagattttattcattctatctaactatatttttgcattcattaaccatccccacatctccctccacctttcccagcctcgggaaactatccatgagtttaactctatgcccatgagtttaattgttttaattttctttttttttttttttttgttttagatggagtcttactctgtcgcccaggctggagtgcagtggcatgatctcggctcactgcaacctctgtctcccaggttcaagcaattctcctgcctcagccccctgagtacctggctaatttttgtatttttagtagagacagggtttcactatgttggccaagctggtcttgaactcctgacctcgtgatccccccgccttggcctcccaaaatactggaattacaggcgtgagccaccacgcccagccaatttttttttttttttttttgagaaggactcttgctatttctcccaggttaggtggagagcagtggcgccatctcggctcactgcaacctccgcctcccgggttcacgccattctcctgcctcagcctcccgtgtagctgggactacaggtgcccgccaccatgcccagctaattttttgtatttttagtagagatggggtttcaccgtgttaaccaggatagtctcgatccaccagcctcggcctcccaaagtgctgggattacaggcgtgagccactgcgcccggccccggccaattgttttaattttcttttagcctccacaaataaatgaaaacatgcaaagttcgtctttctgtgcctggcttatttcacttaacataatgacttccagttccatccacgttgttgcaaatgacaggatctcattcttttttacggctgaatggtactccgttgtgtaaagtaccacattttctttatccattcatctgttgatggaggatagggttactgtctgcttccttcttggtgctcatcacatctctgctcatggtcatagtttctcaggtgtatacatgtgtcaaaatctatccagttctacccttaaacatgtgcggtttattgtatgttgattatatctcaacaaagctgttaagagacgaagcgtggtggctcatgcctgtaatcccagcacgttgggaagttgaagctggtggattgcctgagctcaggggtttgagaccagcctgggcaccaagagaaaattccatctctactaaaaatacaaaaataaggggttgggtgcggtggctcatgcctgtaatcccagcactttgggaggccgaggaaggtggatcatgaggtcaagaaattgagaccatcctggccaacatggtgaaaccccgtctctactaaaaatacaaaaattagctgggtgtggtggcacatgcctgtagtcccagctacttgggaggctgaggcagaagaattgcttgaacccggaaggcggaggttgcagtgagccgagatcgcacctctacactccagcctggtgaaagagcgagactccgtcccccacctgtccccacaaaaaaattaggaaggtgtggtggcgtgtgtgtgtagccccggctactagggaggctgaggcaggaggatcccttgagtccaagaggttgaggctgcagtgagccgagattgtgccactgcactccagcctgggcgacagagtgagaccctgtttaaaaaaaaaaaaatgctgaaagaaatttccaatggcttccatcttaccacaaatcaaagccaatgtgtttaccattagctcatagcctcccgtctctggtcctctcccctcactttacctcatactaaactccagccacatggacctgcttccagttcctcattcataggaggctctttcggttcctcaaggaccttgcactcatggtttctacctggatgcccctcccactcttcagtggttctctccttctgacccctgagtcttggctcaagcatcttcctcccctgatctcagtcaccgtctcgtcaaactgtttatttccttgtgctcatcacatctctgattagtttgcatctttgcttgtctggttccttgagtgatgggaccttgtctgttttctcaccacagtgtcctagtgctttgagcagagcatggcatatagttggtgctcaataaatttgtttgtggtggctcatgcctgaaatcctagaattttgggaggctgaggtgggcagatcacttgagctcaggagttggagaccagcctgggcaacatggcaagaccctgtctctataaaaaatacaaaaattagctgggcatggtggtgcatgcctgtggtcccaggtacttggcctgaggcgggaggatcatttgagcccaggagatggaggccagtctgggcaaccccatctgaaagaaaagaaaacaaaatagtaaatgttctaaaccagtatataaattatctgtaactgcagattctcccaggactctgggaggctaagcctgggtgatcacttgaacccagccattcggggctgcagggagctgtgctcatgccgctgtgctttagccagactgagatcttgtctcttaataaaaaataagaataaaatggggccgggcgtggtagctcacgcctgcaatcccagcactctgtgaggctgaggtgggtggatcacttgagtccaggattccaagaccaccctgggcaatgtggcaaatgtctctacaaaaaacacaaacaaaattagccaggtggcggcgcttgcctgtgatcctggctactcaggaggctgaactggtagaaccacttgagcctgggaggtggaggttgcagtgaggtgagactgagccgctgcactccagcgtgggtgacagagtgagaccctgtcccaaaataaataaaaatttaaaaattaaaaaaatgtgttgttgaatgtctacagaggaatagagatggtcatgacacactctatgtttatttacttatttatttatttttagagacagg

SEQ ID NO: 1069 - DNA, 1607 bp, Homo sapiens
cctcagcagccagcccggcccgcccgcgcccgtccgcagccgcccgccagacgcgcccagtatgagggagatcgtgcacatccaggccggccagtgcggcaaccagatcggggccaagttctgggaagtcatcagtgatgagcatggcatcgaccccagcggcaactacgtgggcgactcggacttgcagctggagcggatcagcgtctactacaacgaggcctcttctcacaagtacgtgcctcgagccattctggtggacctggaacccggaaccatggacagtgtccgctcaggggcctttggacatctcttcaggcctgacaatttcatctttggtcagagtggggccggcaacaactgggccaagggtcactacacggagggggcggagctggtggattcggtcctggatgtggtgcggaaggagtgtgaaaactgcgactgcctgcagggcttccagctgacccactcgctggggggcggcacgggctccggcatgggcacgttgctcatcagcaaggtgcgtgaggagtatcccgaccgcatcatgaacaccttcagcgtcgtgccctcacccaaggtgtcagacacggtggtggagccctacaacgccacgctgtccatccaccagctggtggagaacacggatgagacctactgcatcgacaacgaggcgctctacgacatctgcttccgcaccctcaagctggccacgcccacctacggggacctcaaccacctggtatcggccaccatgagcggagtcaccacctccttgcgcttcccgggccagctcaacgctgacctgcgcaagctggccgtcaacatggtgcccttcccgcgcctgcacttcttcatgcccggcttcgcccccctcacagcccggggcagccagcagtaccgggccctgaccgtgcccgagctcacccagcagatgttcgatgccaagaacatgatggccgcctgcgacccgcgccacggccgctacctgacggtggccaccgtgttccggggccgcatgtccatgaaggaggtggacgagcagatgctggccatccagagcaagaacagcagctacttcgtggagtggatccccaacaacgtgaaggtggccgtgtgtgacatcccgccccgcggcctcaagatgtcctccaccttcatcgggaacagcacggccatccaggagctgttcaagcgcatctccgagcagttcacggccatgttccggcgcaaggccttcctgcactggtacacgggcgagggcatggacgagatggagttcaccgaggccgagagcaacatgaacgacctggtgtccgagtaccagcagtaccaggacgccacggccgaggaagagggcgagatgtacgaagacgacgaggaggagtcggaggcccagggccccaagttgctttcccctcgccctagggctcccttgccgccctcctgcagtatttatggcctcgtcctccccacctaggccacgtgtgagctgctcctgtctctgtcttattgcagctccaggcctgacgttttacggttttgttttttactggtttgtgtttatattttcggggatacttaataaatctattgctgtcaga

SEQ ID NO: 1070 - protein, 471 aa, Homo sapiens
MREIVHIQAGQCGNQIGAKFWEVISDEHGIDPSGNYVGDSDLQLERISVYYNEASSHKYVPRAILVDLEPGTMDSVRSGAFGHLFRPDNFIFGQSGAGNNWAKGHYTEGAELVDSVLDVVRKECENCDCLQGFQLTHSLGGGTGSGMGTLLISKVREEYPDRIMNTFSVVPSPKVSDTVVEPYNATLSIHQLVENTDETYCIDNEALYDICFRTLKLATPTYGDLNHLVSATMSGVTTSLRFPGQLNADLRKLAVNMVPFPRLHFFMPGFAPLTRSQQYRALTVPELTQQMFDAKNMMAACDPRHGRYLTVATVFRGRMSMKEVDEQMLAIQSKNSSYFVEWIPNNVKVAVCDIPPRGLKMSSTFIGNSTAIQELFKRISEQFTAMFRRKAFLHWYTGEGMDEMEFTEAESNMNDLVSEYQQYQDATAEEEGEMYEDDEEESEAQGPKLLSPRPRAPLPPSCSIYGLVLPT

SEQ ID NO: 1071 - DNA, 3899 bp, Homo sapiens
agtcttcagcaaggaagtgctgggaacgccctggagtgaacccaggaagatgcctgcagtgggtgccagggcccctccccaccgtccctgctgggcttcggggccacgcccgactgctgtgaacggcctgcggagcaccacgtgcgacggctggaggcgagaggtctgcctttgatgtggctgttggtgcagggcctgtggtgccttccgcagcggaaatggcgcgccgcccggggagggcgggagcagcgtcccgggtgcccctgtgaggatgagcgacgagatgactggagggtccctgaagacctcaccagggtgcccccagccggtccgctcccaggaagcgacacccccacagccccagggctgcagctgagggggtcgccactctggctgggcgaggctgggcccttgggggcaggcgccagagtggcctcaggctctacgagatgcctgaaaacaccaacctctccagggctcactagcattggacgctttcacgctctgccctggccggaagccccctcaccccgcgcgatgtgcaaactcctgcagggctcactcagtttccagaactttaattattggaaagttctccctggtccagcccccaaatctgccgtgaacgttgacagctgagttgctgctccatgcgtgctttggctgagagcagaggggacccctgtcctccctgagctgctgacgaggggaggggtgaagggtggggcctctggagagggcaggtcccggggaagctccggactcctagaggggcggccaggtgggggccctggtgaccaggacagactgtggtgtttttgccgggccatggtgggtgctcacgcccccggcatgtggccgccctcagtgggaggggctctgagaacgactttttaaaacgcagagaaaagctccattcttcccaggacctcagcgcagccctggcccaggaaggcaggagacagaggccaggacggtccagaggtgtcgaaatgtcctggggacctgagcagcagccaccagggaagaggcagggagggagctgaggaccaggcttggttgtgagaatccctgagcccaggcggtagatgccaggaggtgtctggactggctgggccatgcctgggctgacctgtccagccagggagagggtgtgagggcagatctgggggtgcccagatggaaggaggcaggcatgggggacacccaaggccccctggcagcaccatgaactaagcaggacacctggaggggaagaactgtggggacctggaggcctccaacgactccttcctgcttcctggacaggactatggctgtgcagggatcccagagaagacttctgggctccctcaactccacccccacagccatcccccagctggggctggctgccaaccagacaggagcccggtgcctggaggtgtccatctctgacgggctcttcctcagcctggggctggtgagcttggtggagaacgcgctggtggtggccaccatcgccaagaaccggaacctgcactcacccatgtactgcttcatctgctgcctggccttgtcggacctgctggtgagcgggagcaacgtgctggagacggccgtcatcctcctgctggaggccggtgcactggtggcccgggctgcggtgctgcagcagctggacaatgtcattgacgtgatcacctgcagctccatgctgtccagcctctgcttcctgggcgccatcgccgtggaccgctacatctccatcttctacgcactgcgctaccacagcatcgtgaccctgccgcgggcgcggcgagccgttgcggccatctgggtggccagtgtcgtcttcagcacgctcttcatcgcctactacgaccacgtggccgtcctgctgtgcctcgtggtcttcttcctggctatgctggtgctcatggccgtgctgtacgtccacatgctggcccgggcctgccagcacgcccagggcatcgcccggctccacaagaggcagcgcccggtccaccagggctttggccttaaaggcgctgtcaccctcaccatcctgctgggcattttcttcctctgctggggccccttcttcctgcatctcacactcatcgtcctctgccccgagcaccccacgtgcggctgcatcttcaagaacttcaacctctttctcgccctcatcatctgcaatgccatcatcgaccccctcatctacgccttccacagccaggagctccgcaggacgctcaaggaggtgctgacatgctcctgctctcaggaccgtgccctcgtcagctgggatgtgaagtctctgggtggaagtgtgtgccaagagctactcccacagcagccccaggagaaggggctttgtgaccagaaagcttcatccacagccttgcagcggctcctgcaaaaggagttctgggaagtcatcagtgatgagcatggcatcgaccccagcggcaactacgtgggcgactcggacttgcagctggagcggatcagcgtctactacaacgaggcctcttctcacaagtacgtgcctcgagccattctggtggacctggaacccggaaccatggacagtgtccgctcaggggcctttggacatctcttcaggcctgacaatttcatctttggtcagagtggggccggcaacaactgggccaagggtcactacacggagggggcggagctggtggattcggtcctggatgtggtgcggaaggagtgtgaaaactgcgactgcctgcagggcttccagctgacccactcgctggggggcggcacgggctccggcatgggcacgttgctcatcagcaaggtgcgtgaggagtatcccgaccgcatcatgaacaccttcagcgtcgtgccctcacccaaggtgtcagacacggtggtggagccctacaacgccacgctgtccatccaccagctggtggagaacacggatgagacctactgcatcgacaacgaggcgctctacgacatctgcttccgcaccctcaagctggccacgcccacctacggggacctcaaccacctggtatcggccaccatgagcggagtcaccacctccttgcgcttcccgggccagctcaacgctgacctgcgcaagctggccgtcaacatggtgcccttcccgcgcctgcacttcttcatgcccggcttcgcccccctcacagcccggggcagccagcagtaccgggccctgaccgtgcccgagctcacccagcagatgttcgatgccaagaacatgatggccgcctgcgacccgcgccacggccgctacctgacggtggccaccgtgttccggggccgcatgtccatgaaggaggtggacgagcagatgctggccatccagagcaagaacagcagctacttcgtggagtggatccccaacaacgtgaaggtggccgtgtgtgacatcccgccccgcggcctcaagatgtcctccaccttcatcgggaacagcacggccatccaggagctgttcaagcgcatctccgagcagttcacggccatgttccggcgcaaggccttcctgcactggtacacgggcgagggcatggacgagatggagttcaccgaggccgagagcaacatgaacgacctggtgtccgagtaccagcagtaccaggacgccacggccgaggaagagggcgagatgtacgaagacgacgaggaggagtcggaggcccagggccccaagttgctttcccctcgccctagggctcccttgccgccctcctgcagtatttatggcctcgtcctccccacctaggccacgtgtgagctgctcctgtctctgtcttattgcagctccaggcctgacgttttacggttttgttttttactggtttgtgtttatattttcggggatacttaataaatctattgctgtcaga

SEQ ID NO: 1072 - protein, 818 aa, Homo sapiens
MAVQGSQRRLLGSLNSTPTAIPQLGLAANQTGARCLEVSISDGLFLSLGLVSLVENALVVATIAKNRNLHSPMYCFICCLALSDLLVSGSNVLETAVILLLEAGALVARAAVLQQLDNVIDVITCSSMLSSLCFLGAIAVDRYISIFYALRYHSIVTLPRARRAVAAIWVASVVFSTLFIAYYDHVAVLLCLVVFFLAMLVLMAVLYVHMLARACQHAQGIARLHKRQRPVHQGFGLKGAVTLTILLGIFFLCWGPFFLHLTLIVLCPEHPTCGCIFKNFNLFLALIICNAIIDPLIYAFHSQELRRTLKEVLTCSCSQDRALVSWDVKSLGGSVCQELLPQQPQEKGLCDQKASSTALQRLLQKEFWEVISDEHGIDPSGNYVGDSDLQLERISVYYNEASSHKYVPRAILVDLEPGTMDSVRSGAFGHLFRPDNFIFGQSGAGNNWAKGHYTEGAELVDSVLDVVRKECENCDCLQGFQLTHSLGGGTGSGMGTLLISKVREEYPDRIMNTFSVVPSPKVSDTVVEPYNATLSIHQLVENTDETYCIDNEALYDICFRTLKLATPTYGDLNHLVSATMSGVTTSLRFPGQLNADLRKLAVNMVPFPRLHFFMPGFAPLTRSQQYRALTVPELTQQMFDAKNMMAACDPRHGRYLTVATVFRGRMSMKEVDEQMLAIQSKNSSYFVEWIPNNVKVAVCDIPPRGLKMSSTFIGNSTAIQELFKRISEQFTAMFRRKAFLHWYTGEGMDEMEFTEAESNMNDLVSEYQQYQDATAEEEGEMYEDDEEESEAQGPKLLSPRPRAPLPPSCSIYGLVLPT

SEQ ID NO: 1073 - DNA, 2415 bp, Homo sapiens
agtcttcagcaaggaagtgctgggaacgccctggagtgaacccaggaagatgcctgcagtgggtgccagggcccctccccaccgtccctgctgggcttcggggccacgcccgactgctgtgaacggcctgcggagcaccacgtgcgacggctggaggcgagaggtctgcctttgatgtggctgttggtgcagggcctgtggtgccttccgcagcggaaatggcgcgccgcccggggagggcgggagcagcgtcccgggtgcccctgtgaggatgagcgacgagatgactggagggtccctgaagacctcaccagggtgcccccagccggtccgctcccaggaagcgacacccccacagccccagggctgcagctgagggggtcgccactctggctgggcgaggctgggcccttgggggcaggcgccagagtggcctcaggctctacgagatgcctgaaaacaccaacctctccagggctcactagcattggacgctttcacgctctgccctggccggaagccccctcaccccgcgcgatgtgcaaactcctgcagggctcactcagtttccagaactttaattattggaaagttctccctggtccagcccccaaatctgccgtgaacgttgacagctgagttgctgctccatgcgtgctttggctgagagcagaggggacccctgtcctccctgagctgctgacgaggggaggggtgaagggtggggcctctggagagggcaggtcccggggaagctccggactcctagaggggcggccaggtgggggccctggtgaccaggacagactgtggtgtttttgccgggccatggtgggtgctcacgcccccggcatgtggccgccctcagtgggaggggctctgagaacgactttttaaaacgcagagaaaagctccattcttcccaggacctcagcgcagccctggcccaggaaggcaggagacagaggccaggacggtccagaggtgtcgaaatgtcctggggacctgagcagcagccaccagggaagaggcagggagggagctgaggaccaggcttggttgtgagaatccctgagcccaggcggtagatgccaggaggtgtctggactggctgggccatgcctgggctgacctgtccagccagggagagggtgtgagggcagatctgggggtgcccagatggaaggaggcaggcatgggggacacccaaggccccctggcagcaccatgaactaagcaggacacctggaggggaagaactgtggggacctggaggcctccaacgactccttcctgcttcctggacaggactatggctgtgcagggatcccagagaagacttctgggctccctcaactccacccccacagccatcccccagctggggctggctgccaaccagacaggagcccggtgcctggaggtgtccatctctgacgggctcttcctcagcctggggctggtgagcttggtggagaacgcgctggtggtggccaccatcgccaagaaccggaacctgcactcacccatgtactgcttcatctgctgcctggccttgtcggacctgctggtgagcgggagcaacgtgctggagacggccgtcatcctcctgctggaggccggtgcactggtggcccgggctgcggtgctgcagcagctggacaatgtcattgacgtgatcacctgcagctccatgctgtccagcctctgcttcctgggcgccatcgccgtggaccgctacatctccatcttctacgcactgcgctaccacagcatcgtgaccctgccgcgggcgcggcgagccgttgcggccatctgggtggccagtgtcgtcttcagcacgctcttcatcgcctactacgaccacgtggccgtcctgctgtgcctcgtggtcttcttcctggctatgctggtgctcatggccgtgctgtacgtccacatgctggcccgggcctgccagcacgcccagggcatcgcccggctccacaagaggcagcgcccggtccaccagggctttggccttaaaggcgctgtcaccctcaccatcctgctgggcattttcttcctctgctggggccccttcttcctgcatctcacactcatcgtcctctgccccgagcaccccacgtgcggctgcatcttcaagaacttcaacctctttctcgccctcatcatctgcaatgccatcatcgaccccctcatctacgccttccacagccaggagctccgcaggacgctcaaggaggtgctgacatgctcctggtgagcgcggtgcacgcggctttaagtgtgctgggcagagggaggtggtgatattgtgtggtctggttcctgtgtgaccctgggcagttccttacctccctggtccccgtttgtcaaagaggatggactaaatgatctctgaaagtgttgaag

SEQ ID NO: 1074 - protein, 317 aa, Homo sapiens
MAVQGSQRRLLGSLNSTPTAIPQLGLAANQTGARCLEVSISDGLFLSLGLVSLVENALVVATIAKNRNLHSPMYCFICCLALSDLLVSGSNVLETAVILLLEAGALVARAAVLQQLDNVIDVITCSSMLSSLCFLGAIAVDRYISIFYALRYHSIVTLPRARRAVAAIWVASVVFSTLFIAYYDHVAVLLCLVVFFLAMLVLMAVLYVHMLARACQHAQGIARLHKRQRPVHQGFGLKGAVTLTILLGIFFLCWGPFFLHLTLIVLCPEHPTCGCIFKNFNLFLALIICNAIIDPLIYAFHSQELRRTLKEVLTCSW

SEQ ID NO: 1075 - DNA, 1707 bp, Homo sapiens
cctcagcagccagcccggcccgcccgcgcccgtccgcagccgcccgccagacgcgcccagtatgagggagatcgtgcacatccaggccggccagtgcggcaaccagatcggggccaagttctgggaagtcatcagtgatgagcatggcatcgaccccagcggcaactacgtgggcgactcggacttgcagctggagcggatcagcgtctactacaacgaggcctcttctcacaagtacgtgcctcgagccattctggtggacctggaacccggaaccatggacagtgtccgctcaggggcctttggacatctcttcaggcctgacaatttcatctttggtcagagtggggccggcaacaactgggccaagggtcactacacggagggggcggagctggtggattcggtcctggatgtggtgcggaaggagtgtgaaaactgcgactgcctgcagggcttccagctgacccactcgctggggggcggcacgggctccggcatgggcacgttgctcatcagcaaggtgcgtgaggagtatcccgaccgcatcatgaacaccttcagcgtcgtgccctcacccaaggtgtcagacacggtggtggagccctacaacgccacgctgtccatccaccagctggtggagaacacggatgagacctactgcatcgacaacgaggcgctctacgacatctgcttccgcaccctcaagctggccacgcccacctacggggacctcaaccacctggtatcggccaccatgagcggagtcaccacctccttgcgcttcccgggccagctcaacgctgacctgcgcaagctggccgtcaacatggtgcccttcccgcgcctgcacttcttcatgcccggcttcgcccccctcacagcccggggcagccagcagtaccgggccctgaccgtgcccgagctcacccagcagatgttcgatgccaagaacatgatggccgcctgcgacccgcgccacggccgctacctgacggtggccaccgtgttccggggccgcatgtccatgaaggaggtggacgagcagatgctggccatccagagcaagaacagcagctacttcgtggagtggatccccaacaacgtgaaggtggccgtgtgtgacatcccgccccgcggcctcaagatgtcctccaccttcatcgggaacagcacggccatccaggagctgttcaagcgcatctccgagcagttcacggccatgttccggcgcaaggccttcctgcactggtacacgggcgagggcatggacgagatggagttcaccgaggccgagagcaacatgaacgacctggtgtccgagtaccagcagtaccaggacgccacggccgaggaagagggcgagatgtacgaagacgacgaggaggagtcggaggcccagggccccaagtgaagctgctcgcagctggagtgagaggcaggtggcggccggggccgaagccagcagtgtctaaacccccggagccatcttgctgccgacaccctgctttcccctcgccctagggctcccttgccgccctcctgcagtatttatggcctcgtcctccccacctaggccacgtgtgagctgctcctgtctctgtcttattgcagctccaggcctgacgttttacggttttgttttttactggtttgtgtttatattttcggggatacttaataaatctattgctgtcagataccctt

SEQ ID NO: 1076 - protein, 448 aa, Homo sapiens
MREIVHIQAGQCGNQIGAKFWEVISDEHGIDPSGNYVGDSDLQLERISVYYNEASSHKYVPRAILVDLEPGTMDSVRSGAFGHLFRPDNFIFGQSGAGNNWAKGHYTEGAELVDSVLDVVRKECENCDCLQGFQLTHSLGGGTGSGMGTLLISKVREEYPDRIMNTFSVVPSPKVSDTVVEPYNATLSIHQLVENTDETYCIDNEALYDICFRTLKLATPTYGDLNHLVSATMSGVTTSLRFPGQLNADLRKLAVNMVPFPRLHFFMPGFAPLTRSQQYRALTVPELTQQMFDAKNMMAACDPRHGRYLTVATVFRGRMSMKEVDEQMLAIQSKNSSYFVEWIPNNVKVAVCDIPPRGLKMSSTFIGNSTAIQELFKRISEQFTAMFRRKAFLHWYTGEGMDEMEFTEAESNMNDLVSEYQQYQDATAEEEGEMYEDDEEESEAQGPK

SEQ ID NO: 1077 - DNA, 3517 bp, Homo sapiens
ggtttctccatgtcggccaggctggtctcgaactcctgacctcaggtgatccacccgccttgggctcccaaagtgctgggattacagccctgagccaccatggctgacaataataaaaaattttaaagcaaaactaaagatttataaattgtaaaatgcggttgtaacaagtatttactgtaccagtaaatatgaaaaatattaatgtcctcacacacatggaggtggcttgtgagtggtgtgagcatttcatggtcagagtttggcagttgggcgagagacaggatggattttaactcgaacatcgcagacacaaaactgaaaaccctgatgcggtgcctgcaccgttgcctcctttcctgcagctgtaaatgggacgagtaattccatccccctcccgcttccacccttcagcacagacgcagtcttcagcaaggaagtgctgggaacgccctggagtgaacccaggaagatgcctgcagtgggtgccagggcccctccccaccgtccctgctgggcttcggggccacgcccgactgctgtgaacggcctgcggagcaccacgtgcgacggctggaggcgagaggtctgcctttgatgtggctgttggtgcagggcctgtggtgccttccgcagcggaaatggcgcgccgcccggggagggcgggagcagcgtcccgggtgcccctgtgaggatgagcgacgagatgactggagggtccctgaagacctcaccagggtgcccccagccggtccgctcccaggaagcgacacccccacagccccagggctgcagctgagggggtcgccactctggctgggcgaggctgggcccttgggggcaggcgccagagtggcctcaggctctacgagatgcctgaaaacaccaacctctccagggctcactagcattggacgctttcacgctctgccctggccggaagccccctcaccccgcgcgatgtgcaaactcctgcagggctcactcagtttccagaactttaattattggaaagttctccctggtccagcccccaaatctgccgtgaacgttgacagctgagttgctgctccatgcgtgctttggctgagagcagaggggacccctgtcctccctgagctgctgacgaggggaggggtgaagggtggggcctctggagagggcaggtcccggggaagctccggactcctagaggggcggccaggtgggggccctggtgaccaggacagactgtggtgttttttaacgtaaaggagatccgcggtgtgagggaccccctgggtcctgcacgccgcctggtggcaggccgggccatggtgggtgctcacgcccccggcatgtggccgccctcagtgggaggggctctgagaacgactttttaaaacgcagagaaaagctccattcttcccaggacctcagcgcagccctggcccaggaaggcaggagacagaggccaggacggtccagaggtgtcgaaatgtcctggggacctgagcagcagccaccagggaagaggcagggagggagctgaggaccaggcttggttgtgagaatccctgagcccaggcggtagatgccaggaggtgtctggactggctgggccatgcctgggctgacctgtccagccagggagagggtgtgagggcagatctgggggtgcccagatggaaggaggcaggcatgggggacacccaaggccccctggcagcaccatgaactaagcaggacacctggaggggaagaactgtggggacctggaggcctccaacgactccttcctgcttcctggacaggactatggctgtgcagggatcccagagaagacttctgggctccctcaactccacccccacagccatcccccagctggggctggctgccaaccagacaggagcccggtgcctggaggtgtccatctctgacgggctcttcctcagcctggggctggtgagcttggtggagaacgcgctggtggtggccaccatcgccaagaaccggaacctgcactcacccatgtactgcttcatctgctgcctggccttgtcggacctgctggtgagcgggagcaacgtgctggagacggccgtcatcctcctgctggaggccggtgcactggtggcccgggctgcggtgctgcagcagctggacaatgtcattgacgtgatcacctgcagctccatgctgtccagcctctgcttcctgggcgccatcgccgtggaccgctacatctccatcttctacgcactgcgctaccacagcatcgtgaccctgccgcgggcgcggcgagccgttgcggccatctgggtggccagtgtcgtcttcagcacgctcttcatcgcctactacgaccacgtggccgtcctgctgtgcctcgtggtcttcttcctggctatgctggtgctcatggccgtgctgtacgtccacatgctggcccgggcctgccagcacgcccagggcatcgcccggctccacaagaggcagcgcccggtccaccagggctttggccttaaaggcgctgtcaccctcaccatcctgctgggcattttcttcctctgctggggccccttcttcctgcatctcacactcatcgtcctctgccccgagcaccccacgtgcggctgcatcttcaagaacttcaacctctttctcgccctcatcatctgcaatgccatcatcgaccccctcatctacgccttccacagccaggagctccgcaggacgctcaaggaggtgctgacatgctcctggtgagcgcggtgcacgcggctttaagtgtgctgggcagagggaggtggtgatattgtgtggtctggttcctgtgtgaccctgggcagttccttacctccctggtccccgtttgtcaaagaggatggactaaatgatctctgaaagtgttgaagcgcggacccttctgggtccagggaggggtccctgcaaaactccaggcaggacttctcaccagcagtcgtggggaacggaggaggacatggggaggttgtggggcctcaggctccgggcaccaggggccaacctcaggctcctaaagagacattttccgcccactcctgggacactccgtctgctccaatgactgagcagcatccaccccaccccatctttgctgccagctctcaggaccgtgccctcgtcagctgggatgtgaagtctctgggtggaagtgtgtgccaagagctactcccacagcagccccaggagaaggggctttgtgaccagaaagcttcatccacagccttgcagcggctcctgcaaaaggaggtgaaatccctgcctcaggccaagggaccaggtttgcaggagcccccctagtggtatggggctgagccctcctgagggccggttctaaggctcagactgggcactggggcctcagcctgctttcctgcagcagtcgcccaagcagacagccctggcaaatgcctgactcagtgaccagtgcctgtgagcatggggccaggaaagtctggtaataaatgtgactcagcatcacccaccttag

SEQ ID NO: 1078 - protein, 317 aa, Homo sapiens; identical to SEQ ID NO: 1074

SEQ ID NO: 1079 - DNA, 23889 bp, Mus musculus
tgtccttattaccagttggggcatcttctggatatatgtccaggagaggtattatgggatcctctggtagtactatgtccaattttctgaggaaccaccagactgatttccagagtggttgtacaagcttgcaatcccaccaacaatggatgaaaaaagtgttcctctttctccacatcctcgccagcatctgctgtcacctgaatttttgatcttagccattctgactgttgtgaggtggaatctcagggttgttttgatttgcatttccctgatgattaaggatattgaacattttttcaggtgcttctcagccattcggtattcctcagttgaaaattctttgtttagctctgtaccccaatttgcaaaacacatgaaactcaagaagaaggaaggccaaagtgtggatacttctttccttcttagaatggggaaaaaagtgcccatggaaggagttacagagacaaagtttggagctaagatgaaaggatggaccatccagagactatcccacctggggatccatcccataatcagccaccaaacccagacactattgcatatgccagcaagattttgctgacaggacccggatatagcgctcttgcgtgagtttatgccaatgcctggcaaatacagaaatggatgctcatagccatctactggtggaacacagggcccccaatggaggagctagagaaagtacccaaggagctaaaggggtctgcaacgctataggaggaacaatgatatgaactaacaagtacccctcagagctgtgtctctggttttatatgtagcagaggatggcctagtcagccatcaatgggagaagaggcccttggtattgtgaagatcatatgccccagtacaggggaatgccagggccaggaagcaggagtgggtgggttggggagcagggtataggggactttggggataacatttgaaatgtaaatgaagaaaatatctaatgaaaaaaagaaaaaaagaattatcataagttttaaaggagaattcaatgcactttgctctgcctcatttaatgcaaaatttagagagcatgaattttacagatagatttgaaccaaatagccagtccaccatccatgatttaacaacacacaaaatgtctcactgtaacatctacaatactgtcttattttaaaatggaacaaaagtctagacaaatagaatcataaatcatcagagtgcacttctccttaagccacacttaatatccaaataaaaataactacaaaatattttcagttagcatgacatagtgtgcagggttgttcacatgcccattcatccatccatcaatcaatactatgtgatacacatcacacaccattgacatatgaccttatctttatctccagagagcagatgggcaaggacatgagacacgtccaagatttgctacaaaacgtagaactggacagacacttggatatctcggtcatcttccctttgtgcctaacttgaataagtcaaaggtcttctgataaccacagcctattccttctgaaggacgtatttacccatttgtagagatgatttcattagacaaattccagattcaaaaacagaccttcatgcctgggaatttagaaggtgaaagacttcccacatagctacggatatgtgccatgctttgtcttcaagaacagttcagtgagatgactcagtggatcctcttatgcccagtatccttggtaactagacatcccactggcatgagcagaaacacaaaattcttaactcaaatataaggggcactcagcaagtgaaaagtctagctctgtaaactggagtcattgaatattcattaccattcatatttcatggcactgtaaatctcataaaaacaaaaagctgttcaagagttttgggtcttgaaagaggtcactgcaggattgaggatcataagactcattgttctaggaatggaaactacttaatgatcacactacagggtcatttatccacagtctctgggggagttcatctctggctatccatcatctttgcttcccaccaaacctgataagctgagtttaatccctggatgctgcatgatataaagcaagaactgactccctgcaagttgtcctctgacctccacactcaggctgtggcatgtgtgcatgtgcatatacacaacaaacaaacaaacaaatgcaaattctgtgattattctttatcattttattcctttaaactacaaaatacattgtgaagtttcccagtcattttcaatgtatagcagagacataaagacatggagagatggctcagcagttaagagcactgactgatcttccagaggtcctgagttcaattcccagcaaccacatggtgactcacaaccgtctctaatgggatctattaagtctcccggttctggacacatattcacatgcacatgtgcacatacaccaaatactgttgccaaatataaaaatttgactttctgagaatttttactgatagcttcttggttaaaaaaacaaaaacaaaaacaaaccaaaaaatacaaaaaaaatgaatcatagggtcttttgtacaaaaataatcttttgtttagttaacaaatacccactgtgttcctacatgtgaagctgctaggcaagctgactacttcccaggagcctgggctccagaagggaacacgtccacttgtgcctatacaagagcagtgtggtaggtaggttcatgataacggtaacattgtgggccacaggagttcaggaaggacacctaactcagatgcaggtctccccaattgagtcctggaaatgaggaaccaactgaaaagattgttgtgggtacatccaggacaagggtgggatttcccatgtgaaaggaaatcatacaagtgaaaatccagtgcaatgcaagcaaagggggctgcgggcatcaaaagcaacacacttagctagagtgtaggatcctttattcagacaccaggacacggctgtggctttgggtctaaagctaacaccaagaatagctcaggtccctggggagggtgagtagagacagggtatgggggtactaagaattaggttctgggaggccaagtctaaatggggctgcatatgttggaaccattcagaatcctcccagtctaagtttacatgtttaggacagtttgaaagtcattagggaaaggatcaaggatggaacttgggaaaatgtttcaatagcaccattgatgggttactgcattgtccaaagacactttagttttgagtataccaggctgacacagcagaacctttgctgaaaattaacctgtgtggaaagaacattggccgcagacttgggctgaagccctgtggactgtcacactaagccctttgcattaactcatttgttgaaacatttaaagccccttctatgcaccacaaactatgctagaggctgggaacagaaggacaaagtataccccttcaagggactcagagtgtgaagaatagcatcgtaaacatgctgaagacacactatcaaaagcaatgttaaaacaaagttccaaatcagggtggccgtggagaaagtctgctctagggacagacaaagagaggctgtctaaagagaatggcaccagaatggaaccctgcagggcaaacagctggtgaagaagcagggtcaggtcttcaggacagacagacctgcaggtgcaagggcagagaatggtggttcattcagagagcagcgtgataagcacataggatgaagatgagaaggaagggggaggtttccatagtaaccagtggctggaccacaaagaggcttgtatgttatgttaaagcacttgcatgcggtaggagacggagagaagtctacagtaactatagacttctggcccaggggactatggggaaggggtcccattaatcaacatgagaaagcagaaccgagagggaacagagagcagcaggtgggagaagctgggagaagagtgaagtgttacaggaggtctaggaacacaggccaggaatggagagtgcttttttttttttattacgtattttcctcaattacatttccaatgctatcccaaaagtcccccataccctctccccccaccacttccctacccacccattcccatttttttggccctggcgttcccctgtactggggcatataaagattgtgtgtccaatgggcctctctttccagttatggccgactaggccatcttttgatacatatgcagctagagtcaagagctctggggtactggtttgttcataatgttgttccacctatagggttgcagatccctttagctccttgggtactttctctagctcctccattgggagccctgtgatccatccaatagctgactgtgagcatccacttctgtgtttgctaggccccggcatagtctcacaagagacagctctatctgggtcctttcagcaaaatcttgctagtgtatgcaatggtgtcagcgtttggaagctgattatggggtggatccctggatatggcagtctctagatggtccattcttttgtcacagctccaaactttgtctctgtaactccttccatgggtgttttgttcccaattctaagaaggggcacagtgtccacactttggtcttcattcttctagattttcatgcgtttagcaaattgtatcttatatcttgggtatcctaagttttgggctattatccacttatcagtgagtacatattatgtgagttcctttgtgaatgtgttacctcactcaggatgatgccctccaggtccatccatttgcctaggaatttcataaattcattctttttaatagctgagtagtactccattgtgtagatgtaccacattttctgtatccattcctctgttgaggggcatctgggttctttccagcttctggctattataaataaggctgctatgaacatagtggagcatgtgtccttattaccatttggaacatcttctggatatatgcccaggagaggtattgcgggatcctccggtagtactatgtccaattttctaaggaactgcctgactgatttccagagtggttgtacaagcttgcaatcccaccaacaatggaggagtgttcctctttctccacatccttgccagcatctgctgtcaactgaatttttgatcttagccattctgactgttgtgaggtggaatctcagggttgttttgatttggagagtgctttttaaggacccacacacagacaatcaaggaaaccatgctggaggtcagaggcccagagacaaaggaagcagcgctgggacaaggctcaagagcaggttcatgggggaaataggtactcaaggaataaaaacactgagatgtgggcagaagacaagaatggagaacctgagaatcagatggaggcaggggcattaccttagtcacaagctatggagaggcaagtgagctcacaggctttgcccatcggatctaacacatggaggtggctggcaaattcaacaagagtggatcacatggaatggtaggaagaatctgagaggccctggtagaggagccgtggagaacacatacagggtgttagaagcatggctaagagagcaaaagaatgcagggacatgtgagaggtgtggggtcaaagggtatttccagggcaggatgcaggggcagactgcatactgcaacaccatataaacctactgtcatactctgtggctgtgaacggaaggaagagaacgtgtgtctaattttcagtctttccattacaactttgatgttttctatctgtcgtccctgtacttggatgctctccagtacctggtaggcttcacactcatttccgttttgtgattagacctaaaaagcgggcctttttcaagtggtgatgagaggcccagcactgacacccagaaattctcagccaccatcagagaatgagcttgtgggggcgagggaggaaaattgcaagaggaaaatgggaggggtggaggagggggaggagagagagagaaagggggagtgagagagagcagttgtgatgaattagaggggtgagggagagacaagaatgggagcagagaaggaaagggaggaagagagatcagagaagcaagagggagacaaagaaaagaggctatggcacagctcagtgcgggagcttgtgcaaggctcccaattcagtccttggtactgcaaaacatgcttgtttttaagtaaatgtcagggtctgaaaatcgctaaaggaagactcagatagaacgcaaaaacagagagcatttattctgcagaaacaaccagcatgtgggggtcaaccattttatgaaatggggaccccaaacaaaggcacgcaagccttcttatagggaaccaggggaactctctagagggactgggaaatccaaaatctcattggtgggtgctagggtgtcacaagtggtctggagtcaatggcctgcattcctatgtcataaatgtttaaccattggctgagatagggctatccagtgcagatggcccattctaagatattttcccattcttgtggctattcctgggctgttctttggaagggggttttatatcttgttctggattttatggtctgttcctagacctggtgtcttatgacattgtttctgggacttatggtctgttcatggagctggtgcctgtggccttctttttaaaatcagatctgatccttaaatggagaaaaatagggtttatgttgtcctttcaaaataagttctctcatggtttgaattatataaggaaaaggataagagaatgggaggagacaagaaatacttttaaagatgggagaaagatgtctgagaggaggaggatgggaaagaaagggagagaatagaagagaggtgggctaggtcatagtaaactggggagctgtctggaccagtgttgctgctttctaaaggcacataacatgagactcttgctcgggcatgtgtctgcctgaactgtgtacagaagggaggctgagggagactgacaggtgctcatggggcaaaaggcagcggtgggaacaaagctataacatcagacccaagagagcatctccccacaccaaggagcttcatccctcgtgggcaggggcaagcagtcccttctgggaaccagaaccgagtaggagtccctagacactgaggctgagggcgagtggactgtgagagagtaaaccttgccaaggagccacgttttgggagcagggcagttacagattttcgagagtcaaatgctctgcagtgcacgcaaaaggaaggagctgagttctgtctgtgaaagcaagggtaggtgaaaggagagaagtgattttataaagttgtcctctgactggatacatagtctatggcacaaatgcccactccatcacacacacacacacaaacaattaattcagaataggaaaaaatggacctcagattagaacagagaaataaatggatactagattaaatagggcctgtgaggacctggagatatggtcagtggttaagagcactggctgctcttccagaggacctgggttcaattcccagcatccacatggcagctcacaactgtctaaaactcctgttccagagatgtgacaccctcacatagacatactaaacagcaatgtacatgaaattaaaacaatttaagcccacaaaccatgaacagttacttaaatgtatacaaagattttaaatgtgaacatctggcaaccatctttatgtttttaaaggatcattctggattttttttttaaatcatgacagatattatctggctaacgatgtgtttgaattacttggaagtgcactgatttcctgctttgagaagctcaggggacagattcctcaagaaagagatggatggttggctcaaactaacataaaacacaaaacaggaacgtataaaatcaaattggagatgagtatccactgtgaagttctctcaactttcccgatgttggcagatgttagagtaacgccctgggaagttttaccgttttgactgttgcatggatattgccttggagggaaccagggagcctggttggagtctctgagcactacccctgctgcaggaagaacaggagcttaagccaacaacacctcacattagattgaaccatccagagtgagaggcacgctgccctctgccagagctacaaacttgcaagggagtttaattattcagggggtaaggaggatacttgagaagaagagttcctgtcaggccttggcactggctgcagacttcagataccctggggtgtcctagcttttttgttttttgtttgtcttcaaatgcattgctttggatgacctgataacccaaacggtgggaagacaggacaggcatcaccatccagcatccctgtcacttcaggtcaccccattcactgcccctccctcccccttcagaatgcctttaactgcctgcccctcttcccctggtctttaatctgttgctgttttcggctgcttgagtggctccatccacagccagccctgatttagcagccttcaatcggaaaacagatttctctggaagactgggacaaaataaggcaaaatgagctctgttcaagggcctcacagcacttctctagggacagatgcttggcctggagctctctgcaatcacccctcccccactgcacctgcatccatgctggctgcaattttgacacaattcctatagctctgtcctggaggtggctaagagagtcctccttatctctctccctccttgtggaggacatttttccattccagtaatgactcgtgtgactcatttttggattcttgctcttgccacatccacagtcattttaaatttaatgttcagttccaaaacgcttacttgtcaagacttgttgctccctgggtgtctatacaggacagacgtgagtacctgcctctgctgtccctgtggacaccgatacaaaagagaccctcgaagcagaaatgcctttccatttggcctctggcttcaggaaatgagtctcagctctgttgaagaccagacatgcaagttgggctgataaccattactgctctgttccggaaaagccaacacacccccacccccaaagtctgactgtgacgtttaatttttttaaagatctggatagtttctacccctcagtcctgggggcatccccctcacctggttcataagcattaaatatggagtcaaacaagcctttctcagattctagctccatcaacctctgtccgagcctcagtatcccctacaaaagagagtgctcatttggggtattcttgcaggcagtaagccagactgtgtaccagtgccctagcctccagccccgtgactagtcctcgtggatgttcagtactccatacccacgcatggaaactgctattttccctgcacaaaatcaatgtgctttgtacattgactggcagctgaacaccgtgtgctgtactttgtcttccttggtggaaatcacaaggaatgtttttatttatttactactttttgtatgaaatttcagtgatttttggctacttttcctttggagacagaacataaaagacaagcaaagttatgggcatcacctccaatgggacctttggagcagcgatcagaccaggcacagggtgcaaatgcaggctgcccctggtggccctgaggggcggcttttgtttcagctttgattgttgcttaaattcttggctggccaagctgcctgtctgtgcacctgcgtgctgctaagctagacccggatgctgtgggaggattctgttactcagaggccccaggggtctgagcagaggaagggacccgaggaagcttctgagaacaaaagatgaaggactgttaagacatccctgggctgtgaacttttcatgatccctctcaccccacccccaccccccaccccgccggacagattctgccaacagctctcattacagagcaacagactgatagaatctaagttatttccaagttctcacaggttagaagcagtgctgagagttgaacttgccacccacttcagggatctctggtaccacaaggtcttgtttctctctctctcttggaggcaggctactcaggtctagctactggcggctctccacacctgtagctcatagaagctgaaggctgataaaagggcagtgggtggagcgccctcagcccgctcacctctttggcatcaggaggagcaacaggagggccctgccttgaaggtacatctgaagacaatgctgagggggctggtgtctttcctctcttcatcttaccttcccggtctttcagaatagttgttctttgtgcaaacttggagctggctctgtggaagaacagtcttgggtttggagttcaggatgggttctgcagaagagtctgggtctctaagtcacatctcagacatcctgaggtagactactactccggctaaactgctgatgtgtagggcaggctcccagcaagcctaggtgacgtaagacccatgaagtcctggcagtgaggactgactggagccctcctgaagccgggtttgcccttgttctagcagaggggcgatctctctgtccagcctctccaccaccgccccccattgccagtacaacccagaagagaactggaaatgtatcagcaaacaccaaggtacaagccagccttcgtgttcctgtgctaggatgagggcttaaaggtggaagtctcctcagcccctagccctgagaggccagcaggggtcttaggctgtctgttacagcctgacacatagggtgtctctgagatagactggggttggttgaaatgagctaaggaaagctcattggttgaagggtcagggtggggatgaactactctgaggagctggtgtggacccttcctagggaatagaactagggttggcatgtgatggataaagctggctttgacatcccaccccaccatgttcttttgccataaggagaatctgtttactgggaattggttacttggccaagaggctggctgtgggctgggattaaagctctaaacttcgaatccatattattaccaaactagcaaactgtatctaagtgagcagcttagatccattccttgcctggcctcctcttcagagctgctgtttgtttgtttgtttgtttttctttttcttctcttttcccctgttggtcagtttgctttctacattcctgcaatggtttgtaatgagtgccagatccaagtcttactctacattctgtgatgctgctctacacagaaggttctaggagcagccagaatatttcagcaacctaaggaagccttggagcccctcctccctcttcagtgcctggtggttggcaggagtggggtgggtgttaccttcctggtctttcagaagactaggttctctttaccatgggcttctctctgtggcaggtcatggcacagtggtggcagatcctcttggggttgtgggcagtcctacccaccttggcaggggacaaactgctcagcgtctgcatgaattccaagcgccacaagcaagaacctggcccagaagacgaactctaccaggaggtacagagcagcgctggcccaggggctagggcagcttcttaggattatttgagaagaaatacagaccaggtggtctctgtaccccaccacccctaatcatttagatccttaatttggggtccatctagggctttgccactaagctgttctggccgcttgggaaacaggtcatgtggtgatcccagaggctatgctagctaaccgtgggtcagagcaagcctccctgccaacatgcgctggcgagacagaccttaatttgtctccttgtcagtttcctaaaggctgtgggaggaggaacattccaacgagaagctcctcccacccgtgataaccacccaggttcctgaatctttctatttgctttcctggatttattgccccacccccaccccctggagcagacacctggaagctatactttgtggcaagaaggcagaggggagggaggtcaatggtcaggtgcgcctcattcttcagatactagagttcctcctctagagaggtgctcatatcccctctcctgacgcccttctgcccccacctcagtgcaggccttgggaggacaatgcctgctgcacacgttccacaagttgggaagcccaccttgaggagcccttgctctttaacttcagcatgatgcactgtggactgctgaccccggcctgtcgcaagcacttcatccaggccatctgcttccatgagtgttcccccaacctggggccttggatccagccggtgaggacataggagacaggaggcagactcatgcaacacccttccattcaatcctaggctggcatctacaggaggcaagtaggaacaggagatgctgcccctctagggataagagcagagccagaggtctctgctggagacagggatgaaaaggaagctaaaatgcctctgtccctgcatgataacatgacagacactgtctgatgagggccagtaggataaggcagggtggaatgagatgaatctgagtgtgaattctatctcctgtacttactaactgtaaggcctgggaccaatgagctgctctgcctcacggttctcatttatccaataattgatgatgatgatgatgatgccgatgatgatgcctagggctgagagatagcttagtcagtgaagtgcttatcactatgcatgaggaccttagttcaatccttatttaaaaaaaaaaaaaaagccagatgtggaggtatgttgctataatcccagcactgcagaggcagagacaggtgggtcccaggagcttgcttgccagccagcctagcctgcttggtcaggtctaggccaaagagaaaatccgaaccaatgtggatggtgcctgaagaccaatacttgaggttgttccctgggctctgcagagagaggcatgggtgctagcatgcgtgcacgcacacacattcgcctgcatttacagaatgtaaacacgtgcacgcggagagaagaaataatacttacattgtaaagaattaaaatatgcccctctcttctgcatccaggtggtcccaaacgggcaggaagagcagcgggtttggggcgtgccgctgtgccaggaggattgtgaggactggtggcgagcctgccactcatctttgacttgtaaatccaactggctccatggctgggactggagtgagggtgagtggattaactacgcacttgtggccctcagactgggtgaggctgcacggggctcagaagggaagggacagtggaaagttaggagcccgttctcaatccccacagagaagaaacactgccccgcacatgagccctgcctccctttttcgtatcacttccccaccccggatgacctgtgtgagaagatctggaacaacacattcaaggccagtcccgagcgcaggaacagtgggcggtgtctgcagaagtggtttgagcccacccttagcaaccccaacgtggaagtggccctccactttgccggctctgccttagccccacagctctcttacaccctcccagccttctctctgtgcctgttgttccatccctgatccctgcttccctctccaacccacatttcctgatccttctgggccatggccatctccatcctcaggctattcatgttgggggcaggctggcacctgaatttctcatgcctcccagggtcccctccatgcttggctccatctccactggtctggatggcagctggtacccagcagtctacggtgcctcatttctcctgcctttacaaatgggcactactataggactccggcgcttcttctgtccacagccatctcttttgtgacagagacaatgctgacagccaagcgacatgtcctatcatggtaccttcaataaaaggctaggaaactctactctccatgtgtcattctggtctagtcccatgagcaccaatccaagatgcatcgagagagctgccttgccttcattaagattttaatttccttgactattaaggggtatgagaattgttaatatttatttgtcatttggaatgtttttctcttatacactgtgtgtgtgtgtgtgtgtgtgtgtgtgtcccttcctttcttctctccccttctcttttcttgagaaagactctcatgaatcccaggttggccctggaactcaaggatgaccttaaacctcatcttcttccgtccaccttccagttctgggcttatccacatatgccatcgcccctggtctcgggctgtgctagggagctaacctgctaggcaagtaccctaacaactgaaccatatccacagtcatgacgtgctggtcttgaattttggacccttgacttctaagctgcttttttctactttctaatacacccaaccccccacccccgtgttgagaactgaccctggtcttatgcttgctaggcgcatgttttaccactcagctaaatccccaaagcctttccactgctctgtaactcttgacaattcttttgatcttcatgtcaagattgctttgattttcttttccactgagagaaatgaggtgttggaccagatgatttaatttacaaacaaagaaggggggacccagggagccccacttgctagatcacatccaaaagcctgaaacagaagtatagcattagcttgtagaagggccactgcctcaagtattccctatgagtagatccacggtgttgatctgtgtgctaggaacctcccagagtcagaagctaacccctcccaatgctagatgatggcttccctgtcacactttcttgtgacaagaggacacagcaggtattttctcaagaatgctgattctctcttgacacgaactctgtctctgtcgcaaagccaagtgtggtgctcagaatctggagcaggggacagctgtcagaaataacaaggacaaactcctgtataggatatctagaagaaaagggccagctagatgggtcctgaaagagtttcagagaagcaaggcttgaatttcagtggagaacaaaaaaatatgttctcaaagccctttgagacacagagaccccaaagaacagagctgcccatggcttataaatgaactaatacatacaccttcaaaattacctacaggaagccagacatggtgacacacaccatggagtctgaggcagaaggctgactaagtttgaagctagccaacatataatacagggacactcccacccccatctttctcttcagaatggagaaccatggagaaactgagggtgtcttgctcatgcagtcaagactttaatgattttaaagtgttataagtgtaaaactcaccaaagtagagttagaactgaggtgaagaaaacaagactagttctgttaagcagtcaggttctatcaaccactggatgcacaggaaggtctctaagtatgtaacaggtcaggttttccattggagtctcgtgaaagcactgatgcatagcctttatcttcacttttcagactagaacatggccaagatatgtttgaaaccagcaaaatctaactcccatctccagcagaccccaaagttccatgtgactgcacatccttagcctacacacccagtctttggcaactctcatctcaagctgaccctcatgtccagcttatcccagctacaaccaacccccatttccagctagcccccatctccagctgacccaccgctccagttgaccctccccccagctccagctgaccttcgtgtccagctgacccaccccatctccagctgttccccagctccagtgcttgtactgaacagcctggcccagggtggaatgaggcagaactgtagtcaataaggaaggaagcaagggtgagatgaggctggtaaagctgggagagctcgtatggctagagagactgattcctgcccctctccactttgggatagagaagtgggaggttttactagagagaagtgaactgttgactctcagattgtctggataagcactaacacacatgggcctaaggacttctgacgcctagctcaaagctccagccagcaccgtcttctactccaagaccatggctgagaggaacccacccctaaccatttatccacacaaagttaactcttaacctggtttttcttttctgctatacagactatctttctacactgtgtcctgatagtttcttgaattcatcttccaatctttttaatttcagcaatccatttttaattatttccaggagaggtttcccattcccttgtttgtcaccgcctgctgctctgggttttgaggctgtaatatcttcttaagtctcaccgaagatctaattaaatttttttttcaaaagctgtccctagtctctgaaagatgcacatcccccaaggttgctctgttctgctctctgatgttttctgtactccgctggttttccaagtctggtgacttcggcttatccgtctacacttaagaatgagggctgggtgtgttttatagagctggtttggttttgtgaatgcttgtttatatgctgctgggaatttctagatgtgggatggggctgtccactggaagactctgcttagtaagagtgtggaggtaaatgaggaccacttaagtgggccccagggaaggccgattagtcaggacatgctttgtttgaaggctgtccctattacaacttgcattttggcagagaatcaaaggcagagaaggaaggcttttggtctgccctgaaatctgtgctattggcagaggatgctggaaatgaggtagtttgggtcccatatgactgggtaaaataatatttgttttcttccacttggtcccatttggaatcatagattgaaaaactaggatagtggctggagagatgactccatttcacacaatcatggtggccagagttcgtattctatcacctacatgacaagccaggagcccaaaagcatctttggccctagctcagaggaatccagaacccctttctggcctgcttatcttctcacacgtatacatacccacacacttgtgttcatacctcctgcccatccacacaaatcattcaaaactaaggaagctaacagctgctcttctagttcttgctatctgtgtgtcaggaatgaagatattctaaagaaacactgtgcctatctttgtctatcagactacttgataagataaactttccctaggagtattaggctaggagaaggaacaggctggagcctgggaccaaccggaggaggaatatgttgtttcctggaaagagatgtcacacagttctgacaccttagcagatcatcttcagggaagactgcatctgagacaagtatgggtgggactccttgagcataatcatgcatacttcttgctctctgtttaaacctggacttcaagtcaagatgaagggtgcatttggtgcagaggtgttactggacccctgtgcccttcttccaacatagagatgcacactgagtacatttctctgggcttttcactacagctcgtctccttaaatggcttattgaggaaacagacagaattcctgtccttgaaaattgatattttaataaaagtagtgcaacaatgtaagaaaacaataaaaaagagacttcaagaactatagacaagacatctgttaggaaagggagcacaggggactctgggagggagaagaagagccaaaatagaagaaatggatatggtaaagacacctggagaactatttggttttctggggtgtatacttggggtagatgaggagtgctagcggagatgaagcaagggaacagaagacaggcagaagagcccaaggctgagcacaggttagtgggacaaccattctttgcctatggagacaaagacagaaaccatttaaatgcatgtgtagaatgaactgcttcagatataaaatgctggctcagttagcaccaagcttcggccatctgctgagattagatgctcaaacctctggaacctcaggggctttctggccacactgtggggtctgggcagctgatcctcatggctagctttccaagttcacagcccaggatgcttatctctcctccaccatatgggaggatgaacttttcagaggaccaaactccaccaaagagtgagattcaaaacccagagaggattcttttccggctaagaacacattatatgaatcctaaaagttggcagcagcaacagaaaagcccctctgagctttgcatctgcccacagcaatgaaggctatgtcagagcactctggaacagctgctgattgtgaagctgatgggctcaggccctctgcctgcttcatgcagaatgaactagtacttagcaggctgtgattacttccattcagtggtgagctttgggaggaaggagcaatttttcctaagctagaatccggtgctatagcaaaaagctgcaggaagccgggtctctgaaggggctcattgctcaaatagcttagttcagctaatcctttgtgggcataaatcatgtgtagcctccttccctcggagccctcagagcatcacaacagcacaggaagttgtggggtgccgtgggttcgttaattcattagtaagtaatctctaagttcagaacccattccccagctcggggaagctgagattatttcccaacatatctgtttttagtgtgacagttttaatcagccctctttcagtagcacagagcatgcaccatgaattgttatcaaacagagctctggatgctgaagagctgagtctgatcaagtcgaaagaaaatgggagtgtctggtggttggttagctgttagcaggcttggggggggggtgacctggggtggatcacacccttatgctcaaaggaatggagcagaaaaaaataataattgctagtccgaggaatggatcttgagtcttatctctggtcctaggaagaggtgtgacaccctgaatggccctaaaagtcactaatgggaaactctctaagctgtctccaggagccctgcacacagccgtggccaacctcttgtctcaacattacacaacactgtcacctacaaagttcacactcaggcagaatacccgagtttggttcccatcatcacctcaggcaacttccagcaatgccctcttctggccttctcaggtactgcactcacatgtacagaaccacatacatatacacatagttaaaaataaaaacaaactatttttaaaaagccactcgatcaggttataaaataaaaggctaataaacatcataatgttttaagtaagtttcagagtttgtgtttggccacattcatagctgtctctaggtacatgaagcccatgaggtacaggttggatgtgcctgctagcaggaggctttcttattaaatacgagacacggtgtttctttatataacactcaatctagactgtcaaatactgggacaaagcctttcgggaaaaccatggggcagtggtctctctggctactgtctactctctccccttggaagtctgctctattctgcaacagagttgccttgtcaagtggaatacagagatgctgatgacaaatcatgggtccctaaaacaatgatgtggggaagtagatgtcacagtgtctctctcctatctgctctcaaaaggctagcagcaagaggcaccttctacaccactgagcttcaccaacagtctcagagcactgctaaggaaatgtagccatttcttcccacacccatctcagattctgcatcctgagcctacaccagtgtgtggtgagtctactccatgctgggaagtttcatgcttagcatttctgctactctgcacaccttctgttttagaaaatggcacaccatccaaagtacttgtcaagactgcagaagaggataggaggtgataagaggacaagcaaaccagacgatgcacaggtcagagccactggcccatgcaataaggggcaggtgtttctctttttatcctgcaagtaatgctaatagcatgtcaggaagtgggggccaccatgccacttcctcttcaacaggaccactgtcccaaaaacacacccttctcaccatcttgcctataatgaagtcactttgtcagccaactagatgaactttgctaagcacccgatgcctgtctcctcgcctcccctgggtggggatggagaactaaaatccatctttactgcctgagaggcctcacattggccatcaactcgataggatctagaatcacccaagagacacacctctgggcatgcctaggagccaccctgaatgtcgatgtcaccatccaaggtatggtctcagactaaagaataaaaaggagaaatggagctgccgtcacttcctctcctcctgcctgtggtgcgatgtgaccacgcagtgaccatgcagaaggcaaaggtcacggtgcacacagataaacgcaaacatgccgctgctctctccaaagggagaagatacttggctcttctcctggaatgctcggagtaaaatggagtttacagttctctgctccctgttgaaccaggctctacccatatcacccagaacactatgtttgtttatctctgatcttttcctcctaaatcttgattgttgcttctaggccatagaagccaaccctatggatgatggcacttcacaacagcctaagtgacctctgtgttatcttagggccaggccaatcctgacacccactggcactgtgtttacctcagtcatgctccctagacctttattgtgagcactgtttctgagtccacagaacacatctttatgaaagagctacaaatgtaaacatgccttaagctttgctgtactcaaaggactgaggtaactgttatcaggaaacttccagaattgtgctgtgcttaaatatggctaaaataaactggtaccagactctccaagatttgtcccaacataagtacctaatttgggctgaactgagtttcattcttgtcccttagtggctcatttccctgctattcagaggcctgaagggaaccctcatgtgaccaagagactcactcctgccccatatattccccaccatgatagactgcacccttgaaccttgagccaaaatgaaccctctctccttaacttgcttttatcagatgttttgtctcagcaacaggaaagtaacagatacacaccccaaagtcacaccgagggaagatgagagatgtttgttaattaatggaccactgatctgctttgtctgtggaacagaatgaagttcattatccagaccttgaggtgtatccaaccccttcatagtcctcttcctgagcccagatgcccctgcctgagcctcccttagggtaacccctccctcatgccaggctgggccttgtggggtcacgcttgtcatctatggcttgacaactgattttaccacgtatggctctgctaggaaatgtgatggcagccttgagagagcagaatgctggagatgacagagggagtaaggttctactctaagctgcccatgatgccagcagcatggaggagccgagtcatctgtatctcaccggggagcaatcggaggttaatttcttctctggggctgtttcttagaaaggtggttacagacagcactctgcttacagcctagtgttgtctgccactgcctgccacaggagactgtcatagtttcactctgaatccatgtgtcagggttcagcaaaaaggatgggtttctttattccacagcccccttctcttttctctctgaaggctcatagggctctgtctctaaaacgatcaacaagaagctatccgacgctgtgggtagaaacagaaggcatccccaaccccgggggcaaatgagagcaagaaggctgttggctcagatgttgccatggcaaggctaccagccagcattccttgccaattggcagagatgcagagtcaggtagaagtggaaggactcatcatttaaagaagaagaggaagctgtggggattgctttagcatgctcaggtgggagtttgctgtggaagctgagggcagggtgatgaactgtggggcgtcttctgtgatagatctggctttctgggtgggggctgaatgggaacaaagagtaaggaagccaacatcactgaccaaggcatcaccaacctgcaactggaagtacaaagctgtacttcttgctaggttgcggctgatttcttgcggtttgggggtggggaacagtcaaatcatagataactctaggtaacaaagtatcagcaactgttagtggcttctgattttcatcagtccacaccttccctgggtcagaaatcagagtgtggtttagctgatcctcaggttcagggtctctaacaagaatgtaggattaccaggttctgtagtcatcgtgatgatgaaaatggagattgaaatgtgccaggcagcttagaagaaagggccccatgtccttggttctctctccagccagaggtaatgaaaagaaactctgatttctctcttcctggataagcacccttgctggtgctctaagtaggggtgtgactgacactctagcccagatgctaatcccttctggatctctagattttccccaggtatatcccatttcctaaatgattttagagctaattctatggaggtcagaatgttatcatagcagtagagactcaccaggagagagccatagtggccactcggttaccataacagtggattttcatcaaggaagaacgtggtggactctcaatggtgagggcagggccattcttccttccatacttgtttatgattccataaccataaaataacctctttgctcttccagtaatccctgactcgttggcacttaccatgttttaaactcaagctgtcagacagggcaaatgattttctttctggaggtccataaagtaagagagaacaaagcaaggtaattatataagcaacattaagagctgtttggccttgggtgaactgagaggtgagtagagaaaggcacagcatgctttcctattgcaaagcctttgtgctcagaagcagatttatgtaaattaacctctgtctacaaactatcaacacacattagcatgcattgtaaccacagcctcagaggctggtattgtggtccccattagtgaatggagagttaccaagctaaggtccctaagttgcagagcctcacttcagagcgtgcgaggtgcctacatatgtgtgcttctcttccccagaggcacggaaagcatttaatggttagaacaatagacttatagaaagtaccaatcagcacagtttcaaatgaacaacagcaaatcagccaacagtagctccgataaaccgagggcttagagtcccagatcaacccaggttctctgggttttctccatctctcagaacaatatcatgctggccagtaagcagtattgcccactggcttccaggtctcagttcttcagtctatgggtaagaaatcacagtccagaatggttaagtgacctggcaaaagtgtctcaggtaggtggccattgaattttgaaccaagaatcctaacttatggccttttctgctcctgaatgactattgtccaggcagtctgctctgtgcctgggtttttaatggccttggtggtagaaatgacacttcctgcaattatacagagaaagaaaagatggctcaagtcagaggtgacagagcctcccaaagtcccacgggatgctgatatcgccatggatatctaacttccaaaatgcaggctgatgttttatatcaagatgcgctgaatgaaatatctgtctcctccttagcttgaagcctgccgtagagatcctaaaaactcttggaatttcctgatgaatgctttcttcgtgctttaaagtggttactggtagctcccaagctagtgttaggatggggcatgagaaggtccag

SEQ ID NO: 1080 - DNA, 1270 bp, Mus musculus
gcagtgctgagagttgaacttgccacccacttcagggatctctggtaccacaaggtcttgtttctctctctctcttggaggcaggctactcaggtctagctactggcggctctccacacctgtagctcatagaagctgaaggctgataaaagggcagtgggtggagcgccctcagcccgctcacctctttggcatcaggaggagcaacaggagggccctgccttgaaggtcatggcacagtggtggcagatcctcttggggttgtgggcagtcctacccaccttggcaggggacaaactgctcagcgtctgcatgaattccaagcgccacaagcaagaacctggcccagaagacgaactctaccaggagtgcaggccttgggaggacaatgcctgctgcacacgttccacaagttgggaagcccaccttgaggagcccttgctctttaacttcagcatgatgcactgtggactgctgaccccggcctgtcgcaagcacttcatccaggccatctgcttccatgagtgttcccccaacctggggccttggatccagccggtggtcccaaacgggcaggaagagcagcgggtttggggcgtgccgctgtgccaggaggattgtgaggactggtggcgagcctgccactcatctttgacttgtaaatccaactggctccatggctgggactggagtgaggagaagaaacactgccccgcacatgagccctgcctccctttttcgtatcacttccccaccccggatgacctgtgtgagaagatctggaacaacacattcaaggccagtcccgagcgcaggaacagtgggcggtgtctgcagaagtggtttgagcccacccttagcaaccccaacgtggaagtggccctccactttgccggctctgccttagccccacagctctcttacaccctcccagccttctctctgtgcctgttgttccatccctgatccctgcttccctctccaacccacatttcctgatccttctgggccatggccatctccatcctcaggctattcatgttgggggcaggctggcacctgaatttctcatgcctcccagggtcccctccatgcttggctccatctccactggtctggatggcagctggtacccagcagtctacggtgcctcatttctcctgcctttacaaatgggcactactataggactccggcgcttcttctgtccacagccatctcttttgtgacagagacaatgctgacagccaagcgacatgtcctatcatgg

SEQ ID NO: 1081 - protein, 271 aa, Mus musculus
KLKADKRAVGGAPSARSPLWHQEEQQEGPALKVMAQWWQILLGLWAVLPTLAGDKLLSVCMNSKRHKQEPGPEDELYQECRPWEDNACCTRSTSWEAHLEEPLLFNFSMMHCGLLTPACRKHFIQAICFHECSPNLGPWIQPVVPNGQEEQRVWGVPLCQEDCEDWWRACHSSLTCKSNWLHGWDWSEEKKHCPAHEPCLPFSYHFPTPDDLCEKIWNNTFKDERRNSGRCLQKWFEPTLSNPNVEVHFAGSAPQLSYTLPAFSLCLLFHP

SEQ ID NO: 1082 - DNA, 22047 bp, Homo sapiens
cagagccagtgcttgagaaatcttagttgccttccccttattcatggaatgggtaaggcacagctctgagaacaaccatcctcatatcctaggtttcttcacttcacccaaagagaccatttatccttcagtagaaataatcccagaacacttcctccagattcaaagaaaacaccatgccaagggatttggcagataaaggaggagataaaggctttccacatttctatgaatgaatgcaatgctttgtctttaaggaaaatacagcaagaggcctcaatgtttcctcttaagccccagtttgcatggcaaccagacattccacacactttgatcataaaacggaagcatcaactcaaatgtgaaaagacacttagcaacttaaaatctattatagtttcataaattggagtctttgaatattcccaactattaacatttttcagagatttaagtcttaaataaacttaaagcaattcaagagcttcacataatggtacatctcactggtctataataaaggtatctgaagaatcacaaaatttacttttctagaaatggcaactgcttaatgattgtattgcaaggcaatttacccacagcctcctggaaaattgattttcctctctctgtcttttcatttgtaagcacaagggcataaagagccaaatatttgccaccttgaaactatatactttccattattttctgtctataaaaactataaaatacattgcggaccttccagctcttctgcgagatttctcagatattttcaatgtaagacaaagactaaaacaaatccaaaaacatgcatatttgttttctctaggctatgaagtataacccaactgattccgttcttcaaacttgaaattgtgtacttgactaagaaaaaaacaaaaaacaattcaccaactgcatttgccaagcctcatggtttatagagctgtggggagtcaggaagatgagcccagcaagacacaggacatctagtgataagagaggtgaataaagagaagaaaaacaatcattttctacaaagtagaaattgaaacgcctgcaaatcacatatgtacatgaccatctaaatatgaccatacacagaaactcagatttccaagaatttttcctggtatgcttcttggcaaaaatgaatcataggagaaatcttttttttttttaaccaaaaaacaatcccttgttcatttaacaaatacctactgagtgcctatcatgtacccagaactgtggttataggtgtaagactgacagacacagtctctactggtctaggagcttacagccgcccagtggggaacacatgagtcagcaggcatctctggaatagtgtggcaagtgacatgatggaggtaacccaaaagctatgagagagagtacctggaaggacacctaacccagatttgggcttccttggatatagatatcttcaaattgaggtctagaaaataacaagttagctaaaggaagatactacatgttttgaggatgacgggggaggtcccatgtgaaatggaacagcatgtacaaaagcctggagcaacagtgatcatagagagttcaaagtattgaagatagttccgtttagctggactttcccacactaggaaggataggattgtggatacaattctaatgctgccaccaacactggcttacatccttggaaagtgaaggggagagatggggggaggacacagccacactgagagtcatgctttgggcagccttgcctgcagggggccactgaaccatacgtattatacccatgtaaaattgtcccagtctaaaagaacatatgtaggggtgtttcaaggtcctttgagaggagctactgataagtttgcacctattcaaatacttatctttttaagcatactaggttggcaggaggggcatccactgaaaattggactgtgaggaaagagcatggcctgtggagtcagaaacactgagttctaccccaggttcaggccctgtgggttgtcacacctgacacatcccattcactcactcactcattcatgtgttcaaatattgagaggcccttctatgtaccataaactggcaggagcaggtgacagaaggtgatatggttcggctgtgtccccacccaaaatctcatcttgaattataatccccataatccctatgtgtcaaaggcagggccaggtggaggtaattagatcatgggagtggtttcacccatgctgttctcatggtagtgagtctcacaagacctgatggttttatacgcgtctggcatttcccttgcttgcactcacttggtcctgaaaccctatgaagaagatgcctgcttctcctttgctttccaccatgattgtaagtttcctgaggcttccccagccatgcggaattgtgagtcaattaaacctctttcctttataaattacccagtctcaggtatttcttcatagcagtgtgagaacagactaatacagaaggataaagcaaagtcctcactcttaaggaactcaagagtctaaggagggaggggcaagcaaatatgcagaagattgcatcaccctgtattaaatacgatgctgaaaagaagcattgaatgccatgagagtccacagaggaaggggcaaaagcaggctgtcttgtgatgaaggtgcctgagcagagcccgagatgatgagcagcctggcggagaagcagggaaaggtcatccccagcagatggagctgcagatgaaaaggaacagagcagtggtggctcattcagagagcagggagtagctcagtgtggctggcctgaagggtgaggatgggatggggggtgagaagtttctgttgtaacccatgtcagatgatgaagagcctcgaatgaccatgttaaagtatttgcatgaggtggcagaggaagaggggtccaggatagctccaggcagggtgactggagggaaggggtgccattagccagcatagaaaagcagattgaatgaggagctaaaacaggtaagtgtaaggtgcctgtgagaaattcaagtgcaataccactggaagtatgtagatatgtaattctacaggtcgggactgtatagagatttaagagtacccacatatagatgatcactaaagccatgttgggggtgagattgcccagagagagagtgtgtaccgtaagaagagaagaggtccaaccaagaacagagccccagaaagcacttaaagggcagaaggcggaaatggaacctatcaaagggaccaacaaggaactagttgagacgcaggaggaaagtcctgagaatcaagaagacatgactttcaagaaggccagggggattgagtactttggtcaaaggcagctgaagggtcaggtaggatacagatggaccttacccactggattggataatttagaagttgctgctgaatatggccagagtggattccagggaacggtggtggagccaggcagcagggagggataatgagcataaggagacacagaggagccaccatgaacatacacaggttttatacaaaacatggctaggaagaaaagacagtttggtagctgacgtggaacttagggtcaaaggacagttccaggacgggacgttgggtggattgaaaatatatgaagaggccgggtgtggtggctcacacctgtaatcccagcactttgggaggccaaggcaggtggatcacttgaggtcgggagtccgagaccagcctggccaacatggtgaaaccccgtctctactaaaaatacaaaaattagccaggcttggtggcacgtgcctgtaatcccagctactggggaggctgaggcaggagaattgcttgaacccaggaggcggaggttgcagtgagctgagattgcgccattgcactctagtctgggtgacaaagcaagactccgtctcaaaaaaaaagaagaaaagaaagaaaatgtatggagaacagtgcaaattgtaaaactgcatgcaaaccttagttactagttaataatgctctctgatatacccagcagcagcctggtttgaatgtgacaatgtgacataagtgtaatggtgagcaagggagccatcagcccgagaaggaaaatatggagagtaaagacatttgttctttctcccctgtctgtaattttcagttaattccttgtccatagaacactggtgttttgctctctgttctccccttccttggactctcttcaacagttgatgagcttcacattcatttcccttgtggtgattagacctaaaaagtggccttcttcaagtggcaatgagaggccccagcattaacgctctgaaatatcacggaaattatcagaaaatgaagaggctctggttggaaaatctgggagtgaggaagaaaactgagagaggaaaggcagggaggggaggggtgggagaaaaggctgagaggagaggtcactataaactaaaaggaggaagaatagaggagggaaggaaaagaaagaggggataggaaggaagagaggagaggggagggagggagaggagagagagaagggaagagatgggaagaaggatggggagagggagaaaggagaggtcaccttaagttggagagaaaaggataggtgagcacatgataaaggagaagagagagaggaaaggaaggaaggcaggagaaagggagagatgggataggtcaggttaaactagggaggtgtctgaattagtattccaggaagagatgctgggtggattgaaaatgtatcaagaacaattgcatattgtaaaactgcatacaaacctcagttacgagctattacactcagcagcaggaaagaagagaggcagaaaagagagatgggatacgtcaggttaaactagagaagggtctgagttaaaactatgtttttaagaaatgcagtttgggccaggcatggtggctcacacctgtaatcccggcactttgggaagccgaggcaggtggatcactggagatcaggagtttgagactagcctggccaacatggtgaaaccccatctctactaaaaatacaaaaagttagctgggcatggtggtgtgcacctgtaatcccagctactcgggagggaggctgaggtgggagaatcgctggaacccgggaggcagaggttgcagtgagccgagattgtgttactgcattccagcctaggcgacagagtgagagtctgtctcaaaaaaaaaaaagaaagaaagaaaagaaaagaaatgcagttttattctactcgggtatttctcctcattgcagacaacaaattgcagagtatgcactctgggccagggactgtgtttgaccctgtgactattactgtctttctggagctgcttacagaagaggcaatgtcgagcctgtctgcaggcattcatttccaagggcaggaggtatgtgcaatgactgcagcagcataagctccaagagacatctcaccagcccatgacggccatacaagcttccctgacaggaagccttcagttctgagagctgaggggtatgtatccctagacacagaggctgggctatgacagaacagccctggaagtggggcccctgcaagcggcaggacaatgacaggccgtcaggcctcaggagtgcccagagcatcaatgagagcaagtacaacagattaagatctaaaagtaaataaaaaccacatttaaaagggctggtgtgccatgttaaggacctgggacttaccttaaggtctagaaaggttttaaacatgggagcatcataattgtctttacatttttaaaagatcattctgaaaaacaaagactgcaaacaaatgttgaaccctagttaatgatatgcatgtttgaattacttaggaagacatcagtttactgatatctgcaatttactttgaaatacataaaaaataataagactgatacctgaatagagagaaggatggttggctaaatatataataaagaaaatataataaaatggtaatggtgaaatctaagtggtgggcatatgagagagagttcactataaaattatctcaactttatgtttgaaaactttcataattaaaatactgataaaagaaacgaaataattatatgaaaaatatacctgcattcttatgtttattacagcactattcacaatagtaaagatttggaatcaacctaagtgttcattaacagatgaatggataaagtaaatgtggtaaaatatatacaatgatacactattcatccatataaaagaatgaaatcgtatcttttgcagtaacatggatggaactgaagccactatcttaagtaaaacaactcaaacaaaaagtcaaatactgcattttctcacttaaaagtggaagctaaataatgtgtacacatggacatagagcatggaataatagatgttggagactcagaagggcgggagggggtgaggtataagaaattacataatgagtacaatgtacaaagcacagacttcaccactgtgcaatatatccatgtaaccaaactgcacttatacccttaaatttatacaaatttaaaaaaattctgagaaattagatcattatggctgctacttgattaaagctctggaaaagggtgggagagctagttaggaggttgttgcagtaactgaggcaagagccgatcatggtccagacagtaagtaagggatgtgaattcaagagatatttagaaagttaaatcaacagcttcggcgattggatagacatagagtgaagaataaattaatatccctatttacctccctagacagaaaccaattaagagtttacatgaggatggtcaatcaggtttggggtgagaagaattcatgagacccagtaagaactctgaatcactgaagtccccttcggctggcctctgacatcagattctcaccaggagactcctggctctagctcttcactttcgtagtctgttctcaaattcagtgggggagtgacctcaggatgggagaggggaaggaagtcatcactgcccagcatctccagtggccccaaaccagagccaaggctgggttgcttcacctactgccctgccctccttgtcctccctcagagcccgctgaaggctgctgtacctcttcttttggaaacgcaagtgttggttttgttgtgtgtgtgtgtgttttagaataaaaattgtcttgaatcagccacttcaaattgcttcatctacagtcagctttgatttatctgctttcagtcagaaaacagattgctatggaaggctcagtcacaataaggcaaaaatgagctttgctcaagggtctcaagctgcatctcccgagagcagatgctggccggcctgatggttctctgaaaggcagcctcactcactgggtaattccttcctccctccctccctccctccctccacctgcatatgcgctggctgcaattttagctcatttcctacagctttgtcctggagactgttatcaagcaagccgcccttcgtccttcttcacaccctatgaaggacagttgtcagaggacctatttccatttcaataattactcttgtgattcatgtctggattctcggctctggcacctccacagccattttaaactgaaccttaaaccccaaatctcttaccttatcaatgcttggagcttcctgaatattcatgaggaactgaacagaacatgacagcctgcttctccctctgtcaggctatagagatgctattaccatttggtatctgaccctaaggaggagactccaggctctgcttaacgtggggacatgggagactgggttgataactgtcactgttctagaataaagccaacacacgcctcccaatacatgcacaacctcattatggcatttaacgttaaaaaaaaaaaaaaaagcagacctcacttgagacccaggcacccaggcagtatctactcttttagtcccggaggtttctccctcacctggtccttaagcattagatagggagtcgagaatacctgaaattatatcccagctctgctactcaccgctgagcctcagttccccacagctaaaacaaggagggtgttcatattggaggtctttttgagacctcagatcctgtagacagtaccaggccagtgcctggctccttgtttgtgctcagcattcagtggctgtgattacccaggtgtggagaatgtcattttccaacattagtatatgctttacacatcagttgtagctgaacaccacagaatgtattttattccattaaaaaaacgcttttagtgttttgttttcatttcctttgtatcaataaaacttcagtgatttcagctacttctctttcagagagagaaagagaggacatattataaaaacaaagaaatatgctccttttccagcatttttatcatctttgggactctcccaagaatcctatccaagtttccaatctctccttagctgaaaaggatagtcttgcaaatatgatcactgctgagaacacttgtagaatatttcacaggacaacgattcctgtatgctaagggaggctgcttggcgggttatggagggactttctttgttttgtttgctttggctttgtttgtatgtttaaattcttgggtccccaaggccacacttcatctctgcatcctgtgtcctcggtctgtgctccagcagggaccatagttcctgtgggctgtgcgaggacactgtcagaaaagccaccaggtgactgagctgatgcttggctaacagtgaaggggcaggtagagctacggaacagaacataggaggggcgtgtggagagaggataaaagaataaaatttaaaaccattaagacttcctctatcccaggcacaatgccaaggtttttgttcatgaactttctctttatttttccaatcccataataaaaacttcctttacagagagagaaactgacagagaatttgagtcattttctccagggcagccagctagtaagtagcagagctgacagccgaacccggtaacttattgtagagccccggatcttgcctacgatggggtctgtttctctgaggaagcaaacttcctcggaacccacaggcctgcagagctgggtgagacagatgctgtttaatgagagccacgtggagttctcctcctgcacctggacctagtagaaatcagactgggtaataaatgggtgggacatggaactcccctcagcctcatagtctcagggggaggagggagcaggagcacctgaaggctcctgccttgaaagtgagtatgaagagagtgctggaaggggcagcatctttcctccttttacctaacagatctgattctttaaaaatattcaaggccatggctgagcttgaaactggttgtctggagagagaacagccttagatttggacttcaggttgggctctgaagaggggggctgggctcttcttccccaggatgtttgaggctcttagaccagggtaggctagaagtttccagtttcaccatgatgggtccaggtcaggctcctgccagacctgggggactgggggagccatgggctcctgggctatgaaggtgaggggccctgtgtcctaagaggttgggtgcttgaggcctggggcccctctgccttttgctttgttttgtctctctttccactacctctcattaccactactacccagaacagagttggaaataggaagggccctcctcctcattcctgtgatggggatcaggctttggatgtagaaggctcctcctatctgactcatgcctcggcatgcccctggctctgcagggccagcaaggcctccagcactgtgtcaggcctccaaggattattctacctgccctgacattctgtgatgctgcctccaaaagaaggtcctaggagcagccagagtgttgcaattatttgagggagattgaagcccatccccctttcccagtgcctgctatgatgaagggggtggagtggggtgtcatttccatcaagtgtgcagcatgggtctctctgtagcaggccatggcatgctggtggccgctcctgctagagctgtggacagtcatgcccacctgggctggggacgagctgctcaacatctgcatgaatgccaaacaccacaagagagtgcccagcccagaagacaagctctatgaggaggtacagaggccagacctgggtatgggatggggaagatcagggaagggacacaaatgccaagatggtctccgaacctcatcaaccctgatcatttggttcctggggttaggagttaagcaaaggcaactagatggaaagagactatgcctttttgagaccataagagccaagcgattcaaagttcccatttctgagctgctctagccactgggaaagcagggaccgctggtgatcccagagatccattgttgactcggcacagatgaaaacaagccttcctgccaacaggtcctggggcaacatatgacttatgtgacccctccccaagctcctaaaggcaatttccagggatatgggaggaagaacacagctggcatttggcctatgagaccctcccacccaatgcaaccccagattcccctgggtctctctggggctcttctacctgctttgccctaaaaggcttctgctgcctctcaggagctgagagcccagaagttgtgtttctagaggactgtagcagcctgtggcagggggtcattgtgcaggtgcctctgccctttgggtaaatattgagagattatcagggttcctcttatgtaggggcttactagctaaaggcatcccacttgctcaggcctcctaagggacattttcatttcaccacctttcttccctagacacttgccgatccttgccccttttgcctgggccttttgtttcttcctctgccttcagtgcatcccctggaaggacaatgcctgctgcaccctcacgacaagctgggaagcccatctggatgtatccccactctacaacttcagcctgtttcactgtggactgctgatgcctggctgtcggaagcacttcatccaggctatctgcttctatgagtgctccccaaacctggggccctggatccagccagtgggaagcctggggtgggaggtaggaagcagatctgtgccatgccctgttattatattaacagccagagctttcacccgatcttatgctgatgccgccaggatgctagtaggaacaggaggtgttatttccctatggacaagagcagagccagaggcccctgctggagaatcacatgggggagactgttctgacaacagtgggatgaggggctatcaccacaggaggcttggtggagttgacagacctgagcttcagtctcatgttctgtccctaccagctgtatagcccaggacaaactattaaatctcttagcctcattggtattatttgtaaaataacacttagaggctttatggaagatgatgtacatatggtacctggtacaaataccactgtagctattagtagtcttcacatctctgctattaatgttctaatctctggctatgactgcacccaggtggccccgagtgggcagggagagcgagttgtgaatgtgccgctgtgccaggaggactgtgaggagtggtgggaagactgtcgcatgtcttacacatgcaaatccaactggcgtggtggctgggactggagtcagggtgagtggtgctgacaaggccttggtcgggaagaggccccttggtggtccccacaagggtgcaggtgcaaaggctagcaatgagggagtaggaggtaagctgtccctcctccatcccctgcagggaagaaccgctgccccaaaggggcccagtgcctccctttctcccattacttccccaccccagctgacctgtgtgagaagacttggagcaattccttcaaagccagccctgagcgacggaacagtgggcggtgtctccagaagtggtttgagcctgctcagggcaaccccaatgtggccgtggcccgcctcttcgccagctctgccccatcctgggaactgtcctacaccatcatggtctgctccctgttcctgccgttcctttcctgagagcccttcttctcccactcacattcctgcatgtccaccaactgtgggtcaggccaggccatggcctacctccttcctcaggccctcccctaaaagcagtggcatgggctagggactgcagtcccacccagtctagcccatgccactgcttttaggggagggcctgaggaaggaagtgcccctgaggcttcagcggctggtgcctgcaacctgcacatttggtccgagaccccctccactgctctgctctatcttagctggcctaggaggcagctgggggctggaagtgccaaggtgactggccacctcctgccttgagggatgggagctttcaaggggctcaaggactttcccatccagtgcacgcctacccctttctgtgacagagctgatggtggcagacctggcctcccatcctccgacggtgtcttcaataaatcggcactcaacctctcctctgcttgacttcctgtgtcttagctttatgtgcagggacccaacatgcacacagagggagccagtttgcccactgcactgaagtctcaaagttaggttgttacttgcctaacaattattaacttcttaatatctgccacacatcctcacaatacctctctgatgggagtactttcaatgcccctttttttttcaataagtgacaccacacaaaggacccaaagccagggcgagagggatggggccacccagcacatcagctctattttggctgccaaaattgaagcagctacctcgactgccttcagggttccctcttccttttaacccattcattttacccccagaatcacagcacactggtctaacattttggaaacccgagttctaatctgacctttttgctttctatatgacttttggcaactcctgtgatcttcattaagactgccttaatttctctctctgctgaaaggaatgagttagttggatttaacttatgaaaaagaagtaagaaaaaggaaaaagctagcaaccttgtttgccaggagatagtgtgtgcttctcagatagcatactatctgagaagacctcaagaatgaagtattagaactgaactggggatggggccctgacctcgcaccccagctgtaagtagacaagcagctgacctgcccacccagcactttccggagcctggagccgggcagcttcccagcagtagatgatgctttccccacaaccttttctttgacaaagagaaagttctagcatggctgcacttgatttgactggcttttctaacaactgtccattcttgccagactccagccagccctgctcattgcttaaactcggcctccattccttctgcactcgcctcacaggcccatccacagagcagatcttgtctcaggggaggcactggagtcacaaaacctacaaagagcgtccttccaagtgctgccctcggtgtctagagtagtagacagatgacagctgcagtggggacaaagctgttcataggaagtctgaaagaaaggggctgggtgggggtctctgagaaggcctcacaaaggggtgaggctggaaccccaaaaaaggagagcagctgagaacagaagggaagtgctagtcaaaacccagtggaggccccaaagtatgagccagacaaagcaggaccttcaattgctcttaaattaataaattgtggcttaaaaagtacatataaatgtatcaaaaatctcttaaagagcttaagaaatttaaaatctcttgaaaactgaggtgtctgtgggtgtgtggttgataataaagctgagaggttaatgccctttttaaagtgtttttaaatataacgaattgccaaaagaaggttaaaactggaatggacaaaacaagagtaatctggaagccctaataatttgatacttattgatcacttaccatgcacccaggatctctgggaagtacataatatatgttagctcatttgatcctcacaaaagccttattatccttgttgtattataatatcattttttactattctcatttttcagattgggacataaatataagtagaaaccagctaagtctgaacccacggttccagctcacaggcttacactgaacagcctgatctgtagttgagttgaactgatgtggatttgggagtggtgggagagagggagggatagctggtggcaagtcacagtcaggaaagagactgagttctaccccttcatgtgattaggagtcataacccacaggtcacactgacagtttaaaagtaaaaaggcttccaagttaactcacctggggtaggtcttgtgattcatggtgacatcctttccttgagaaagaatcttattatgagttcccaaattgttgacatactgattaatgtgtagcctaccgacattgaaaagggtgattttttttttttttttttttttgagacagagtccagaagactcccaactttgttagtgtgtcttcctgggtcattattcacatttggcttccaataaacctttacaaattatttctgcttccaataaacctttacaaattgttacaaatagccttaattttgatcaacaggaggagtgatgggttttaagcaaaggagtagaactgtcagatttgcagttagattgtgtgttttaatcagagtgatccatgcacatggctcacaaacatcggccaagggatttctaatgcaaagcaagagagcagctgccagctcactcatccatcaggttcctaccctgggagcaccccttctaaccatttttgggtttagctataaaaaagtgacaaaatgtgacttaccttttctgccacacattcagactatctttttgctctctgttctgtttgagtttctcaacttaatcctccaatctttttaattctggcagttcacttttaatttccaagagactttttttttttccacagcctgctgttttttgtttcatggatgtaatatcttctcaaatgtcactgaagatctaattagaatgtttttaagcttgttttgagtctctgaatgacctgtttcctccaaggtcaatctgttctgttttctttatcgtctcctacgtgctgctcgttctctctgagtctggtggctttggctgtctatctttggctgtcatatttaagaatgaggagccgagttgattttatagcaagctagtataggtttcctccatggttttatataaggatcttcatttcagtgctgctatttgtaacaatttgtaaaggtttactggtatgtgagaagagcttgttgagagaaagaccttgcttcagagtgtgaaaattaatgaagagcactcaaataagaacaagcaaaggctatttgttcagagcttacaagggagtcagccaccatcacttgcattttgccagagactcaaggcagggaggagagtgggaaagttttagagtggataaaagggaagccttcggctgggcatggtggctcacgcctgtaatcccagcactttgggaggctgaggtgagcagatcacaaggtcaggagattgagtccatcctggccaacatagtgaaaccctgtctctactaaaaatacaaaaaaattagctgggcatggtggcgggtgcctattatcccagctacttgggaggctgaggcaggagaatcgcttgaactcgggaggcagaggttgcagtgagctgagattgcaccaatgcactcgagcttgggcgacagtgcgagactccatctcaaaaaaaaaaaaaaaaatgggaaggctttaggtctgctaggctcagaggctgtgggcaggggcaagctgtaggcaggctaactagaaatgggcatcctatgtgtttggttcagggaacatacttagctttttctgattggtcctaagttggaaatggagccaaaaatgagaaagctggctattaataaattcttggccatgttgggtcaattgtgatagggattattctttggcttcctggactgtatcttcctgaaggtaagatcccttaccaagtgcagttagtaggttggcttcttgggctacttgtgggtcagaatcctgttttatatacagctagccattgttcatttgtagattcagtctttcaatcccagggataaaaattagggaacctaacagttattaatcaactcctggctgtttggggctactgcagggctgattgtttggctttctgggctaattgctagagagacagtactgatgtcctacgagtctgacttgcaagatagtaggatggcttctgggctggttactatagataatgggttagagttctattgttatatgtggtctgaccattgtccatctcgagaccaagttagcaggagctatatagctatattggggtatggagcctttgcatgccagaatagggatggttctctctgggatgctaacaaccatatgtgaaatttcagcactatccaattagctgggtgtggtgccatgcacctttagtcccagctacttgaggggctgaggcaggaggactgcttgaacctgggaggttggggctacagtgagccaagattgcaccactgcactccagcctggtgacagagtgagaccctatcttaaaaaacaaaaacaaaacccaacttcagcactatccagaatttaattttttagagaaggttcttctaccccaggggctaaagttgggttgcctgagcactagatttgggcagaggacacgtgggccaggggcatgtagagactttcttgctctgcccccaacacctgccaactctgagcccagatcctctcagagtttctgcgtgatgaatcagctccttcgtccactacagctgccacctccaatttctctggcctccttgtttcctttgatgtgccctcatgtgctttctgtcttctaaatatttgttgaaatctcttgttcactgatggtttccttcacatgctcttgaaaaaggaacatggaaataatctttttagtggaatcccaggtattcattccactctctgtaaccagaagctgtagatttattaaagactcaacggttgtttaaacagtagattagaagaaagccaaatggaagacaaggaggataaggacaatatgtagaatgaatgtgcaggaaagaaagaaaatcagaaggcaggtgctagaaacctaattgtgagcaactttctaggaggcatgaagccaagccacagtagaggcagtggacacaagaggggcagattcaggaactattagaagatagaatcaatagaagcttagagcatatttttgcataaagtgccacaaaataggtataagacattagggacagagaactatcacaaagaaaccaacagccttggataactgcactctgatgcttccatttataagaggaactttccccactttggattgtactaggtcttggtagcagggagctactggagggtgttccttctcctggaggcaacccagtcacttttgatgatgtgggaacatcaaaccctattcaagtccttcctcagggacaatgggaagtcctggggggcaaatgaaaaacaaaacaaaatggccctcttttatgctgcccttgctttaagattctttctgagtaactttcctcagtgaggtcccttaccaagcgcaggagttgctgcagcctgacagtcatgcacagagatcttgttcctagaccacctctgctgcctgatggaggagcactgagcacccctgccattcctctcccaccccacccctactgaactcctccacaaaaaggactgcttccttagttgcttcccaatgtcctgttgctttgtctgttggaagacccagaaatgaagattattttggtgttccaggctggtgttggaagctaagctacaagtgggagctaagctacaaggatacaaaggcatacaaatgatacaatggactttggagactagggggtaaggagaaaaggtcagatcactttccccagctccagcccttgagatagcttgagtgtccactcccttcttgcatccccaggggacacttttcctgccaacaacaccagtcgccctttttttgtattccctcctactcggttttccttacatccatcctcagatttactctcccacagaatcagaaaccatgttcaatagtgcttttgccacaaaaaactaaatagaaacatctggagggccgggcgcggtggctcatgcctgtaatcctagcactttgggaggccaaggcaggcggatcacctgaggtcgggagttcaagaccagcctgaccaacatggagaaatctcgtctctactaaaaatacaaaattagctgggcatggtggcacatgcctgtaatcccagctactagtgaggctgaggcaggagaatcgcttgaacctgggaggcagaggttgtggtgagccgagatcgcaccattgcactccagcctgggcaacaagagtgaaactccatctcaaaaaaaaaaaaaaaagaaagaaacatctggaggaggaaagaggatttcccagtgaggaggagctgatgatgggctctgagatgctggcaggatgtcagcgaggagttgtccatcagccaattgacccacagtgcaggaaagagatgtgggctgcagataagaatcctggactcactttcctagaagtgtggaagtagatgagttctctaaggaaaataaagagagaaaaaggaaaagcttgtggagagtctctctgactcacctacagtcaaggaagtgacagggaatggagctagtaaagacacagggatgcagaagctgggtagaaagaggatggaagggagctgcacctctgaggggcaatgtcaaattcgaagttgcccgcttcatattaattaactcataattactgcgttcttactctatgctggaaaatgctggtcctgggaattgaaagattgaatatacaaatgagcaatgaccaggcaatgtataaagcaggactctgacccacaacctgtaacagccagcccaggaagccaacttactatccacagtatccattccaggaagccaaaggatagcccctataacgattgacccaaaatgatcaggaattgattaataacttccagctttcctatttcagctcctgcttttaacttagggccaactggggaaagctaaatatgccccctcaccaatcacatggaatgccctgcttctagttagctgctgatatagtctggacatttgtctccagccaagcaagtctcatgttgaactgtaatccccaatgctggaggtggagcctggtgggaggtgtttagagcatggaggcagatccctcatgacttggtgctgtcttcgtgataatggattctcatgagatttggtcatttgaaagtgtgtggcacctctgcccctccacccacaattcccttccttctatttttgccacataatgtgcttgttccccctttgttttctgccttgactggaagtttcctgaagcctccccagaagtagatgctgcaatgcttcctgtacagcctgcagaactgtgacccagttaaacctattatatatatattttatatataagccagtctcaggtatttctttatagcaatgcaagaacggactaatacaactgcctacagcttgcccctgctcacagcctttgatctgagcagatctgaagcctcctcttttatttactctaaaactttcccactcccctgcttgccttgagtctctggcaaaatgtaagtgatggtggctgactctcttgcaagctctgcttgttctcatatgggtggtctccatttatttccacaagatagaatagcaaagaagacaaacatcattcctgcccacaaggagcttatactatgataagaaatacattaaaaaatataagcagatggttaaaattaaaggaactacaaataagatgattcttaggaaagaagcatacaaggacccagagagagttgaagaagtggataatttagataaggtggatatattaaaggaataggaaaccatcagtgaacaagagatttcaacaaatatttagaagacaggaagcacatgagggcacatcaaaggaaacaaggaggccagagaaattggaggtggcagctgtagtggacgaaggagctgattcatcacgcagaaactctgagaggatctggtttccttcacatgctcttgataaaggaacatggaaataagcccaggttggtccccttccccctcccttactctaggactccaaaatagccacagcaaggcattaaataatagttgttgctatggttttattattaagtaagaggtatgacaccacccagttcttaacccatttcctagcccaaggacgttcagaggtaagataaaaacatttgtcttacacatgacttaataactacacaaaaaaaaccttaaaaattgatggtgtgtgaaaataatgagtacaatagtaattttggtgaatattttcatagttttgatgaggtgagttttctaaaggcagtagctataaagtaaaagattaatatatttactaatatttttaaaacacaagaaagaaaaaggaaaggttttttttaaaacactctaaataaaattcaaagacagataaaaataggaagaaatatttgcaacatatacatacagatgttaatatttttagtacaataaaagtttttaaaatataagcaaaggatttgtataggtaattcacatttagaataaactttaaactcctgactagaactctgaccttagctcctaagacttttgctcctacttaccactctccagtgacctgggatttcttctcattctcaaacaaactaggctcatttatacctcagaacatttgtacttgcttgttttctattcctttgatgcttttgcccatctcattgcatacctagctctttctcataatttgggttttagttcaaatatcacatcttcagagaagccttctgcaattactcaagtcaccattccaagtcatactccatgtcaccttgtcttattttttatagcttatatcaccatcgaaaattgtgtgtatgtgtatctgcactgtctccctcacctcactcttagaaagcaggctccatgaggggagaacctcacctgtcttatttactgctgtatccccagtatatggaacatttcctggcacatagtagcggctcaacaaatatttgttaaatgattaaatgaatgaataaagaaaaatgagaaaatataatcaataaacattaacaaaaattttgtttcatgagtagttaaataaatgcaaattaaaataatgagaacctttttaaaactaattagattggcaatgattaaaaaatagtataaggatcaacaaaattgatagaccactagcaaaactaataaaaaaagagagaagaatgaaatagacgcaataaaaaatgacaaaggggatatcaccaccaatcccacggaaatacaaactaccgtcagataatactacaaacacctctacgcaaataaactaggaaatctagaagaaatggataaattccttgacacatacactctcccaagactaaaccaggaagaagttgaatctctgaatagaccaataacaggatctgaaattgtggcaataatcaatagcttaccaaccagagtccaggaccagatggattcacagccgaattctaccagaggtacaaggaggaactggtaccattctttctgaaattattccaatcaatagaaaaagagggaatcctccctaactcattttatgaggccagcatcatcctgataccaaagccgggcagagacacaaccaaaaaggagaattttagaccaatatccttgatgaacattgatgcaaaaatcctcaataaaatactggcaaactgaatccagcagcacatcaaaaagcttatccaccatgatcaagtgggcttcatccctgggatgcaaggctggttcaacatacacaaatcaataaatgtaatccagcatataaacagaacc

SEQ ID NO: 1083 - DNA, 723 bp, Homo sapiens
atggcatgctggtggccgctcctgctagagctgtggacagtcatgcccacctgggctggggacgagctgctcaacatctgcatgaatgccaaacaccacaagagagtgcccagcccagaagacaagctctatgaggagtgcatcccctggaaggacaatgcctgctgcaccctcacgacaagctgggaagcccatctggatgtatccccactctacaacttcagcctgtttcactgtggactgctgatgcctggctgtcggaagcacttcatccaggctatctgcttctatgagtgctccccaaacctggggccctggatccagccagtggccccgagtgggcagggagagcgagttgtgaatgtgccgctgtgccaggaggactgtgaggagtggtgggaagactgtcgcatgtcttacacatgcaaatccaactggcgtggtggctgggactggagtcaggggaagaaccgctgccccaaaggggcccagtgcctccctttctcccattacttccccaccccagctgacctgtgtgagaagacttggagcaattccttcaaagccagccctgagcgacggaacagtgggcggtgtctccagaagtggtttgagcctgctcagggcaaccccaatgtggccgtggcccgcctcttcgccagctctgccccatcctgggaactgtcctacaccatcatggtctgctccctgttcctgccgttc

SEQ ID NO: 1084 - protein, 239 aa, Homo sapiens
MACWWPLLLELWTVMPTWAGDELLNICMNAKHHKRVPSPEDKLYEECIPWKDNACCTLTTSWEAHLDVSPLYNFSLFHCGLLMPGCRKHFIQAICFYECSPNLGPWIQPVAPSGQGERVVNVPLCQEDCEEWWEDCRMSYTCKSNWRGGWDWSQGKNRCPKGAQCLPFSHYFPTPADLCEKTWSNSFKDERRNSGRCLQKWFEPAQGNPNVAVARLFASSAPSWELSYTIMVCSLFLPF

SEQ ID NO: 1085 - DNA, 21457 bp, Mus musculus
  misc_feature (1)...(21457): n = A,T,C or G
ttcagtgtcggagttctaggcatatgctgccacacccaactttttaagtgggtgctgtcaatcaaactcgggccctcccttttctcccactttcatctcccagacccttctcttcttttccctgagaaaaagctcatgtgtgcttagacctgcttcctgtccaacgaaagctgggttccactttcaccctgaacgtttcccagtcctttggcatccagctttctgcagctttgtctaatataatattcttttaaaaccttatgggctttctgtgactgcatcttgaacccatgtgtgcactaaatgccacacccatgattaatttcagaaagattctacgtaggctgctgaatctttaatattctcggaagcccctctgttgagctcaaagagtctgcaaaacaccatgaaatacttcctggggttttcccaaaggccctgcagccacgctcttggtttaatctttcctttaggccattttcttactttgagaatccagtccctcacaggctgagcatgagggacagttttattttccaaagcacaaactgggcaggacctacttagctagtcccaccccaccccccaccccacactgccacaccctttcaatagtcacacagctagaagcatccaaatgtcactttcagcactctttctagattcctttagaactcacaacttcattaaagcactgcctgaccacgtggtggtaatacacacctttaagcactcgggatcccctgcagaggcaaatggatctctgagttggagaccagcctggtctatagagtaagacaggacagccaggaccatacagagagaccctgtctaaaaaaaagcggggaggggggagaaggaagaggagggagcaaaggaggaagaggaagaagaggaggaggggtatagtagtttgaataaaaatggcctccacaggcccatagggagtggcactattatgaggtgccctgttagaggaagtgtgtctctggggatgggcttttggggtttcagaagctcaagtcaggcctggtggctctctcttcctgctgcctgtagatccagatgcagaactctcagctccttctccagcaccacgggctgcttcctgctgccatgctcccgccacgatgataatggaccaaaccttaaaacctcaagccagtcccaattaaatgttttcctttataagagttgccgtggtcatggtgtctcttcacagcaatattgttgcggtcatgaaagaccttaaccaaaagcaatctggggaggaaagggtgtggtgtgctttgttttctcatagttccatgtatctgttcatcttcaaaagcagtgagggcaggaactcaagcagagtaggaacctgcaggcaggagctgatgcagaagccatggaggggtgctgcttaaaggcttgcgccccatggcttgcccagtgtgctttcttatggaacctgggaccaccagcttaggggtgacaccacccataatggactgggcccttccacatcaatcactaattaagaaaatgtccttcaggcctaactacagcctgcttttatagaagcatttcctcaattgagtttccatcttctctgatgactctaacttgtggcaaactgacttaaaactacccagggcagccagcctgagctgcacagttcagaaaaaagaaaagagggtttcttgaggtgggtctttggctcaaggtgcttgccacaaaacttgatgacccgagtttaacccctgggtgccacatggtaggaaagaaccaacttctgcaaattgtcctctgatcaccacacatgggccatggcatgcaaaaggacatacacgaacatacacaataaagtgtaaagaaaaaaattatcttagcctgtgttctattgctgtgaagagacatcatgaccaaatcaactcttacaacagaaaacatttcgttggggctggtttgccatttcagaggtttagtccattatcatcatgacagggagcaaggcagcacactgccagatatgatgctggagaaggagctgagagttctgcatctggatctacaggcagcaggaagagagagacatcaggcctgacttgggcttttgaaacctcaaagcccacccccagtgacacactccttccaacaaggccacacctcctagtccttctcaagtagtgccactccaatgaccaagcattcaaatatatgagtcgatgggaccattcctatccacaccaccatatacttaaattcaagggggtttttggttggttggttggttagttttggtttagcaaaaaagaaaaactagaagaaaagagatgtgtttatctcactgatttggaatatgaagcccaaggttgtagacccatctgtcagtatctggtaggacccttccttccagctgcttctggggagtttgtagaagactcacaaggaagaaagatcacacggagtggaagcaaaaatgagatgagactaatccagtccttcattaacccactcatgaagatgcaacccttgtggccaaattaccttccaccttttaagagtaccaccatattcatacaggtgtactggggaccgagcttctagagtggatgtctgggagagtcacacacatctaaaccacagcaggtctcctgtcccctaggtcaccacacccaatgtttttccaactgtgtaaccactacatagcacaagcactcttgttccagacaccctgtaatttccttagtaagaaagcttgggaccaatcaggtagctacagaacaggcaggctttttccttatgggccccaggagagaatgttccagcaaatcagagacaaaatgcatggctctctaatagtcatatgcaggaatctcttggcatcacctctgcatgacctgttgactgaagtaatcagaagcccctagatagcccagaagggaacacacagggctgtggtggcacacactgtatgctcagcacttgggaggtacaaacaggacagtcagaattcaaagtcatcctcagctctatagcaagttagagacagagagattctctctctctctctctctctctctctctctctctctctcactcacacacacacacacacacacacacacacacacacacacacacacacacaccagggtctccctatgtctagtcttcacttctttttggttggttggttggctgggtttttttttttattttatttatttatttatttatttatttatttatttatttatttatttatttaatgtattatgagtgttctatctgcatgtacacctgcataccagaagaggcatcaggtcccattacagatggttgtgagccaccatgtggttgctgggacttgaactcaggacctctggtagagcaagcagtcaatgctctaaaccactgaaccttcatccctccagcaccccagacttcatttcttagtgaagaaatatacaataatttgcatctatgttttagaatcaacatgggctgacctggggtataccgtttgttgtttgttttgagaaattcattcattcattcattcattcattgttggtttggggggataaggtctcatatatgccaggctggtctcaagctctctatgtagccaaacattgccttgaactcctgaccctcctgcctctaattcctgggttctgggatttcagacatgtagcaccatacctggtttagcccctaggattcatgcatactgggtaaacattctacccactgggctacatccccagcctcccttctattgtacattgaatcacaattacacatacttttatggtcatataatacccaaaatgtcacctgggagctgtctgagctaggcaatcccaaatggtgactcacagtcagttctgagctaaacaatcccaaatggtgactcacagtcagttctccacatatgtagctcagacttcttcacactgacactaatttccaagaaagcaactgccaacacaaaaacagtgcttaggcatgtgtttgcatcacaccaagtttgtcacctggccacacctagaactggtatagatgctgaaggcttaattctttgggggctacaaatgtggcaacctaccacccatgagcaactctggttcatctttaaagacacagtacacacctgctgcgaccacttcaggaagaagaaaaggaatggatgattctgccaacactctaatagcatttatgaaatgtggtggtttgaatgaaaatggccccccgacagacgcattaggaattacattattggaggcatggccttgttggaggacgttggaggtgtgatctttgaggtttcagaagctcaagccaggcccagtagcttgctgcctgtagatccagatgtagactgtcagctaactctccagcaccatgtctgtgtgccaccatgcttcctgccatgataaaggcctagacctctgaactatatgccaggtgccaggcccaattaaatgttttcctttctaagagttgttgtggtcatggtgtctcagaacaacaataaaaccctaactaagacaaaaatcctacatggttatatttatatgactatacagggtgactgccctctgggttgttctaaagaaaagtatttttgctgttgttttaatcttgagttttcctacccatgtgtcccaagctagagctactggagacaaaggagagggacccacctgggaccaacaagaggccatcttaccttgattcaattctttccagctttcagcttccgacttgtccattcggaaatgggagacttttagtctcctctgtctccatccatcatccctttccgaatccttggttgtcttctttgagcctttgattctaaccgactggagaggttgctcaagcagatacaaagttgcaagctctcaacaggccaggctcccctccccttcctgaaggcagaatgcctggggacccagaaagtaggccagggcctggaaaccttggcaaaatagcacagctaggcctggtatgggcatgcagagcagcatccagggcctcaggctgcctgagccctgacatatctaacagccctctgagtagtccgggcctgccccaaaataaaagaaccaaccagctcccaggctgtgggaggagaaagtgtcaaactaaagcaatagtaaagatccctgaagctgattcaaaagccactaagcaggaaggaacacacagcagttcggggacagaagactacagcatacatggagtgagaaagacaagaggctgagtgaatgagaaagaatggggttctgggtgagcagctgaggccagggcacctggggactttagaaattcccctatgcatttctaagaacccgcccagtaaagctgtaaaggggattcatctgtgaagggggtggtctttagggcccctgttccttagaacccaagccccggggaactttgcataaagtggcttaccagaaagatagcccccactcctgttagaatgtcccattgtctccagcactggggaagcacatagctctccaagggaggggactgaaattgcatctgcaggcccagggatggcttccaacagtgccatttactgtattgaaagcttcagtgaccgtgccagggccaacttctatgaagaaacaggagactgggcaggcagatggctgagaggcagagccaggccacaagactctccacccagaattcagagaccgggaaccaaactagcctttaaaaaacataagtacaggagccagcaagatggctcagtgggtaaaggtgcctaccagcaagcctgacagcctgagttcagtccccacgaactacgtggtaggagaggaccaaccaactctggaaatctgttctgcaaacacatgctcacacacacacacacaaatagtataaacaattttaaatttcatttaaaaataatttgtaaacaaaatcattagcacaggttttagaaagagcctcttggtgacatcaagttgatgctgtagatggggtatcattcctgaggacccaaaaccgggtctcagcctttccccattctgagagttctctcttttctcagccactagctgaagagtagagtggctcagcactgggctcttgagttcccaagtcctacaactggtcagcctgactactaaccagccatgaagaaacaaggagtggatgggctgagtctgctgggatgggagtggagttagtaagtggccatggatgtaatgaccccagcaatgctggctagaaggcatgcctcctttccttgtctggagacggaacgggatcatcttgtactcacagaagggagaacattctagctggttgggccaaaatgtgcaagttcacctggaggtggtggtgcatgcttttaactccagtactcaggaggcagggccaggtggatctctgtgagttcaagaccagcctgcactatggagagagttttgggacagccagagttacacagaaaaatcctggtggaaaatctgaaagaaagagagaaagaaagaaagaaagaaagaaagaaagaaagaaagaaagaaagaaagaaagaaagaaagaaaggaagaaagaaagaaagagtggcaggcaggcaggcaggaggaaggaaggaaggaaggaaggaaggaaggaaggaaggaaggaaggaaggaaggaaggaaaataggtgcgacttcaagatccggagttacaagcagaatgcactgtttccctaacagggccaagtgttttgagtaactgaaggtgggcatgatgcctgggaagcagaaacaagccaggcagatgcaccccttgccttgcttccgaagggctgcagtagcatggaaaacatggaaaacaaccaatccattccctttgctgatataacaggctccaaagccaaaacctgtcactggaggctcaagaaccagatctccagccaagaggcaaaggannnnnnnnnnnnnnnnnnnnnnnnnnnnnnnnnnnnnnnnnnnnnnnnnnnnnnnnnnnnnnnnnnnnnnnnnnnnnnnnnnnnnnnnnnnnnnnnnnnnnnnnnnnnnnnnnnnnnnnnnnnnnnnnnnnnnnnnnnnnnnnnnnnnnnnnnnnnnnnnnnnnnnnnnnnnnnnnnnnnnnnnnnnnnnnnnnnnnnnnnnnnnnnnnnnnnnnnnnnnnnnnnnnnnnnnnnnnnnnnnnnnnnnnnnnnnnnnnnnnnnnnnnnnnnnnnnnnnnnnnnnnnnnnnnnnnnnnnnnnnnnnnnnnnnnnnnnnnnnnnnnnnnnnnnnnnnnnnnnnnnnnnnnnnnnnnnnnnnnnnnnnnnnnnnnnnnnnnnnnnnnnnnnncctcgccgaccaccccaccccctccatccttttccctcagcctccgattggctgaatctagagtccctccctgctcccccctctctccccacccctggtgaaaactgcgggcttcagcgctgggtgcagcaactggaggcgttggcgcaccaggaggaggctgcagctaggggagtccaggtgagagcaggccgacgggagggacccgcacatgcaaggaccgccgcagggcgaggatgcaagccttccccagctacagttttgggaaaggataccagggcgctcctatatgggggcgcgggaactggggaaagaaggtgctcccaggtcgaggtgggagaggaaggcagtgcggggtcacgggctttctccctgctaacggacgctttcgaagagtgggtgccggaggagaaccatgaggaaggacatcaaggacagcctttggtccccaagctcaaatcgctttagtggtgcgaatagagggaggaggtgggtggcaaactggagggagtccccagcgggtgacctcgtggctggctgggtgcggggcaccgcaggtaagaaaaccgcaatgttgcgggaggggactgggtggcaggcgcgggggaggggaaagctagaaaggatgcgagggagcggaggggggagggagcgggagaatctcaactggtagaggaagattaaaatgaggaaatagcatcagggtggggttagccaagccgggcctcagggaaagggcgcaaagtttgtctgggtgtgggcttaggtgggctgggtatgagattcggggcgccgaaaacactgctgcgcctctgccaaatcacgctacccctgtatctagttctgccaggcttctccagccccagccccaattcttttctctagtgttcccccttccctcccctgaatctcaagcccacactccctcctccataacccactgttatcaaatctaagtcatttgccacccaacaaccatcaggaggcggaagcagacgggaggagtttgagatcaacttgggctacatcacgagttccaggctcaccaaggcttcttaaggagaccttgtctctaaaattaattaattaattaattaatagtcccctttctctgccacagaaccttgggatctggctcctggtcgcagctccccccaccccaggctgacattcactgccatagcccatccggaaatcctagtctatttccccatggatcttgaactgcagagagaatggcagagtggcccgccctgtgcaaaggatgttcctagcctaggtggagctcgcgaactcgcagactgtgcctctcttgggcaaggacaggctagacagcctgccggtgtgttgagctagggcactgtggggaaggcagagaacctgtgcagggcagcaatgaacacaggaccagaaaactgcagccctaggaacactcaagagctggccatttgcaagcatctctggcctccgtgcttctcactcatgtcccatgtcttatacaggcctctgtggcacctcgcttgcctgatctcatccctagccgttaagctttctgcatgacttatcacttggggcataatgctggatacctaccattttcttagaccccatcaaaatcctatttgagtgtacggttcggagaacctcatttatccggtaaatgtcttttactctgctctcagggagctgaggcaggacatcctgagatacattgggagaggagatacagtttcaataaaataataggttgggtggaggtacatgcctataatgccaccactcaggaaatggtggcagcttcgtgagtttgaggccaacccaagaaacatagtgaaaccctgtcagtaaataagtaagcaagtatttgagtatctactatatgctagggctgacctggacattaggggtcatcttctgaacaaactagtgcttgagggaggtatttggggtttttgtttgtttaatggatctgaatgagttccagagactggctacacagcgatatgactgagcttaacacccctaaagcatacagtcagaccaattagacaataaaaggtatgtatagcttaccaaataaaaaaattgtattttcaagagagtgtctgtctgtgtagccctggctgttcttgaactcactctgtagaccaggctggcctggaaatccatctgcctgcctctgcctctctgcctctctgcctctctgcctctctctctgcctctctctgcctctctctgcccctctctgcccctctctgcccctctctgccgccctctgccttttgccctctgccctctgttctctggcctctgccctctgccctctggcctctggcctctgcctctgcctcttgagtgctggaatcaaaggtgtgagctctgtaggtcttaagttccagaagaaagtaatgaagtcacccagcagggaggtgctcagggacagcacagacacacacccaggacataggctcccacttccttggctttctctgagtggcaaaggaccttaggcagtgtcactccctaagagaaggggataaagagaggggctgaggtattcatcatgtgctccgtggatctcaagccctcaaggtaaatggggacccacctgtcctaccagctggctgacctgtagctttccccaccacagaatccaagtcggaactcttggcaccatgaacccagccatcagcgtcgctctcctgctctcaggtactgggcaagggtcagggctggcattctaaggaatctggcttcctcccatcccgggaagtagcctctttgccatagtctcaggggcacaggtggttgggaggtgcgggggtggggagtggggaggagcctcaacctcaccagtggtggtctttgacatattagaaactccataatggatctaggaactcctcttgctgggtggtggtggttgtggtacacacctttaatctcagcactcaggaggcagagtcaggtggatctgttagtctgaagccagcctggtctacagagcaaattccaggacagccagagctattctcaagatagagaatccctttcttgaaaaaaccatttaaaaacaaaaacaaaagcaacacactcctcttgatctcctgttcttgaaacacattgttgggacccagaacttcagtagattgatggaagttggagtctgcaagtggtggaacatcccaccaatacctcaagggcgagtgcaaaccccacatccccccagctcaagtctacttttcctgcaggtgggaggccccgggtctgtgtctccccaaattcagagaaggcactgctgtgccagtcttgcaggtgtcccgagggcagaaggtgaccagcctgacagcctgcctggtgaaccaaaaccttcgcctggactgccgccatgagaataacaccaaggataactccatccagcatgagttcagcctgacccgagagaagaggaagcacgtgctctcaggcacccttgggatacccgagcacacgtaccgctcccgcgtcaccctctccaaccagccctatatcaaggtccttaccctagccaacttcaccaccaaggatgagggcgactacttttgtgagcttcaagtctcgggcgcgaatcccatgagctccaataaaagtatcagtgtgtatagaggtgagactggttcccagaaagataaaatgtccaggttagccaggctggggtagccaataaaaaaaaaaaaaaaacaggcacctccattacccttcccctaactgctggtctcctgggaaactgctgctgtctatgtgagtggggcaagattaggggccagaaagggggagcttgtagtaaaagcacagttgaggaaactaaatgggaaaggcagtacagtggtgattcttgtggtgtggaggttctgttacagcatccggtggagccgctaagatgagaaagcgccagctagctgccttgaacagctgacacctgtctttgcccgcctgagtcctgatctcccctcctcccggcaccccttctctatccacagacaagctggtcaagtgtggcggcataagcctgctggttcagaacacatcctggatgctgctgctgctgctttccctctccctcctccaagccctggacttcatttctctgtgactggttgggcccaaggagaaacaggagccctcgaggtccttcctctgcagaggtcttgcttctcccggtcagctgactccctccccaagtccttcaaatatctcagaacatggggagaaacggggaccttgtccctcctaaggaaccccagtgctgcatgccatcatcccccccaccctcgcccccacccccgccacttctccctccatgcataccactagctgtcattttgtactctgtatttattccagggctgcttctgattatttagtttgttctttccctggagacctgttagaacataagggcgtatggtgggtaggggaggcaggatatcagtccctggggcgagttcctccctgccaaccaagccagatgcctgaaagagatatggatgagggaagttggactgtgcctgtacctggtacagtcatactctgttgaaagaatcatcggggaggggggggggctcaagaggggagagctctgctgagcctttgtggaccatccaatgaggatgagggcttagattctaccaggtcattctcagccaccacacacaagcgctctgccatcactgaagaagccccctagggctcttgggccagggcacactcagtaaagatgcaggttcagtcagggaatgatggggaaaggggtaggaggtgggggagggatcaccccctcctctaaaacacgagcctgctgtctccaaaggcctctgcctgtagtgagggtggcagaagaagacaaggagccagaactctgactccaggatctaagtccgtgcaggaaggggatcctagaaccatctggttggacccagcttaccaagggagagcctttattcttctttcccttgcccctctgtgccagcccctcttgctgtccctgatcccccagacagcgagagtcttgcaacctgcctcttccaagacctcctaatctcaggggcaggcggtggagtgagatccggcgtgcacactttttggaagatagctttcccaaggatcctctcccccactggcagctctgcctgtcccatcaccatgtataataccaccactgctacagcatctcaccgaggaaagaaaactgcacaataaaaccaagcctctggagtgtgtcctggtgtctgtctcttctgtgtcctggcgtctgtctcttctgtgttcttccaaggtcagaaacaaaaaccacacacttcaacctggatggctcggctgagcacttctgtgtgcagaaggtccaaccagactctggggtaccccggccctccctattcccttgcctcctgtctcccgctttttatagctccctatgctgggcttctctggagagtgaaatctttgcccaaatcaatgcgcattctctctgctgagtcatctggcgacagcagttgagttcacccgccaacacatgggcccagctatgtagccgaaccctggctctggaagtgccagggactttgtgcataagtatgtaccatgcccttttttcacagtcctagctctgcagaagtgcagcctgaaggcctgtctgctgagaggacatgccctggagccctgaaacaggcacagtgggaggaggaacggaggatgacaggcatcaggccctcagtccaaaagcaaccacttgagaatgggctggagtacgaaacatggggtcccgtccctggatccctcctcaaagagtaataagtaaaatataaacaggtaccccaggccgttctgggtttgggttgtaatgggatccatttgcagagaactattgagacagcccagccgtactgtgacaggcaatgtgggggaggaggttgaatcacttggtatttagcatgaatagaataattccctgaacatttttcttaaacatccatatctaaattaccaccactcgctcccagtcttcctgcctttgcgccagcctcctgtctggccatgcctgaagaaggctggagaagccacccacctcaggccatgacactgccagccacttggcaggtgcagccaaacctgagctgtcccagaaagggacattctcaagacccaggcaccctgatcagcactgacttggagctacaagtgtcatgccagaaaagtctctaagaaaaccttttcagggaaaagggggtgactcaacaccgggcaagtttgggaagccccacccttcgagtgatggaagagcagataggaagcctcagaagagagacaccggcacccaggtaacgttcctcatgtggtctctgtcacactaggtgctcttccctggacatctccgtgaccacactctcagttcttagggagatgcgggtgctctctgaggctatctcagagttgcagattctgaggcctagagtgactacagtcagcctaggaagccacagaggactgtggaccaggagggcagaagaggagaagggaagaaaaaccatcagataggacttgcaatgaaactaacccaagacaatcataatgcagacaggaatgttaaaggcgttcagcagctggccatgacacccatctgtccctctggccaagtcagcaagcctggaagacctgggactcctgcccatatgtcctaagctccccacccacccactcgttcactgtccttattctctctctaccttcagccacttagtttcctaccttaagtcctagaattcttgctcaagagcatcaaatgcccctgccttggagctggtgggatggctcagtgggtaaatcacttgccaccaagtctgatggcctgagttcaatccctgacatgcacattggtagaaagagagaaccaaacactaaaagctatcctgagctcttcacttggaccatggcatacttgtatgcatgcctgtgaaggcacgcacacacgcacgtgcacacacgcacactcacacacaactgttcttcagaaagtttatttaaaatgtactttactacccctctgtgtactctgcatccaaatggtgttacccactgagacagagtacacaggccatcactgtagctgtctccctgacatccggagctctgttgggaaggccaagaggatttccatgaaatgggggaagaggagggtggatcactggccaacagggaatacacatcacagatgtgacatgcatcttcctgccttcttggcacaaaatacaactcctgcctgagcatatagcttttgtgttgtggagcatgtacatcttcccataaacactcctgatagaacacgaggctgggttccttctgagtactagcatggacatctctggccctctcctgctcagtacacaaggtactcagggtaacaatggtacagctgtcctcaccaaggcccactgttcttggtctccagagactatgtagccccaaatctttcctcattcttggacttaaagtacctcttgcctggcagatggaagatccagggccaatgggaaaccaaggggtagaaacttacccctgcaagcccagtaactggcagctaaagcaaaagaagtgccatggtttgggggccagaatgggcgatatagtgaggctagcctggactgaagagtgggctgctgtcttggggagaggggagttagatattgcagtagtccaaagtgaggatggtgcctcggacagaagctgcagaggagaaaataaagggaagtggggacttcttggaaagctgcttagagttataacagagggctggtgaaaccagaacaaaacctgtgaactttggcagaatctgtccccactttgctactggactggttatacaagctgctaccactgggggaaaccaagtcacaggtatataagacctctaacctcccatctcaagagtacaacggccaccggatcctctggacctgaagttacagatgtttgtgagctgccatctggtgccaggaattgaacccatgtcctcgggaagaacagcaggtactcttaagccctgagccatctctccagcctcccttgtactatctttatcatttgaccctctcagggtcggagtaatcttttcttttccattatattcatcctttaaattgctacaaagatttaatgaaaagacacatgcgggctggtgagatggctcagtgggtaagagcacccgactgctcttccaaaggtccggagttcaaatcccagcaaccacatggtggctcacaaccatccataatgagatctgacgccctcttctggtgtgtctgaagacagctacagtgtacttacatataataaataaataaattttaaaaaaaaagaaaagacacatgcacacacccgcacgcacatacccacaggcacatacacacacgcacacgcacacacacatgcacacaccctagcatagtggctggagtatgtgagaagtgaatttctgtcacttgtttgtaagccatcctgtctatggtatttgttacagcagatagaatggactaagataacattaaatactgtcttaaccaaaagtcacagcaaagctgtatggggaagaggggaatgcgaattagcagcaggtacaaggggcacagctttaaccccagcactcaggagacagaggcaagcagatctctcagagtttgaggccaccttagtctacatagtgagttctagggcagcaaggactatagagtaagaccctgtctcaagaaaaataataaggaataagagataggatgaaggagaaaggggaggaagaggagaaggaggaggaaaaggaggaagaggaagaggaggagaggtatctcagtgagttagagtgcttgctgtgaaggtcttgagttcaaattctcagcactcatgtgaaggccaagtgtagctcccagcattggggagcagagacaggcaaattccagtacctgtatctagccagcctagctgaaatggctagaaccaagtttgattaaaaacaaacaaacaaaacacacacacacacacacacacacacacacaaacttgtctaaaaaaaaaagtggagaggaatagagaaagacactgaacatcctcctctggcttccgtgtgtgtgtgtgtgtgtgtgtgtgtgtgtgtgtgtgtgtgtgtgtgtgtatgtgtgtgtgtgtgtgtgtgtagatagatagatagatagatagatagatagatagatagatagataataaatatttttaggaatattttagggaataaataaatgagttaaatgtaatcttagtgatgaaatcagaagttcaatgtcatccttagctatgtagtgagttcaaggcctgactgggcctgtgagactctgaatcaaataaataaataaataaataaataaataaataaataaatagggaactggatttggctaggcaggaattgagcctacaaacgagcttaaagctgagaccaaaagataactcagtaggaaaaggtgcctgtcacactgcatgccaacctgagtcccatctccagaggcacactcacacacatataacaaacacgtaaacaagcttaaaagcaatagggaacacaacatcaatttttaaagtgtttgtacatactagaaaattttaaatatacaagcatcctggttggttttcatgtcagtttgccacaaattagtcaccttagtggggagactcacctgaaggactgtcctgatccccttaattgatatggggagagtcactgggattgtgggcgacaccttctggtagcagcagagataaaagggagattgcagaaggaagcctccctcctgctgctgagttgactagtcctgaagctgtttcgatgatgatgatgatggtggtggtggtggtggtggtgatgatggtggtggtggtgatggtggtggtggtggtggtaaggaggaggaaaaggaagatgaagaagaaggaggaagaggaggaggaggtggaggaggtgatgtccagcactccccaacttttattgagcaatagctgtttccaggaaacttccatgtctgatatcaaacccaaaccaatgaggcaccctgccttgcagactgagtaactacctattgccactctctggcagggagaaacagttattctagcactactctggctatcaaggctccagccttaaggatcaagtaactaccaggtactcagctctcaggtgtgcccccactgttatccaaaagctgacttactaaattctgatataaagattacacataaaacaagcaaatagaagagctgagtaattaagatggctacttaggggaataagaccctaggatggagaaatggactgctttaaacctaataataacttttgtctctataagaaataatatgcttaaagaattctattacaggctggtaggatggctcagtgggtaagagcacccgactgctcttccaaaggtccagagttcaaatcccagcaaccacatggtggctcacaaccatccgtaacaagatctggtgccctcttctggagtgtctgaagacagctacagtgtacttacatataataaataaataaataaataaataaataaataaataaataaataaatcttaaaaaaaaaaaaattctattactagtgggggaggggaaaagaaaaaaaaaagaattctattactgccctgccagttctatttgaggatttgcctactaatggccatttttatcttagggaggggttgagaggaagtgagaaggaatctcaatnnnnnnnnnnnnnnnnnnnnctggtaggatggctcagtgggtaagagcacccgactgctcttccaaaggtccagagttcaaatcccagcaaccacatggtggctcacaaccatccgtaacaagatctggtgccctcttctggagtgtctgaagacagctacagtgtacttacatataataaataaataaataaataaataaataaatacttaatttggggaggggaaaagaaaaaaaaaagaattctattactgccctgccagttctatttgaggatttgcctactaatggccatttttatcttagggaggggttgagaggaagtgagaaggaatctcaatcttcaacaataacatcatatttgttaagatagaaaaagccaaggaagtgttgaggttgagagccagatatgagctgtttgttacgtcattggacagtcatgtgcaagtatggagaggagagctggatgtgggtgtggttctgcagacaagagtgcttgcctagcatgcataaagccctgggtttcatccccagcattatatacattgatcaggcatggtgacacatgcctataatcccaacactagggagatggaggcagatgaatcagtttaaagtcatcaactacacagcaagtaggaggcctatttgggatacatgaaaccctgccttttaaaaaaggatcaactaggttaactgctaataagattaaaataagaatcaagagtgttggctcgtgcctgtaacccaacacttcaggctaggacaggaagactgctgtgagatcaaggtcagcctgagctgagtgaatcggagagaagaaaagagagaggacaaagacaaacacagagtctataaatatgacttgtagctgggcttggtggcacttttaagagaccaaagcaggattccaagttcaaagaatgcctgggctacatagtaagatcttttcatggaaggaaggaaggaaggacaaaaggggaaggacaaaaaaggaaggaagaaggaaagacaaagaacggaaggaagaaaggacataaaaaggaaggagggaggaagggaggaaggagggagggcgggaggaaggacaaagaaaggaaggaaggaaggaaggaaaggaaagagaaaggaaggaaggacaaagagaggaacgaaggaaggaaggaaggaaggaaggaaggaaggaaggaaggaaggaaaaaaggagaaggaagaactaaggaaggaaggaagaactaaggaaggaaagaagaactaaggaagaaaggaaggaaggatggacaaaggaaggaaggaaggaggggcaagcatactggcatgcacccctttactttaatcctaaggaagcagaggcaggtggatctctgcttccagccagcctgggctacatagtgagacattgactcaaaacaacactaataacaataatgaagcaatattatggctgatgaccaggctgtttgtggctggagtagcaattctccaaagacagctgctaaatcacctcggcctgtgtgtaagcttcagttgcacatagcatggcctggtgtctcacctgcagtctctaaggtcatgcgctgtgccttccgaagttggatcatgagatacctgcgactggttctcctggaatgctgactccagggacactccctcttggaacccagcttccatacggagaaacccagtcatgcagatgtgtaggcatccattcatcaggaccagctaacttaagctccagccggcagccaccattacctgccagccattccatgagccacgagatgcccaagggcccagcttccaacaaccttatgatttggcaagagccaccttgggagatgtagtagcagcagccaggctgaagtgggtgagcaaaaatgaatgggagattgttcacttgtttttcagggagtgttgctgtgactggagtcagctggagtctggaggtttggtgtgttttaaagacaggcaatcatggggctggagagacggctaaatgattaggaacacttgttgctattgcagaggaccccacatggtagctcatcatctgttccagctccagggttctgcaaccaagtacacacattgctacacatgcaaacctttaaaaaaataatcagtactgccaagtggtggaggcacatgcctttagtgccagcacttgggaggcagaggcagatggatctctgagtttgaggccagcctggtctacagagtgagttccaggacaaccagggctacacagaaaaactctatctcaaaaaaaaaagtaagaataaaaaataattacaaataagggtaataaatactacatcatggttgtctgttgatgttttggttctgaagatcctaaagacagagaagactaaagagaagaaagtgaagaaaatagagtctttggaaaagcaacaggggagagacctagagctacaaataaagacaaggactaggtgtgatctacatacaatcccaacacttggtatgcgtagtcaggaagaccaagagttcaagaatctcatgtagacatagctagcttagtgacagcctgggctacatgagacccagccacacccacaaaaaagatggtgcataagcataggtttgtgaatttgaaggttcaaggcaccggccataagataatgatttgaatgtgtcctctaaaagttcacatatcagaaatgtaatctccaaattcataaaataatggtatttggaggtcaggctggtgataattagttttaattatcagcttgatataatctagaatcacctagaaaggaagtctcagtgaatgactgtctaaactaggttggcctgtaagcatgttcatgcaggattatcttgattacattaattgagatggaaagactgcccactatgggcaacaccattccctaggcttagggttctggataaaaaacagaaaggcacctgaccactaagcatgcatacattcactcttcctttgctgatgactgtggatgtgaccagcttcttcaagtttttgctgccttgacttccccgagtgatgggctataatctggcattgtgggctcagagaaagcttttcttcccctcagctgcctttctcaaggtattttgttgctaaaactataaactaataagacaggacctctgtgagttaattaagaaggctgtgaggatggggttttctcatgatggtactaatgcctttatataagaagcctgggtgtggatcagtggtacagcaacagccctggattccatccctaatatcataaatatatatatatcagaggaaagagacttaggcagcacatttgctcagtccttccattagaacctcctgtcc

SEQ ID NO: 1086 - DNA, 489 bp, Mus musculus
atgaacccagccatcagcgtcgctctcctgctctcagtcttgcaggtgtcccgagggcagaaggtgaccagcctgacagcctgcctggtgaaccaaaaccttcgcctggactgccgccatgagaataacaccaaggataactccatccagcatgagttcagcctgacccgagagaagaggaagcacgtgctctcaggcacccttgggatacccgagcacacgtaccgctcccgcgtcaccctctccaaccagccctatatcaaggtccttaccctagccaacttcaccaccaaggatgagggcgactacttttgtgagcttcaagtctcgggcgcgaatcccatgagctccaataaaagtatcagtgtgtatagagacaagctggtcaagtgtggcggcataagcctgctggttcagaacacatcctggatgctgctgctgctgctttccctctccctcctccaagccctggacttcatttctctgtga

SEQ ID NO: 1087 - protein, 158 aa, Mus musculus
MNPAISVLLSVLQVSRGQKVTSLTACLVNQNLRLDCRHENNTKDNSIQHEFSLTREKRKHVLSGTLGIPEHYSRVTLSNQPYIKVLTLANFTTKDEGDYFCELQVSGANPMSSNKSISVYRDKLVKCGGISLLVQNTSWMLLLLLSLSLLQALDFISL
